United States Patent Application Publication US 2022/0102000 A1 - sequence listing, part 21

SEQ ID NO: 4255 - DNA, 32759 bp, Unknown
  16S sequences of unknown bacteria
agccgccgcagccgcgtgttccgtccctgttcgggcacgaaacaggcagattgacggggagtttgtatatcttttccccgtatttttctttcagcattgtgccgtagtcgttgtaaatatgcatttataaatctccgagaggatgaaaaacgtgaactctttcgaacttacaaaaaacaaaaaactgtttcttcttgatatggacggcaccgtttatcacggtgatgttcccattcagggcgcgacggattttataaaaagtctttgccgaacgggcgcagactatatctttatgacaaacaactcttcaaaaagcgcggacgcatatcttgaaaaacttcatcggctcggggttcccgccgaaaataagaatattttgacttccggtcaggcagccgccgtttttctttgcaaaaataaagaacacgccgccgtttacgttatgggaaccgcgtctttgagacgggaacttgcgtcttacggtcttgacgtccgaaccgaacccgataaggacatagactttttgctcgtcggttacgatacggaactgacatacaaaaaaatggaagacgcctgcgaacttatttgccgcggcgttccgtttttcgcaacgaatcccgatgttgtctgccccgcgccgaacggcaggtatctgcccgactgcgcaacgatgtgctactgtcttgaaaaagcgacgggcaaaacgccgttttatataggaaaaccgcgacccgaaatgccgcttgcggcgctgtccgttttcggcgttgataaaaaggacgccgtagtggtcggcgaccgactgtatacggacatcaagtgcggcgtaaatgccgggatagataccgttcttgtcctttcgggtgaaagcaccgttgccgacatcgaaaaattcggcgtaatgccgaccgccgtggcggaaagcgttcgcgaaatgataaggtagaaccgaaaaatcagtccatatctatctttatgcgctccctgtccttgctctttttgtttttcgttctgcgcttgttacccgtgactttcgctatcgtataaacggctatcgccaaggcgacaacgacgattatcgcaataaagaaaggtcctttgaaaaacgaatttatcgcttgtgtgaatttttccatggtgtcaacttcgactgcggttttcgttacgaggtcggacgttccgtagacctgtccgttatagcggaggatcagcgttccgagtttttcgccgcgccctatcggtgcatctatttgctccggtgcgtctatgaccttttcgataagcgattggtcaaaacttttcggaagcagcgcgtttatatcgcttgttacggtcagaacaacaaaatcggcattcttccccgtccttactccgacttcgcagaccgtatctccttttgaaatgagacgcgtcgaaacatattcgttctttgcgaaccgaaccatttgttttaagtcgttgtaaacgttgactataccttccgtgtccgccgcaatggcaagaactcgcatattctttgttgttgtgacgcacgcggaactgtaaccgccgtccgcggaagaataaacgccgagccctgttatgtcggagatataataatcagatgacggaactatcgtggaattataagaataaagcgttctgctttcgccgttcacggttatcgttacaaccggcgaactgataaattctccgaaacgttcaagcgtcagcgcgtgttgcagaatcacggaaatatccgctatcgtggtagtctttgacgtcgcggtaaaataactgttcacgccgccgaaagaagtttccgaaacgccgaggtctcggacgtatgagttcatcgtttcgataaaagatgccgttcccttgttgttgacgtagtgcgcaatggcaatacaagcttcctgagaagcggaagtcagcgccgcttttacgaggtcttccaaagaaatgacatctcccgcacggagttttgcggcactcaactgcgccgtttcgtctattactgcttccgttatcgttacggtctttgtcagatcgggttccgattcaatcagtatcatgcaggttacgacattcggcagaaatccgcaataaaaaggctcatccgcgcgcgaagagtaaagaaccatatttgtgtcgatgttgacaagaagcgtccgcctgcacgtcggcgtaagcgtattttcctcttcttccgcaaacgcgggcaaaaagaccgacaacgtcagaaaaacggtcagtataacggaaagtattctcaaaacgctttttcgaacggtcatcggcggtgtctccttgcaaaaatctgttattaaatacagtatagcatatattttgcattttggctatacttaaattattaaaatttataattttttatattaaggtttcctctattcattttttgttcggacaaaaaaacggcgaaaatgccgcgggacgcggaaaaataacaaaaaattcaaaaatcactcttgaaaagggatttcttttatgttataatgttgataccttgcgtaaaggtgctttgtcgtgctacccgttccaaggcggctcgtggctgaaacgccgacaaaaagaggtagtgcaagcctcttcaaaagcgttgaagcaagccctttcaatacctgcaagggaggcaattttataaggaggtgccgtcaatgggaaaagataaggttgttcttgcctgctccgaatgcaagcagagaaattatttcacaaccaaaaacaagaaaaacgatccggacagacttgaaatgaagaagcattgtaagttctgtaagaaacacacattgcacaaagaaaccaagtaggaggacgcgaaatggctgatgaaaagaaggctcccgcaaagaacaagaaacccaatatttttgcgcgtttctttaagtatttgaaggaagttaagagcgaactcgtaaaagttacctggcccgctcccaagcaggtcgtacgcgacacccttaccgttatcgtgattgttgtcataagcgcagtgtttatcggtgttattgaccttgttttcaagaacatcgtaagcttttctgtcggacagggaatcgcgaacctttttagttgacttttatgagaatttatatcatctctgacggagggaatgtctgatggccgaaacggcgcagtggtatgttatccacacatattcgggttatgaaaacaaagtcgcaacgtcaatcgaaaaggtcgtagaccttcgcggtttgcacgatttgatttgcgaagtcaagatacccatggaaaaagttcaggatgttaaagagagcggcgaggtcgttgagaccgaaagaaaactgctccccggttacgttcttgtaaacatggtcgtcaacgacgatacttgggttcttctgcgcaatatccgcggcgttaccggttttgtcggccccgaaggaaaacccattcctctgacagatgaagagatccgcaatctgaaccttgttcagagcgtggaagaagccccgttcaatgcgggcgacaacgtcaaggtcgtaagcggacccatggcaaactttacgggtatcgttgaaagcgttgacatgaaagagcggaaagccagagtcatcatctccatgggtggtcgtgatatccccgcggagataggcataggcgatctcgcggcgctgtaaaagcgcaatttactaattacggaggaaactgaataatggcacagaaagttaccggttatatcaaactgcaaattcccgcaggaaaagcctctgctacgcctcccgttggtccggctctcggtcagcacggcgttaacatcatggctttcattaaagaattcaatgaaaaaaccaagaatgacgtaggacttatcatccccgttgttatcaccgtttacgcggaccgttcgttcacattcgttacgaaaactccgccggcagcggttcttatcaaaaaggcttgcggcattgagtccggttcgggcgttcccaacaagaccaaagtcgcaaaaatcacaaaggcgcagattaaagaaatcgccgaaaagaaaatgcccgaccttaacgcgaacgacgtcgaagccgctatgtccatgatcgccggaaccgcgagaagcatgggcgttaccgttgaggactgacatttgaacacggttcgcaaaaaccgaaccgctttataactgtgggaggattatttccgaacaaccacataggaggatttttttaacatgaaaaaaggcaagaaatatattgaaagctcgaaaacaatcgagtcttccaaactttatgataccgccgaggcttgcgaccttgtttgcaagaccgcaaaggcgaaatttgacgaaaccatcgaaatgcacgttcgtctcggcgttgactcccgtcacgcggaccagcaggtaagaggcgctatggttcttcctcacggaacgggcaaaacgatgagagttctcgtattcgcaaaagacgacaaagcgcaggaagcgcttgacgcaggcgctgattatgtaggcgcagaagatatggttaccaagatccagaaagaaaactggttcgaattcgatatcgttgttgcaaccccgaacatgatgggcgttgtaggtcgtctcggtaaagtgctcggtcccaagggacttatgccgaacccgaaagcaggcaccgttacgatgaacgttgctcaggcaatcaaagagatcaaagccggtaagattgagtaccgtcttgacaagaccaacatcatccactgtccgataggcaaggcttctttcggcgcggaaaagatatctgaaaactttgacgctcttataggcgcaatcgttaaggcgaagcccgcggctgcaaaaggtcagtacatcaagagctgcgttatcgcatccactatgggccccggcatcaaggtcaacacgaccaaatacggtgtttgatttaatcagacaataacaatttacggaaccgtttgaaaagacggttccgttttttcgtccgaaaagtgttgcctgccgacgtttgacaattgaataaggctgtgctatactgtttaagtcaagtatattcgggctgtgatacagcgagaggaaaagatgaaaaaaacatttgtaacggttatgccgaaccacatcggcgcatttctgaaagcaagccgctgtttcgcggaactgggagtaaacataacaagagtgagttataacaaggcggtcgattcgcacactctttttatagatgcggagggtactgcggagcaacttgaaaaagcgtccgaaatgcttgaaaaaatcggatatctgcaatgcggagaaagcggaagaaccgttattttgcttgaattcagacttcgcgatgttccgggcagcgttacaaaggtgcttgaacttatagaaaaatcggggttcaatatttcctatatgagttcgcaggaaaacggcaccgactgccaatatttcaaaatggggatagtcgttgacggtcgcgaaaaccttgacgggtttcttgcttcggcacggaaaatatgcgacgtccgtgttatagactacaatcatgcggacaaggtgtacgacaacagtctgttttacgttcattttgtcgatgaactttcatctatgatgaacatttccgccgattcgagagaggcgcttttggtcaacatcaaccttgcaatgcagcggctcgatgaaacgggcgtttcgccttatcgcacctttgacagcatttcccgcttttgcgaattgctctccaaatcccgaggaaaggatttctctccccgcatttcgacccaccgcataacggaaaagaccgaaattattctgatagaacccccgtgcgggagcaatacggcaataatcaaaagcggaagcgactgcctttttgttgatacaggttacgcatactgcaaagaggagatgaaccgcatttttcgtgagttgataccgtcttttgacagtattgaaaagaaagcatttgtcactcacgccgatgttgaccattgcggacttcttcccgaatttgacatcgtttatgcgggtgtcggctctgccgaatgcctgcggcttgaatatgaaacgggtgacggttaccgcgaacagaatccgatacacaagccgtatattcagatttgtaaaatactgacttcatacagccccacagatccatcaaaaatcgtgacggtcggcggcgatgcgcaggacgaagacgtgctttcccgtgtgggcttttttgatttcggagatcttcattttgaactttatacgggacgcggcggacatttgcgcggcgaatcggtgcttatagattatcagaacaaagtcgtattcagcggcgacgtttttgtgaatatgaaagatatgacggcaagtcaggcgcagtataaccgttacgcgccgatacttatgacttcggttgataccgacccgaatctttgcgcacgggaaagacaggcgctttttgcaaggctcggcgtcggcacatggcagatattcggcggtcacgggggcaaaaaaatatacaacgttaaacccgcggaaatataaattgagaatggttattctgcccgggtaaccggcaaccgtgttttaatatcgcacgattttgtaagaaccgaaaaaggctcttgacttaaagcgcgctttaaggtgtatactttgcttgaaaataaaaaactatcggaggatatgaatatgagaaaaaatctcggtgcaaaaccgtatacttatccgcagcctgttttcattcttgccgcttatgacgaaagcggcaaaaccgacgcgatgaatgccgcatggggcggtatcagcgacggcgacgaactttccatgtgcatcagcgcaggacataagaccacaaaaaatcttttgaacagaaaagcgttcaccgtaagtatggcggacgtcaaaaacgttgtcgcgtgcgactatgtgggaatagtttcgggcaataccgaaccgaacaagttcgaaaaatcgggttttcacgccgttaagtccgaatttgtcgatgctcccgttatcgaggaacttcccatcgcggttgagtgccgtctcagaagctatgaccccgcatcgggcagacttgtgggcgagatagtgaacgtcagcgttgacgaacgtgtgcttgacgcaaacggcaaggtcgatgttgaaaaggttcagccaatcacctttgaccctttcaacaatacctatgtcgcactcggcaaaatcgtgggaacagcgttcagcgacggcaaagaactgaaataaaacaggaaaaatctgttttatcttccttaaaaatatcgcgtccgttcgggcgcgatattttttcgaaagttgcctgaggaataataaaaacttatacgccgaactttctgtatgaatttattgtttcgggttgtttattgcgtctgcttatgatataatcgtcaggctaaggtaactataaaaatttgtataagaggttcaaaatggttaaattgaccgaaaaactgctttgtcttttattgtgcgccgcgattttttgcggaattgctgtctcctcttccggttcgtcggcaaaggcggaagaagttgtttcttcgctgtccgcggaagagcttgcaaaaatgccgaaatacgatggcagagattacgggatcgtaacgcctgtaaaagatcagggaacgaccaatctttgctgggcgtattcgtccgtcgcggcggcagaggcaagcattttgaaatcgggcatagacccgacggcgacaaaggacagcctttcgctgaatccgaccgcagttgcataccgcgtttttcgcagaacggcggatcctctcggaaatacgggcggagagcagaagtccggagatttcacacaggcgacgggaaatcctctttatgcagcaaaacttttttcgatgtggtgggctcccgtggccggttcgcaggcgtccgcggacccttatgaaaacccgtcttacaggtttgaaaacgcgtattatatccccgataacagatccgaccccgacgcgtatatagcggcggtcaaggaagccgtcgcgacatacggcgcggtgactttccaatacaacaatatgcgcgaaacggcgtattacaaccccaaattcgagggaggagggggcagctcgccgcacgcctgcacggtggtgggctgggatgataccattcccgcaagccgctttcagcccggaggagcgacaaggaacggcggctggcttatcaagaacagttataactctctcgaatatttctggctttcttacgacaacacaagttcaagcgtgtatgctttcactttcgctccgaaggaaaaatacgattttaactattactacgacggcaacctcgacgatttttctctcagaaaagataaatatgtcgcaaacgttttccgcgcgcagaagggcggagaaaacggtaaatcggaatatataaaagctgtcaatgtcggcgtttcgggcgaaaacgtcacggttgaggtcgaagttttcaagaaccttgattatcctttcggcgggcagagcgatgttccgacctcgggcggcttttccgcgtcgaagaagacgataacatcctctcacggcggttaccttaccgttgagttcgactctcccgtcaaggttgaaaaggacgaatggttttccgtgatcgtccgcgtttccaaccccgaaaacgacgcgaaaatcgttactgcctacaaggacgtaaaaactctttcctacgcaaacggcggttacggctggtcaagcctcggcaactttgtcggaagaataaaggcgtacacctcgcttgaagaggacgccccgactcttcctgattttaaagtcgcttccgctttcctttctctcggggaaagcattgctcttaatttcagggtcagaaaagatgtttgcgacgcttatgaaaacatttacgcgatagttgagtgcgacggggacaaacggcgtataaacggcgtgacagatgaaagcggcagactcagatttttatatgataatctgacaccctcgatggcaaaggttcctgtggtctttaccctttacggtacggcgaacggacaggagtattcccatacggtcgagtattctgtttatcaatactgcgtcaatatgttcaacaagacggaagatgttgcgctcaaacggcttttgactgatcttctcaactacgccgcctcggctcagatctatacaaattaccgaacggacgatcttgccaatgcgggttttgatcagacctatgccacgaaaacatttgaagagcctgtcagccaatttgataaggcgtatgtaaaaacagattctccctctgttgtctggaagagtgtcgcattgcggttgacagagtgtgtaggcgtgcgttttcagttcagcgcatctgatctctccgggctgtccgtgatgttctccatcggagattacaagtatgaaacttccgaattctttgccgttgacggaaaaacggacagatattatgttttgttcggtggtattctcccaaaagagatgcgcgaggcatttaccgttacggcttacagaaacggagttcccgtcagcaacaccgtaaaatacagcattcagacatacgcagagggaaagaccgaactcggaactcctctttcggagatgcttgttgcgatgcttaaatacggcgattcctgcaaggcatatttcggttaaaagccgaaactgcgagtcagcgaaaactgaaaaaaatgcgttttttgaaagcgcccccgaaagccgacggcttcgggggcgctctttatccgttccttttttatccgttttgcagttcttttcgctttgctctgcggacgcggttgatatggcgttcaaaatctccgttgttaaggagttccgtcagaacaagctgttcgtaagtcggaacggtgcaggaatagaagccgaccttttcctcaaagggttttacaagttttttcggcagaaccatgtaaccgatacgcagagacggcgagatcgtctttgaaaaggtgttcagatatatcacgttgtctttgtccgcaagcgcgaatatcggatctgcgggctttgcggctaccgcaaactcggaatcatagtccgattcgatgataaatctttcggctttgtccgcccagcggatatattcatatctcttggatgccgacgcggaaacgccgctcggaaaactgcggcagggcgttgtgtgcaaaacgtcggctttcgaggaggcgagcgccgcgctgtctatcccgtcttccgaaagcggcagtttttcatattttacgcctgttgcgcggtatatttttcctatcttttcatacgaggggtcttcaaacgcatataccttgtctctgccgagcaggtcaacgagcagcgcataaagatattccgcgcccgatccgacaactatcttgtctgcatcaacatcaatgcctttgttgcgtgcaagaaacaacttcaaagccgtccgcagttccgcaagcccgatattcggggatttttcgagtattctgtcattatagtccgaaagaacacggcgcattgttttgcagagcagggaaacgggaaaagacggtttttcagatacgtctttttgttttggtaaaatctgtccgatgcttttttcggaagaagcaaagccgtcgctcggacggaaaatgacgaaaaatccgcttctttgccgcgcttccgcatacccctcgtcgcaaagcagttcgtatgcgtgttcgaccgttatagtgcttacgccgacttcttccgcaagcagacgtttggacggtagtttgtctcccgttttataattcccgcgaacaatatcttctctgatctgtcggtataattgcagataaacggggtgttcctctttttttatcagatatttcatctggttatattatttcctctcgttttgactattttatattatcagaaatattgtataatactgttattgaaattgcaagggggaaaccttaaatgtcagaaaaagtaaacaaaggcaacatcacgttcagactttgcctgaccgccgtgttcatggcattgacttttgttgccacaaaatttttgcagattccgtttgtcggagcaaccgggtattttaatctcggtgatgcggtattgcttacgggtgcgttctttctcggtcccgtttacggtgcggtcgccgcaggtataggctctgcgcttgcggatattatttccacttttgcgatatatgctcccgcaacgcttatcataaaagcgcttatggctgttgtgtttttccttatcgccgtaatgccgatgaaaaagcaaccgaaagtcggcgtcagaatagtttttgtcattctcggcgcacttgttgcggaagcgataatggtcggcggctattttgtgtttgaaacgattttgtacggtgcgggaacagcggcgctgtccttgatcggaaacgccacgcagggcgcgtgcggtcttgttatcgccgcggttctcgtcaatgttctttcgtcgaataaaaagataagaggactttccggtttggaaaaaagaggctgaaacaacgccttataaatatcataagaggtttttaatatatcaaagaaggttaacgcaagaaataccacggtttggaaaggctgagtctactcgaacacttatcgcccgacacaggctattttcggttatttcctctcttttcgtcttggcgggctcgacgtatttacaaggcttttgtgaaagttagggcgaaaatcagcccgttaaaaccgacaagggttcgggtatactcagcctatgcaccaccgcaatctttatggcgatgaacgtcgctttgagctcgttcggcgttcccgttcccggcggacatttgtatcttaacgatatcgttatctgccttgcggcgatattgttcgatcctgtcgcggcttttatggtcggcggctgtcggcgcggttgtcggaatgattctgtgctggccgtgcggtcttcataaagtatataccgcgaagattctcaaaaacagataaatacgacctgaatgcgaatgagccgcaaagaaacttatgtttctttgcggctcatttatattttgtattttgtaattttgcgattggaaaaagtatgccgttcgcttttattgctgcctgtcggcagacgttactccccgcttttttctatgggcagaatcacctgcgtgataaaatctttttcgtcgcggtgctgtgcgggaccttcaaggtaaacgtgacggcaaattcctttcagtctgtatccctttgcctctgcgaatgcaatcatcttgtctctgatgtcgggaatggtctcataaccgccgtgaaagaagacgcagagtgctgtttcttcgtttaacttgcgtataaattctccgttactgtcgggcttgaccgcaatacaataagaaattcggtcgtggtcggaaaggggatattcgataaagtacattctcttgcttgtgtccgaaccatagcttcgcatcgcttccgttatgacttttcgcaggtgcacttttctttcctcgactgtcggcgcacggaaagtctgtgaaaaaaccgtctgcgcaggaaccgtcattatgcgaaattcaaagtcgttgtcgctttttacgcgctctttcaacttttctatattcagattcagttcgtcgcggattttttcaagccttgctatcatcggacgcaggtcggcatcttcgtcaagatacttttttatgtcgtcaagcgacagtccgagattttgaaaaactcttatcgtccgtatgcgcgtcagcgtatccaccgtgtaatatctgtttcccgtaacgccctcttttttatcggcttcgataagaccttttgcttcgtaattcaaaatcatacggcgggttatgtcaagagatttcgcaatttccccgatggaaagaagttgtttttcttcatttttcatgaaatttctccgaaatacaaaatttttcacaaaaaggtattgcatcgtacatcgatgtacggtgtataatcattatacaataaacggttcgctgtgtcaagcatggcgaagcagacgttaaaattttgcaaacatcggggaagccccctctttctccgaagttatatattcaccttcttatcccttgccgcccgaacggtcccctccgtttgagcggcacttccctttttatgtgcctcccctgtcggaaaaagtattgaaaagacgcaaaatgtgtggtataattgtcttgaaaataattgtaaatgcaaggcgggcaatatgccgaaaataggacaaaaaacaaaaggaataatatatatcgtcgttgcggcgttcggcttttccgttatgtcgctgttcgtcaaacttgcgggagaccttcccgcgtttcagaaagcgtttttcaggaattttatcgcgctgatattcataaccgttatgatgctgcgtgaaaatatagggtttgctccgaaaaaagagaatattccgggacttctgggcagaagtctttgcggcacgctcggtctgctctgcaatttttacgccctcggaacgctgaacctctcggacgcgaatatgctgaacaagctctcaccttttttcgcgataatcttttctatattcctgcttcgcgaaaagccgacagccgcgcaggtgctcggtgttgcggtcgcgttcggtggcagtctgcttatcatcaagcccggttttgccgacgcacaacttatccccgcgcttgcgggcgtgttgggcgggcttggcgcgggcgcggcgtacacgtttgtgcgcaaactcggaaaaaaaggggagaacagcaagaggatagtcttttatttttctgcgttttcgtgcttgttctgcctgccgtttttgatagtccaatataagtcgatgacgtttttgcagacgctttatcttatttttgcgggaacgtttgcctgcgtcggacaactcggaataacaaaagcgtatctctgcgcgcccgcgaaagagatctccgtttacgattatacacaagtcatttttgccgcgcttctcggatttttcgttttcggcgatctgcccgatatttggagcgttctcgggtatatccttatttgcggcgcgggtgtcgcgatgttcttttacaacaaaagaaaagaaggataacgcccaccggtcggtttcattgaaaagttgagcagttttcaatactacttttcaatgagaagttgaagagccgtgaaaaagtcgcgggtttgagtaaaaacggattaaacagtcgggcggcggattgacaaacagcggcgtctgtggtaaaattaaaaaataaggcgtcagaaagcggtcggaacttcggaaaacggaagttcgtccgaaaaaacggcgcaacgagattataaggaagtatcgtaatatgtcaaaagtacacttttatatcgcgatggcggcggcaaaaacggcgcaccgtttgctccgtctttgcggacgtgcggcaacgcacactccgggcgcggtcgcaacaaaactttgccccgactttttgcgttatctgcaaaaacccgaaacgcttatctgtgtgacgggcacggacggcaaaacaacggtcagcaacctgctggcaaccgttttgcagaataacggttacacggtcacaaacaacagttacggctcgaatatctgcgagggtgttgtttccgcgcttctgacggatgcaacgttttcgggaaaaccgaaaaaacaggtcggcgtgcttgaagttgatgagcgcagttcgctcaaagtctataaatacctgacgcccgatattcttatctgcaacaacataatgcgcgattcgttaaagcgcaacgcgcacacagaatttatctgctatattctgaacaagcaactgccgccaagcacaaaagttgtgctgaacgcggacgatcttatctgctcgggactgtttccgaacaataaggacagaacgtatttcggcgtttccgcagaccgtcccgaaaacggtgcggcgacggacgaagcgctgcgcgacatcgtttactgcccgaaatgcggcgcaaaactcgaaacggaatatgtcagatacaatcatatcggaagacatcattgttcctcctgcggctttgcttcgccgaaacccgattatgacgtgacggcaataaaccgcgaaaaaggcacgtttacggtcacccataacggcgttgatgaagaatataagatagtcaacgacaatataatcaatatctataacagctgcgctgtcatctccgttcttcatacgttcgggcttgattatgaaaagatacacaatgcgtttgagaccgtgaagatagtaagttcgcgttttgacatcaaaaaggtgggcgactatactatcatcgggcaacttgcaaaagggcagaaccccgttgcgtgcgcgatggcttacagatatgccgcgtcgtataagaccgcagaccccgaagcgaaaaaaagcgttctcgtacttgtagacgacgtgggcgacaactcgggaaattccgaaagcacctgttggctttacgactgcgattacagcgcgctttgctccccgacgataggacagatagttttttccggtccgcgctgccttgaccataaactgcgcgcgcttatggcgggtgtcgatgaatcaaagatagttacctgtccgacattcacgggcggcgtgaaacttgtagataccgaaaaatacaaagacatttttgttttgtttgacccgtatctgatagcggaggggaatgcggcgaaacgttatcttgaagagaaagggggcgcggcgaaatgaagatagaatttcttttcggcgaggtctgcaacttttacggcgacccgcaaaatgtgacatatcttgcccaaagcgcgaaaaacgcggaaattataaacacctctttgcttgacgagccgtattttgtccgcgaacgccccgatatcgtcgttatggcgtcgatgagcgaaagcacgcaaagaaaagtcattgaaaaactccgtccgtatacggcaaggatcaacgacctgataaacgacggcgtagtctttctctgcacgggcaattcctgtgagatattctgcaaaaaaataaattatgtgaccgaagaaataaccgccgaggggctcggacttttcgaccttgaagtaaagaccgacctttttgcgcgttataacggaaaagttctcggaaaagccgacggcgttaccgttacgggcttccgctcccaattcgggaagatatacggcgataattcgtcctgctttttctgtgaagtcgagcgcggaatgggcataaacgaaaacagccgctttgagggtatgcgaaagaacaatttcatcggtacgcaagttctcggtcccattcttcctcttaaccccgaattttgcgaatatattctgcgtcttgcgggcgaaaagaaccccgttgcggcgcataaagaggctgcgacggcggcttttgaacagcgtcttcgtgagttctccgacccgaaagttagattttgaaacaacaagtggctgtaaaaaaacgcaagtttttttccagccactttctttatttcccttatacggaagcgtttttccgttctcttgaatcaatgaccttccgccgcgccttttgtgggtgggtggggagagagcgtccggaatcctgcctgtttccgaacgcgcggcgcggcgttctgtcatcattgccgtgcggacgaaagaaggcctttgtgagagatacattcggatatcttccgtcttttcttccggcaaatacattatacgaagatgaccgtccgataaacaggactttgccgcgcgcaaaatgaatatacgaaaaaaaacaagacttccgacggaaaactgcatttctccgtcggaagtctttgatttttgttatgtccgccgacctcgccttttgattgcgtgaaaggtgagcccgttcggttcagtcgtccgaatggtcttccgggtctttgggaaggtagactttaaaggtcgttccgatgccttgcgcgctgtcaaggcttattctgccgcccagatacgaaaccgcgtgcttgactatcgaaagccccagccccgcgccgcctgtctctttcgagcggctcttttcggtgcgggagaacctctcgaacaccctgtcaaggtcttcgggcgggattccgatgcctgtatcggaaaccgtgatgaccgcctcgttttcttctttgccgacggtcacaccgactttgccgcccgcttcggtgtaacggagcgcattgtcgcaaagattgtaaactatctcgtgcagaagtctgcgaacgcccgtcacggtaatttcttcgccgccgacggaaattttgatgtctttatcctttgcggtcgccgcaagcgcaccgacttcctcttcagcaagcgcgagcaagtcaacttcttctttcgggaactccgcgttttcgtcaagctgcgaaagcccgatgatgtcatcgacaagagtaacgagcctcgacgcttcagagtgtattctcgaaacgaagcgcggcatatcttccgctttgacaagcccgttttccataagttcagagcagcccattatcgagtgcagcggcgttttcagttcgtgcgaaacgtttgccgtaaattcgcgtctgtttctttccgcaaacgccttttcggttatattgaaaaccaaaagcacggtgccgcccgcattcggcggtgttcctatgcggcttgcgttcatctgataaattttgccgtttctttccgtctgtaattgcgcgctgccattttccttggcttccgctatcgttttgccgacttcaagacttctgtcaaccgtcaaaaagtcctgtcccacacatttttcgtccgtgccgaacaccgcttccgccgcagggtttatgctcagaacagtgttgtttgcgttcaacagcacaagaccctctttcatgcttttgataacggcgtaaaactcggctttatccgtttttgatttcttcaactgtgcgcctatgagcctgttctgtttttctatcttgacaagcagcggcgaaagttcgtcgtatacgttgttttccagcggtttgtcaaggtcgagcgagttgagcggttcaactatttttttcgaaagactgcgtgcgagcagaagcgatactatcagcgctatcgcgatgaccacgataagcggctgcaccattccgagcacaagcgtcagcacggtaagtcttttgaccgcaacgcgtagcaccgttccgtcattcagtttttttgcgtaataaacggtttcttccgtgagcgttgtcgaatatctcgaactctgcccgaaacccgtttcgaacgcctgagcgacttcctgtctgtccttatggttctccatgttcgccgtgtcgccctcggaatcgaaaataaccttgccgtcagccgctatccatgtgaaacggcacgacttttcatctacgctttcgagatagtcaagcccgtttttctcaacggctgtcgatgccagcgcaagttcggattgcagattgtctttctgcacagatgtgaagtggctgtaaaggattccgagaatcagcacaaagcacgccgcaagaacgactgcggcaaccgcgattatcgaacggaatatttttttcgtcattgtttatgtccctttctttcgggcatttttcgcacgatgttccgccgtatgcccttttcgtcggagcgtcacacggtctgtcctttgtgaactcccgtcacggaaaagatgacccattccgcgatgttcaccgcatggtcgccgatacgttcaaaatattttgctatcatcagcaggtcgagcgcgtgttctccgtctgcgggtctttgggctatcatgtttataagcgaacgcttgactttgagaaaataatcgtccaccgtgtcgtcgtgcgctatcgcctgttgagcaatgcccacatctctttttacgaacgcgtcaatgctctccgtcaccatgcgtatggtcgcttccgccataagacaaatgggttcgcagtcaacgcccgcctttttgtctataaaggtgattatttccgcgatgtccgacgcctgatcgcctattctttcaaggtcggttatcattttcagcgccgcggatatttgacgcaggtctcttgccacgggctgctgttgaagcagcattttcaggcaaagagattctatatctctttctttttgatttatttccgcttcgagcggctccactttcgccgccgttttttcgtcagccgtcgtcagcgcttttgcagcgtcggctatcgcctcttcgcagagcgcgcccatttctataagttccttgttcagcgttgccagctgttcgtcaaatctgcttctcattatccgaacctccccgtgatgtaatcttccgtgcgtttatcctgcggctgttcgaacattttttccgtgccgtcgtattcgacaaggtcgccaagcaggaaaaacgccgtgtagtccgatatacgcaccgcctgttgcatattatgcgtaacgataactatcgtgtatttctttttcagatccatggcaagatcttctatttttgaggtcgaaatggggtcgagcgccgaggtcggttcgtccatcagaagcacgtcgggttcaaccgccaatgcgcgggctatgcaaagtctctgctgttgtccgcccgaaagcccgagcgcggattttttgagtctgtccttgacctcgtcccatattgccgcgtcgcgcagcgagcgttccacgatgtcgtcaagttttgccttgttgcgaacgccgtgcgtgcgcggtccgtaagcgatgttgtcgtaaacgctcatcggaaacgggttcggtttctggaacaccatgccgatgttcttgcggagttcgtttacgtccgtgccgggggaaaaaatgtccttgccgtcgtatttgacttcgccggttatgcgaacgcccggtacaaggtcgttcattctgttgagcgttttcagaaatgtggatttaccgcagccggatggtccgataagtgcggttatgctgttttttgctatatttatattgacgtttttgagcgcctgcgtgtttccgtaccaaagacaaaggtcgttgacggttataatattgctcatatacttctcctctttttgaaatatttgccgacgagcgccgccgaaagattgatgataagcgcaagaatcatcagtatcgccgctatcgcaaacgcgacgtcgaatttaccgcgctcttttgcataaacgtaaagtgcgactgtcagcgaggctcccgaacttgtaagtccctcgaaaagcccgtttacgacgtgtgcgacgcccgccgtgaaaagcagcgccgcggattcgccgaggattcgtccgacggaaaggatacagcctgttataacaccgtcgatacagcccggcaaaacaaccgttcggataactctccatttgcccgcgcccagcccgaaagcgccttcacggtaactctgcgggacggttttcaggctttcctgcgtggttctcataaccgcgggcaggttcattataacaagcgtcagcgcgcccgcgattattgatgtctggaatccgatgaattgacagaaaaacagcattccgacaagtccgtagataatggacggtatgcccgaaagcgtttccgccgcatattcgattattgcaactattcttttgttctttgcgtattcagtcagatatatcgccgcgccgaccccgagcggaagcacgaagacaagcgtagccaaaacaagataaacggtattgagaatgtcgggaagaatgcctatcgtacccgaaaggtaactcggcgaggtcgaaagcaattcccatgttatattgggaagacctttgtaaaggatatatactataagaaaaagaaccagctcacaggtcagcgttaccgcaacgcccataagaacgttcatcgtgaccccgtatgcttttcttttcaaagacgttttgttgtttttcatattatttttccttacgtcctttcaagaagaagttcagcgcggcgtttataagcatgatgaagaggaacagcacaagcgctatcgagaaaagagcctgtctttgaagtcccgaagaataggacatttcgcttgcgaccgccgttgtcagaaaacggacgctgcccataaggcgcggcatattcgcaacgttgcccgcaaccatcatgaccgccatcgcttcgcctatcgctctgccaacgccgagtacgaccgctgccgcgataccgctttttgccgcgggaacggaaactttgaaatatgtttccgtcggtgtcgcgccgagcgccaaagaagcgtcctcatattctttcggaacggcttccaacgcattcagcgaaacttttatgatagagggcagtatcattatcgcaagaacgattatcgccgccagcaggcttgcaccgtccggaacgttgaatatttttcttatcgcgggaacgagcactatcatgcccacaagaccgtaaacaacggagggtatgcttgccagcaggctgactgccgattcaacaagtgttttcattttcggcggcgcaacctttgcaaggaagaccgccgtcagaaatcctatgggaacacccaaaagtattgcgcccgcggttccgtaaacgcttgtcaggataaacggcagtattccgaatttcggttcttttgccgtcgatgcccattccgtgccgaacaggaaatcccaaagccctattttcgttatcgcgggaatgcccgatattatcagataaacggttatgagcagcacacagccgaccgttatcagaccgagcacaaggaatatcccgtgtattatattttcgaataatctctttttgtttttcatcttacaaagcctctttcacgcggcacgcagcgaacccgaatctttcgtccgagcccgccgccgctttatgtccgttttgtttgttatttaacgggaaccgcgcccgctttggagatgaggtcgtttgcttccgcggaggttgcgaagtcgaagaacttctgagcaacttcggagagatgagttccgtttttcgttacgaggacgaaaggtctctggataacgtagctgccgtctttaaccgttgcttccgacggagcaacaccgccgaccgtcaatgctttaaccgagtcctgaagagccgcgagtgaagcatatccgattgcgttcgggttgtttgcaacagttgtgataacgtcgccggtcgaggtaagttcctgtctgtatttgcaagcctctttggtggaggtgatggattcaaatccgtctctggtgccgcttcccgcttcacgtccgattacaacgatttccgcgtccgcgccgccgaggtctttccagttggtgatctcaccggtgtatatctttgcgatgttttcaacggaaaggtcgcttaccgcatttgcggggtttacgattaccgcgataccgtcaagcgctacgattgtttcggtcagaccgtttgctttttcatcgtctttaagcgctctggacgaaagtccgatgtcgcagcgtccttcggctactgccgtgatgcccgaacccgagccggtggggttataagtgaactttgcgttcttgttgttctgcataaacgcttcgccgagtgcgccgattacgttttccatcgaggtggagccgtcggtcgaaaccgttccgcttacttctttgtttccgtctgccgcggtcgtaccgttttgggtcgtcgtggttgcgtctttacttccgcatcccgcaagaagtgccagcgcaagaagtgccgcgagcataatgcttacaaactttttcataatgtaacattctcctttttccgttatcggaatctttcttttgtactttttcctttgtacgctcatagtatacccctcgaacgtaaagtacaaaagccttgttttgtcaaatccatgtaaaatcgtttttcggaggtatatttttggacgaagtttttctgcatacgcgcacacacgcgtgcgtgataaaaatttgtacgttgaaatgttttgcggacaaaacgcggattttttcctcttaggaattttattacaccgctttttgaaaaaaatcatacgattattttgtaaaatagtgctttaccccctttattttttataataagtgtgatataatataggggctgacccgtgagaaacgaaagtgttcgagggattttatttgaaaattacgaaaaaacaaaacaaagaaaattacgtttcgtgataaattaaaaagcggaaagaggtgtgagcgatggataaattcattttacattccaaatttcagccgacgggcgaccagccgcaggctatcgaaaagttgacccaaggtattttggacggagatgaaaaacagactttgctcggcgttaccggttcgggcaaaacttttaccatggcgaacattatcgccaatgtcaatcgtcccacgctcattcttgcccacaacaaaacgcttgccgctcagctttgttcggagttccgcgagttcttccccgaaaatgcggtggagtattttgtatcttattacgattactatcaacccgaggcatatatagcgcacacggacacgtatatagaaaaagatatgtcgataaacgacgagatcgaccgtctgcgccattccgcgacctctgcgctgtttgagcgccgcgacgttataatagtagcgagcgtttcgtgtatctacactcttggcgaccctgcggaataccacaatatgatggtgtcgctccgtgtcgggcaaaaacttgaccgcgaggaactgctgaaaaaccttgcgaagatacggtttgaaagaaacgacatcgacctcggcagaggtatgttccgcgcgaggggagatgttgtggaaatattccccgcgtccgcgaacgacttggttatacgcgttgagttctgggatgacgagatagaacggatatgcgagataaacccgacgacgggagagatactgcgaataatcaattacgccgtgatattccccgccgtgcattacgtcacgacggacgagcacctgaaaaaagcgatagacgaaattatccgtgaaatggaagagcgagagaagtttttcacggacaggggcaaacttattgaggcgcagcgtatcagagaacgcacgatgtacgacgtggagttcttgcgcacggtgggttactgcaaaggtgtggagaactattcccgtatcctttcgggcagaaagcccggttcgaccccgtacacgctgctggactactttccgaaagactttttgatgttcatcgatgaaagccatgtttccgtgccgcaggtgcgaggtatgagcggcggcgacagggcaagaaaagaaagccttgtcgaatacggtttccgtcttccgtccgcgtatgacaaccgcccgctgtttttcagcgagtttgagcaaaaactcaatcaggtgatatacgtttcggctacgccgggagattatgagaaagaacattccgcgcagattgtcgaacagataatcagacccacgggacttctcgacccgcttgtcagcgttcgtccgacggacggtcagattgacgaccttgtttcggagataaagaaacgggtggaaaaaaacgaacgtgtgcttgtcgttactctgacaaagaaaatgtccgagtccctgacggaatatctgcaagggcttgacctgcgcgttcggtatatgcaccatgaaacggaaactctcgaacgtatacagacgctccgcgacctgcgtttgggagagtttgacgtccttgtcgggataaacctgctccgcgagggacttgacctgcccgaagtttcgcttatcgctattcttgacgcggacaaagagggctttttgagaaacgaacgctctctgatacagataataggcagagcggcgcgaaacgcagagggcgaagtaataatgtacgccgataccgttaccccgtcgatggaagccgccatcagggaaacggaacgccgccgttcgatacaggagaaatacaacaaagaccacggcataacgccgaaaacgataataaaaccgataaccgatgttgccgcattcaccgccgccgaaaaagttgcggaagatgcggaaaaagcggtggacgcaagaaaactttcgccgaagcaactcgacgacctcataaaagagttgacggcggagatgaaacgcgcttcaaagaatctggatttcgaatacgccgcaacgctgcgcgacaggataaaggaaattcaggcgcaggcaaagggcgtaaagtgatttttgtgttcgtcggcgccgcaaaacggcttgaaagaagatgtgagatatgagagatacgatacttgtaaaaggtgcgagggaaaacaacctcaaaaacatcgaccttgaaataccgagagataaattcgtcgtttttacgggactttcgggctcgggcaaatcgagccttgcgtttgacacgatatatgcggagggacaaagacgttatgttgagtccctgtcctcctacgcgcgtatgtttttggggcaaatggaaaagcccgacgtcgattatatcgaggggctttcgcccgccatatcaatagaccagaaaacgacctccaaaaacccgcgctcgaccgtcggcacgataaccgaaatttacgattatctgcgccttctttatgcgcgtgtgggtattcctcattgccccgtctgcggcgttgagataaaacagcaggcgcttgattccatcgtcgataagattatgaaacttgacgagggcacgcgcattcagatccttgcgcccgtcgttcgcggcagaaaaggcgaatatgcgaaacttttcgaggattacagaaaaagcggttatgtccgcgtgcgcgttgacggcataatttacgacctcggcgaggatattccgcttgataagaacaaaaaacacaacattgaagtcgttgttgaccgtctcgttatccgagaagacataaaaatgcgtcttgtcggctcgtgcgaaacggcttccaagctttcaaacgggcttatcgtcgtttccgtgcccgacggcgaagaaacgacgtattctcaacgttattcctgccccgaacacggcataggcatcgaggaactgacaccgagaatgttctctttcaacaatcccgcgggcgcgtgcaagacctgctccggtctcggcttcaccatggcggtcgatcccgaccttgtaattccgaacaaggatctgagcattcttgacggcgcaatagccgcgacgggattcggaaacgtaagttccaattcgtattatatccgtcattttgattccattctgcgcgattacggcgcaaacctttcaacgccagttaaggatattcccaaagaagcgcttgacaagctgctttacggctgcgaaacggacgagggcataatcccgtgcatcgaaagacggtataaacagtcttcgagcgaagcggtgcgcaccgagatcgagcaactgatgtccgacaaaccctgccccgactgccacggaaacaggctcagcgagctggcgcttgcggtcacggtcggcggcataaacatcatcgacctctgcaaaaaatccgtcagcgaagcatatgacttcatagacaatctcaaactcggagcacgcgacacgatgattgcggcgcagataattaaagaaattaaatcaagacttaatttcctgcgcagcgtcgggcttcaatatctgacgcttatgcgctccgcttcaacgctttcgggcggcgaggcacagagaatacgtcttgccacgcagataggttcttctcttgtcggggttctttatatccttgacgagccgagcataggacttcaccagcgcgacaacgaaaaactgataaacactttgaaaaaactgcgcgacctcggcaacacgcttatcgttgtcgaacacgacgaggacacgatgcgcgccgccgattatcttgtcgatataggtccgggcgcgggcattcacggcggatatatagttgcggcgggaacgcccgaagaggttgcaaagaacgaaaaatccataacgggacagtatctttcgggtagaaaagagattcccgttccgaaaaaaacgcgtccgctcacaggtaaatcacttgttatccgcggcgcgaaagaaaataacttaaagaacatcgatgtcgagatcccgctcggagttttcacctccgttacaggtgtttccgggtcgggcaaatcgagccttataaatgaaattctgtacaaaacgcttgcggtcaaactcaaccgttcgcgtcttgtaccgggcaaatgcgactgcattgaaggcatcgaccaactcgacaaagtcgttaatatagaccagagtccgataggcagaaccccgcgttcgaaccccgcaacgtatacgggaatgttcaacgacatacgcgaactttttgcgcagacgccagatgcgcgtgcaaagggtttcaaagcgggcaggttctccttcaacgttgacggcggacgctgtgacgcctgcaaaggcgacggtatcgtcaagatagaaatgcactttcttcccgatatttacgttccgtgcgacgtgtgcggcggcaaacgctacaacagagaaactctcgatgttaaattcaaggacaaaaacatttacgaagttcttggtatgacggtcgaagagggcttgaagttttttgagaatatacccaatatttacagaaaactcgaaacgctttacgacgtcggtctcggatatataaagataggtcagccgtccaccactctttcgggcggcgaagcgcagagaataaagttggctacggaactttcgaagcgctctactggcagaacgatatatattctggacgaaccgacgacggggcttcactccgaagacgtcaaaaaacttatcaaggttctgcaaaaactgacggacgcgggcaacaccgtagtcgttatcgaacacaaccttgacgttatcaaatgctcggatcatatcatcgacctcggtcccgagggcggcgacggcggcggaacggtgctctgcacgggcactccgcgtgaagtttcaaaagtccccgaatcgtttacgggacagtatctgaaaaggtatttcccccgttaacaaagtcgggacggcggttggatgaaatttctcaatccgaactttgagccgggcggcgcttcttgcgtgagcgcttaacctttaattgaaatataaggaaaaatatgagtaaaaacaaacgaacgataaccccgcagacgggcaatgcgcgaatgctcgcaatatttctgcggggaagcaaaatgttctttttcatcggaatgatctccgccgccgtaacggcgcttgcggatatgattattccgcagataattcgcgtaacggtcgataacattcttccgaactccgctctcgaagagggttcggcagcaaaattcctgaccgacgctgcgggcgggcttgaacaccttgcaaagaacctgtggatacccgcaacagcggtcgttgtggtctctcttttcaaggtcgtttcgcagtacactttccgcgtattcaatacaaaaggctccgaaacgcttgtcaagaccatgcgtgacagcctttttgagcatatcgaaaaacttccgttctcatggcatatgcagaacaagacgggcgatataatccaacgctgcacctcggatatcgacaccatgcgaaactttgtttcggagcagttgacatcggttttgcgaatagttataatgctcgtcctttcaatggtgtttatgttctcgatgaacccgctgcttacggtcgtttctcttgtgcccatgcccgtgataatcggctattctttcctgtttcacagaaaaataggcgcaggctttctcgaatgtgacgaaaacgagggcaaactctccgccatggcacaggaaaacctgacgggtgttcgcgttgtccgtgcattcggcagagaaaaatatgaatgcgacaggtttgaaaagcagaatgagacgtacacgacgctttgggaacatcttgcccgcgtgatgagccgcttttggagcagcgcggacattctttccggcttgcaggtgatgctcgtcgttgttttcggtgcattcttctgcacacgcggaatgatgcttcccggcgaatacatagcgtttatttcgtataactccatgcttgtgtggcccgtgcgtatgctcggcagaatgatctccgaaatgagcaaagcgggtgtttccacggagcgtatcagacagataatgaccgcgcccgtcgaagaagacaagcccgacgcggtatgtcccgatatgcacgcggatattgcgtttgaacacgttgattttgcttatgatgggcacccgcagatgctcaaagacgtgtcgtttaccgttgaaaagggtactacgctcggcattctcggcggcacaggcagcggcaaaacaacgctgatgatgttgctggacaaactttacgacctgcccgacggctgcggtaaaataactgtcggcggggtcgatatacgcaacatcaaaaccgaatatctccgcaaaaacatcggcatggtcttgcaggaaccgtatctgttctcccgcacgcttgcggagaatatcggcataacccgcaaagatatttcgatggacgagattcgtgaagcggcgtccgcggcgtgccttgacgacacgataatgaacttcacgcagggctacgaaacgtttgtcggcgaacgcggcgttacactttcgggcggacagaaacagcgtgcggcgatagcgcgtatgctgacgcagaaaacgccgataatggtctttgacgactctctttcggcggttgacacacagaccgacgtcaaaataagaaaagcgcttgaagagatgttcggcagttcctcggtcattcttatctctcaccgcataacaacgcttatgaaagcggataagataatagttctcgataaaggacgcattgtcgaacagggaacgcacgatgaactgaaaaccgcgggcgggatctatcaaaaaatatatgaaagccagtcgctttcggaagaggaggcggcgaatatatgaaaactgaaacagaaaacaaaaaatcgcttccgtttttcggaataggcagacttcttccgttcctgaaaaaatacagaatgcgttttgtcggaatgatagtgttcggactttgcggttcggcggtagacattctcattcctcttctccaacgctatgcgcttgatcacttcgttgcgcaaaacacgcttgacacacttgtgtggtttattctgctttatattgcggctgttgtctttgcggggcttgtcaattatatcgctttctcgctggcgttccgcacggaagtcaacgtcaaccgcgacctgcgaaacgctgcgttcaagcatttgcagacgctctcgttctcctatttcaatcagaacagcgtcggctacattcacgcaagagttatgagcgacacctcgcgcataggctcactcgtttcctggacgatggtggacggcgtgtggcaggcatcgtatttcatcggcgccattgtcgttatgtttgcggtcaacgcaaaacttgcggcgctcgttgtcgttatcgttccgcttatagtcgttcttttctccatattccaaaaattgctgatacgcgccaacagagaggtgcgcgaattgaactcgcacatcacgggcgatttcaatgagggcataacaggcgcaaagacgataaaaacgcttgttatagaagacgatatgggcgaaaagttcgttgaagacacaaaaaagatgcgctcaaaatccgttcatgcggcacgtttgcgcggacttttcgcggcaacgatgaaccttgcttcttccgttgctcttgcggtcgtgctgtggcgcggcggatatatcgcggcttccgaagtcggcacgttttcgatgtttatgtcttacgcgcagggcatgatggaacccgttcgctggattatagacgcaatttccgacctgataacaacgcaggtcaacatcgaacgtctcacaaatctgcttgccgttcgttccgatgttacggacagcgacgaagtcgtttccgtttacggcgacgtgtttgagccgaagcgtgaaaattgggaaaaaatgcagggcgacatcgaatttgacgatgttagtttcaagtatcccgacggcgacgaatatattctcgaacacttcaatcttaaaattcctcacggctcgaatatagcgatagtcggtcagacaggcgcgggcaaatccacgcttgtcaaccttgtctgccgcttctatgagccgacctcgggcagagttctcatagacggaaaagatgcccgcgagcgttctcaactgtggcttcattcttcgataggctacgttttgcagaccccgcatctgttctccggaacggttcgcgaaaatctgctttacggcaacccgaatgcgaccgatgaggatattatgaaagcgcttcgtcttgtttccgccgagggcgttgtcgaaaaacttgaaaaaggacttgacagcgatgtcggagagggcggagatatgctttctacgggtgaaaagcaactgctttcgttcgtccgtgccatacttgcagatcccgcaatccttgttcttgacgaggctacggcgtccgtcgatacactgacggagaaaaagattcagtccgcgatttcggaaataatcaaaggcagaacgacgcttatgatagcgcatcgcctttcgactgtccgtgacgccgaccttatccttgttgtccgcgacggaaagatcatcgaacaaggcacgcacgccgaacttttggcaatgcgcgggtactaccgcgaactttacaccagacaatacgaagaggaagcggcgcagtcgattttagggtaagatgactcttaaacggtaaaattttgcatacaaaatgcaaactttttgaaaactgttgcccttattccttttctaacctgttaaagtatgatataatactttggcaacgacagggatgtcccgcgttcgcgttttgacggatgcgggacttttttgtccgctgcggcaatgacggcgccgaaaaaaatttcgacggcattgcgggcagaaaagaggcacgaaaaggaaaggcaagaggatgaaagggaacgcattgcaaacgaaaaaaagcggtttcggaaagttcgtaactttctttttccccgtttactcttttatccccgtattcttttggtttgtgttcaacttctcgactttctacggcgttcgggcgataaaccacggcagagttcactatgacctgtcaatcccgcttgacggcgttattccgtactttgcgcccgcaataatcgtttatgtgctgtggtatgttcagattcttgtcggtttcagcctcgttgcgagggaaaatcgtgacgtgtgctatgaagtgtttacgggagaggctgttgccaagataataacggcggtcatatttcttgcgcttcccacggcaatggttcgtgcggctgttcccgacggcggcttttgcaacatgatcacccattggatatatgcggcggacgaaccgaacaatctttttccgtcaatacattgccttgaaagttggcttatctttcgcggacttatgaagtgcaaaaaagtcccgagaggttttaccgtggggttcggagtgttcagctttcttgttttcgcttccgttgtgcttgtcaaacagcacgtttttgttgatattcccgcaggaatactcgttgcggaagagggactgttcatctcccgcaaattcagattgaaacgcatttacgaaaaaatatattttgcccttttcggcaaaggaaaaaaggagcgacaaattgaaaaataaagaaacatgcaatatcgcggctcctccgaaaaagagtgatataaaaagcaaactgatttggacgctcattttcgttgtgcttgccgttatgagcgtttttgcggttacgaatatgagcaaggatttcaccgttgaaaaattcctcgcttatat

SEQ ID NO: 4256 - DNA, 6823 bp, Unknown
  16S sequences of unknown bacteria
ccccgattgtatcgggggttttgcggaacatatctattttatgttcctgttatggtggacccgaaggggatcgaaccctcgaacctcacggatgcgaaccgtgcgctctcccagctgagctacgggcccatatgcggaaaaccagacgctttccaacgccacattatcttagcgtaaaacctccggcttgtcaagggccaaatccgaaattctgtcgtttttcctaccccggcggaaaacagaagtgaatggaaaaaggttttgttcccggataagctgtggtataatcaaggtcggacggtacgggaggcgaaggcgatggcaaacggcaagaccggacggctggacaaaaaagccctttggatatgggaaggctatctcctgctggcagcgctgttgcctgcggcaggcagcgtggtattggcatgcctgcccattccggtatggatcagctgggccttcaccggcctttggggggcactgtggctgttttttgccgtcttttttctcccggtgatgcataaacggttttcctatcggatgactggtgaccgcctggaagtccatacgggcgtgatctatacccatcacaaggccatgcccgtttccagcgtcaaatacctatccactttcgacggtccgtttgagcgcctgtgcgggctgacgaacctcatggtgtttgcagccggcagctttgtagtgctggcggggctgacgaaggaacaggaggcggaactgcgccgccgcctgctgaaaaacggatgaaccaggagggcacgctatggaaaaacggacccatccgatcacaatcctggagtttgtctccaaatatctgttcctgctgctcatccccgtgctgcgggggttgttctacctgctgaccacatcgcatgatttttacaattggctcgccggcgcctgggtggacctgttggtggtgctgtttatcctgctcgcctcttatctgcgctggcggttccaattttaccgctatgacgagcaggggttgaccgtccgccgaggggttctgatccgtcgaaccgtcaccatcccccagtcctcgatctccaccctgacggtggaagaatcgttttatctccgtcctttccgggcagtccatctgctggccgataccgacgcggggcctttccagcgggcggattgccagctcaccctgcaccgagaggatgcctgcggcctgctggaacgctatggacgggagccaaatctcaagccgcgcctgtaccgtccccgctggaccgaactcgcgtttttgtccatcatcgtctccaacaccctgaccggggtggtgttcctggccacctttataaacaaagcgggcgaacttttgggagaggaatttcagcgccgcctgcttgtcggcctggaaggggtcgcgggtctgctggcatttcttcctcagaccggcgcggtgctggccctcattctgatgggcggctggctggttggttttgcgcggaattttgttcgcttcatccgtttcaccgtccggcgggaggaaggcgccctgacgatccgcagcggctggctgacgaggcggacctattcctgccgtgtcgacgcggtaaactttctcgattaccggcagagcatcctcacccgtatgatgggcctgtacatggttttcgtgcagtgtgtaggatatggaaaaggaggggcgctggctgtgctggtgccggctgcggacacccgttcctgccgccggacgatgcggatgctgctgccggaaatggccggccggccccggcagatccgtccgccccgcggttcggtgatccgctacgctatgttccccttctgggcatgtctgctggtaccggccgcggctgcggcagcctgccgcttgttcccggattggcagcagctgatcgtgttcctcgggctgatgctggctctgccgtttgtctggctgctgatcctgcggatcattgattgctgcacagcgggaatcgcggtttcgtcgcggcagctcaccctccggtattcacgcggatacaccttccatacggtgatcgtcccgcgggaacgggtcaactatgtccggatccgatacagcattttccagaaatgggccggcaattgtgatgttttggtgtatacatacggggaagtggggcattgccacaaggtggagaatctccggctgcaggaggtccgggagctgctccgtctgctcgacggagaaaactccgttctgggcatgccggcccctgccaagccgaaaggaggaaagcggtgagcggcctgtacgcaattgatgtcaccacgtttgaggatgcgggccgtttcggccgttgcatgaggcggatcccctccgaacggcgggagcggatcgcccgcctgcggctgccagaggaccgccgccgctcattgggagccggatggctgctggcggaagtgcttctccggtatttcgggctggagtcgcccgagcttggccggtcggaacggggaaaaccctatgtgaagggatggccacaggttcagttcagcctctcccatgcgggaatatgggcggtctgtgcggcggatatccacccggtcggggtggatgtggaatctgtccggccggacaggttggcggttgccgcgcgatttttcgcgccggaggagcaagcgatgctccggtggtcggccaaggaggcccaggacacggtgtttgcccgtatctggacacggaaggaagcatacctcaaatacacgggagaagggctttcgcaccctctgtccaccttttcgccggcctctccggatgaggacgggcggccggtatgggatccggcccttggctgtttcttcacctcttacacccttcctgacgggacgcctttggccctctgtacgcaggacggattcgtccctccatccatagctctccttcgggtggaataagggaggcccgttctgagtatccgctagaggctccgtgtgaaagattgtcttttcatatcgccagtacaagcggtatcggcaaacccattctcgcaaaaggcctgttcggacattataaaaccacttgcgtggagcagtgcaaatggggattccgaatctggaccatcaagaatttccggatacagtcccgtacattgtcaggctccattttcaacacccatcctactcgttatcagcgtttgattccgcccaattgatacatgaaggcatcttccaaaagcggttcggctatctccgaccccggatagaggctttcttccgcgcagtaccgaaccaccgggctgcccttgacgttggttatactggtcacaatcgttttctgacggatagcggtttcctcccccggggacaccgtgcattcccatatgcggttctgcagctgttccaacaaatcggatgtggtgccgagatagcggattttgcctatgtcgatgatacaaacgttttcgcagatattttccacgtccttgatgatatgagtcgaaaacaggatggtcgcgtgagcacctaacccggacaggatattgagaaagtacagttgttcctccggatccaacccggctgtcggttcgtcgacgataatgaatgccggatctcccagcagggcctgcgcgattcccgcccggcggagcatccctcccgaatatttggacagggttttttttccttccttttctaggcccaccagctgtgtgcaccgttcgatttccctcttgcgggcggcgccgtcccggatccccttcaagacgcacatgtaatccagaaattccacgatattcatatgtgggatcaggcgggtgttttgaggcaggtagcccaggctcgatcggtattccagcttgtgttggcggatgtctttgccgtcaaatcggattgttcccaccgtcggctccagcacagtagccaggatccgcatcagtgtggtcttacccgcgccgttccggccgatcagcccaaacaggcccggcttcaattctaggctgacatcatcaagcgccgtggtcctgcctttgtatattttggatacgccttcaatggtgatgttcattccgatacctcctctgtcaacgattgtcggtgtgatacaggcggtcctttttcaataaaaggaagctccccagaagcaaaagcagggaggctccgagaagaatcaaacggttgatcagccagatccgcccccccgccgcaatatccgtgatgtagggatcgaagtaatggaaatagaacggccgcagcccctttttcaaggcatcgtgattgagggccagcgacaccaggaaaatcagaaacagggacaccgtcacatacgcgttgcggaacagcagccggaacagggccgttcccgcggaaaagaacagcgaggtgaccaggaaggacaggatatagtaccctgtcatgagaaaggacgtgccgtagacacaggtaacgatcccataaaacagaaccaccgggaaggccgccatcgtgattatggagaaatatttggcggcaaagctccggtaggtgggggttggggcgctgaccgtcagctcgatttcgtccggattgttgtacaggcagccgcacagcacggccggcaggctgatgaaaatcaattccacatataaaaccagcaaacccgtacgactgcggcaaaaaaaccataggagaagcagcacggcaaaaaacacggggaaaagatacagacggccgcgaagctccctgcgatataaacccatcatcggctcctttcataaagcgggtcccccttacgcgaacaggtttttgcggcatttcggcaggacgacgccgaacaggagggccagcagcagccccagcgcgagatagcatagagccgtgacaagcgcaccgccgtccggtacgagtagcgcttccaggttgccgatttcctggatgggggcaaggtaaggagaagggctcatgccgtctaaaaaggaagagatagcggacgggggcagcgtgaaaaaccggtcctggacgaaatgagcggcgacgatatacagggcaccggcaacgatccccgccaccctgcggcgagccagcagcgtcactgccgcgactagggaaacgaaaaacagtccgaccggcaccgtataatacaggaatatcaccgcaaatcgcagcagggtttccccaaaggggatgaaggtcctcgacatgatatcgtgttcaaatatgaaaaaggtcaggaaattcaccgtcagcatcaggagcgacgcggcgtaaaaaaccgccagcagggccaggagcttggccgcgacatagccggccgggttggaccgcgacgccatgatgacgtcgtacatctggttgtccttgtcataggtgacggtcacggcgacgaccggcagcatgcagaccgccgtaaacagaaagacaaactcgacacaattaaagacggtgggcagataattgagatacatcacgtcgtgatacccgattctataggtcgagtgcaggaaaaaactgaacaggaacagcagcacgaacgagatccggcacagccggctgcggagcatcccccggatggtcgatgtgaaggttttatggaacatacggcacctcttttcgatattgaccggcttttgtggggatatagacatgtacctaacgcggaataacgtgccatggtggatacacttagtaacaaccagcttgactgacaccaatatttaacatgttttgtctccctgtttcataaactgggactatagaggcaacccgtcccggtctgcctgcataaagcaggctttggccggcgcctttcgtttcaagagcctttcgttattgatgagcttgagctttttcatccacattcccctttctcatttccaatttgtctccctaccgcatatgagaaaagcggcgccgtcaggcgaacaggtttttgcggcatttcggcaggacggcgccggacaggagggccagcagcagccccagcgcgaggtaacataaagccgtggtcagcgcgccgccgtccggtacgagcagcgtttccagatagccggtttcctgcgtggaaccggctaagaaagaccggacagcggacggcggcagcgtaaaaaaacggtgctgtacgaaatgggcggcgataatatacagggcaccggcggcgagccccgccaccctgcggcgggccagcagcgtcaccgccgcgactagggaaacaaaaaacagcccgaccggcaccgtataatacaggaagatcaccgcgaaccgcagcagggtttccccgaaagggataacggcctgcgtcatggcgtcggtttcaaatagatacagggtcaggaaattcaccgccagcatcagaagagacgcggcgtaaaagaccgccagcagggccaggagcttggccgcgacatagccggccgggttcgaccgcgacgccataatgacgtcgtacatctggttgtccctgtcataggtgacggtcacggcgacgataggcagcatgcagaccgcggtatacaaaaagacaaacgtgacacaattaaagacggtgggcagataatcgatcatcacattgtcaaaacgcggcgtcgcgccgggaacccccaccttgtttgccgcatgcaggaaaaagctgaacaggaacagcagcgcgaacgagatccggcacagccggctgcggagtatcccccggatggtcgatgtgaaggttttatagaacatacggcacctcttttcgatattgactggttttttgtggggatatccttgggtgatataaatcgtccggtattgtcaagcaactgctgcttgtctccgttatattgttgatacggcaggtttaattctcatatcaattgaattatgtaaaaagatctttaatttctggccaattttgaaa

SEQ ID NO: 4257 - DNA, 4739 bp, Unknown
  16S sequences of unknown bacteria
agtatatctctatcagatggatgatgacagcgaagttgtagacttcattatcatctacgatgatgacaatgcagctgcagatgacagcgaacagcctgaaaacccggatgaaagccagactgaaactccagatagcggccagacaggaactccagaaggcggagctggaaactaagttaagtaacgacataaaaaaataaggcggtatcccgccttatttttattttttgctatgatatggtttgctctgctttcaatctttatgattgtatcatctgtatcgcatacgaatgcgtatacatatacaacatcaccttccgcgatatcactgagtctgtttacatcaagaagcaaaccggtataaatctcaacaattttgaggccgtttctactgtgataatctgtttgttagttgttttcaatacatctggcagcgctgtctgcataaggtcagcaaatgcaattttgtaatatttatatgataaattaaattattttgggagacggaaccgaggcggtaggatatacttataaagtataaaaacatcattatatcaagtaaatatcgtagtacaaattgaagaaaggaagaaaggaaatatgatgaatgaaaaagttatagttatagaaaagagcggacaaagcgccagtgccgaattatcggagctttgcaatttatatttggagcattgctattatgaaaagcggttgtcggaaaatagtctgcaatcgtacagatatgacctcatagggcttgtaagatatgcggaaagctacatatcgcggagtgagaaggccggcagatgcggaaaaactgagacttgcgggggtatatacaaaactggagaaacaaaacaagaaaagaaaaatgatgaagtcagcaccttaaatgagacgctgattgaaaagttggagtacaaaggcaatgcaaaaaacgcacagtatagaccgaaacagaactgcgtatacataaaaagacttgacagagatttttggcataaatatatggcggagcttgccgcattaaaaaaggtgaaaacggtaaagagaaaattagcctgttttacgggctttttttattttcttgaaaacaggggcataatagaagaaaatcctcttgacaaatttaaactcaagctgaagccagcaagcagtgtgccggagacgctcagcctgaaagaaatgaagtgtatatttgatgcggtataccggccgcttagggataacataaccggcataaccaaggaaatggcggaaattttaagatgccgcgatattgcagtactggaacttttatttgccacggggctgcgcgtaaatgagctgtgcagtatgaacttttcaacatacgataaggacgagcagagtgtgcgcatacttggaaagggcggtaaagaaagaaagctgtacttatgcaataacggtgtgataaatgcgctcggaaaatatatagagaagagagtacatatggataaagaaagcgatgccatatttttaaacagatggggaaaacctctttcatgccaggctgtgcgcgatctcgtgcgaaaatattgcaaagcggcaggaattaaacgcaacattacaccgcatgcatttcgccatacgtttgcttcgcttctgcttgaggaaggcgtagagctgcgctacatacaggaatttctcggacacagctctataaccacgacgcagatttacctgcatacgagcgaaaaaaagaagcgcgaaatacttacaaaaatgcatccgcgaaaaaaattagaaaaataattaaataattgtttaatcgtttaagcgagtggtatacactatctgtaaggaggtagagatatggaaaataaaaaattacctcatgatcacggtacccatactctggaaatatttaaaggcacatatgagaacagatcgtttgaggatgcggccgatatcttttcactggttagtgacagtacgaggctcaagatattttgcctgctctgccacacagaggactgtgtaattaacattgcggcagctgttcaaatgagctcgccggcagtatcgcatcatctgcgcgtactcaaaaacgcccgccttataagcagcagaaaggacggaaaggaagtttattataccgttgccgatacgcgtgaagcagagcttcttcatgcggctgtggacaagatgatggaaatacggggctgtgatacactttaaaaaataaaaaattataataaaatggaggattgaaatgaaaaagaattttaaactggaaaaccttgattgtgcaaattgcgcggcaaaaatggaagctgcgataaacaaaattgatggcgtaaacgcaactatcagttttatgacatcaaagctcacgcttgaggcggatgatgcagcttttgacagcgcggtagaagcggcgcagaaagccataaaaaaagtggaacctgactgtcttatcgtaagataaagaacataaagcaaataccgcaaataaaaatggaagcggtgctttgatagggggtcatatgatgaataaaaagcagaaaaggcagcttgcgctaatcatcattgcgtttgtcatactcgctgttgccgccgcttgcgagcattttaccaatatgccgccgcaagcatatacggcgaagtattttgtatcgtacttgataatcggactcggaacgcttgtaaaggctgtgaaaaatatctttcgcggacagatttttgatgaaaattttcttatggcagtagcaactataggtgcaacagcgcttggagaaatgctcgaggcaaatgccgtaatgatattctatcagataggcgagctctttgagtcgtgcgccgtggacagatcgagaaaatctatttcagagcttatggatataagacctgattacgccaatgtgctgagaaacggtgaggagattgagactgatccatacgatgtaaaaataggagaaataataatagtaaaaccgggcgaaaaaattccgatggacggaaaaattacagaaggagtgacgtcgcttgatacggcggcgcttacgggcgaagccgaaccacgagcagctgaagcgggcgatgaggtcataagcgggtgcatcaatctgacaggtgtaatacgcgtagaggtgactaaggaatttgaggaatcgacagtttcaaagattctcgatcttgttgaaaacgcagctgccaaaaaggcagatgttgagaaatttattacaaaatttgcgtctgtttatacaccgctcgtatgccttgcggctgcgctgactgcggttttgccgccgctcattattccgggagagacattttctgtatggatttaccgcgctcttacctttctcgtaatttcgtgtccgtgcgcgcttgtcatttctataccgctttcgtttttcggaggtgtaggcggagcgagcaagctcggcatacttgtaaaaggcagcaactatctggaaacgcttgcgaaagcggaaacggtagtaatggataagaccggtacattgactacaggagcatttgacatagaaaggatagctgcacagcctggatataaagatgcggggatattagagcttgcggcttatgcggagagctattcgcatcatccgctgtcgcagtcgataataagcgcttacggaaagccatttgaggcaggcagaattgtcgatgtaaaggaaattgccggaagaggtgttttcgctgaaataaaagcagccgcaagtgaaaatatgtgcgcaaaggccgaagataacgccgcaggcgaggttgctaatgtgtatgcgggcaatgaaaagctaatgaaagatataggcatatcaagtgttccgactttggaaaatacagttgtatatattgctgtaaatgggaattttgcgggttatataacatttgcggataagataaaaccggatgcggcagaagctgtaaaaaagctgaaacagctgggtgtgaaaaagactgttatgcttacgggcgataaggaacaaacggcaagaaatgtcgcggcggcaatcggcatagacgaagtgcgcgcagagcttctgccacaggacaaagtaaacgaaacggaaaaaattcttgctgaaaaaagtcctaaacgcagtgttgtattcgtaggtgacggtataaatgatgcccctgtacttgcgagagcagatgttggcgtagcgatgggcggtctgggctcagatgcggctatagaagccgctgatgtggtgattatgacagacgagccgtctaaactcgccgctgcgataggtattgcgagaaagacgaccaggatagcgcgccaaaatgtaatagttgcgctcggtgttaaatttgctgtgctcgcgctggcagcgattgggtttgctaatatgtgggcggccattttcgctgatgtaggtgtggcggtgcttgcaatattaaattcgataagagcactcaatgtttccaagtttcaataatagctttaatgcttggttcgatttcatcgatggggatttgattataatataagatataggtactgtcgcttgcagaagcggcagtatcttttgtttttatcggctgtacaggcacaccaaaacgggctgcttcatcgaccaagatttccggagctttgctcgaggcgattgttactgtgatatttatgccggaggcagtatttacgggaaagacgagattttttccgtatttatctatggcagcgagcagcttttggagcttctgcgcgtaaagtgtacgcagtttctttatatttatctgataaagtc

SEQ ID NO: 4258 - DNA, 20943 bp, Unknown
  16S sequences of unknown bacteria
gtgcggtgcctccgcgcatacagtggcggtaccgttccggattccaaccggattcactattctccatcaacactatacgaaattgatggcactcagatatcatatttacttagaataaaatatcatagtaatgcatatttgtcaagcaactaacagacgataaaaattcttattagtaaaacttcaatatattttataacatcaattagtgctcttgttccttacgcttttccttgctgggaatcatctgttccttctgcgcctgccgcaccatcctccgcacagcttgccgctccatatcttcatgcagcatccgggaaaccgcctttttactgtcaaacatcaaaagcgggctgtacttctcgccgtaaacctgctgtgcccggttctccgcttcctgctccttgccggggcggattgcctgttttgtttcgtagagctgcactggatcgaagccttgcgcctgctcccgaagtccggcatactctttcagggcagcgtccagttcggcggaatatttttgttcctgttctttcaaccgtttcagactctgctccatggctgcaatgtccttgggaaatttatcggcagcatcttcctcagaatatgccagcgacaccgcctgtacttccggcagcactttttccagtacagcgccctcctgaatgagccgccttgtccgggcttttcgctccttcacccggtcccgtgcctgggcttcctccaagcggtgctttgcctgcaacagtttcttttcttcacttgtcatagatttacctccgtttctgccagatcaggtcatagcccagcacatcggccagctgcatgacctccttatagcggatggattcccgctggagcttggccgacaggttggaaacactgtccgaccagccgtattcctcatggagccggtcaaccagctcctgcatggtgtatcccgcccggacgatctgtgccttaatctcgttgcgtaccgtcatcatcaaaaatcctcctaaatttacttgataaaaaagcgaagctggcacgccctctggcataaccgcttcgctgtgtcgtgaaaaattcccttgtcaccaaatccgttcagaattgccggtgtgatgtcctgcccataggttgcaccttccgacttttccgttccgtgctcataccgcatcctcctcgtagatcatttctcggaggatgatttcctcggctcggttacggatgttgttcatggctccaacccatgccatctgatcagcggatttcagttcttctgtcacgccctcagatgccttcatctgctcgatgataagttcaaggcggttctgtgcctgctcgttcaaatccgccagatatgtccataattcgccgttaagacatagatcattgaagcggatgggttgtgctccttgatataatctctgtgcatacgcccccaacgaccaataagtctggtttccttcggtaagcgaatatcgggaatatagtaatcaccgcaacgaatatagctcagttcctgcatcatatgtacctccaataagattcaaacattctgttaaagatagaaaaaggcgatacctggttatgaaaaccaagtatcgccaatttttcttgtcgcactcctgcacggcagctaccctatgtcagtaatgttctcatactgtcttattggaagttatcctcgcgttccctttttttgtgaaaattctgtctgacagcgttttagccatccttttattttgtagggtaagtaatttctgtatcggcagaacgattcaggctttcttcccccgatgatcgatatgcatatggtatttgctgataacgaatgccaaaacgatctacaatcgttatctctatttctattgtctcccattctccttcatcaaaccgctctttcatcggcaccgatgcggaaatagaactgtatgtcactgtgctgtttccattttcataatccggtttcggctcattttcataaaaacccagttcatattcccgataagcctttccattttttatcagccttaccatcccgctgtccggatagtttgccaaggcccgatatccgatgctgtcattcatctgcacctctacaaccagcgagccgttaatcgacaaggtcgacgacaaatctccgatagcatagcgagacatatccccttgaaatgtagaaaaaaccgatagaaggtagccatccagcccataaatggtttccaacgcttcattagttctttcgtcgccatttaaaaaagcaacctgcacgcgtacttcgcgggataacggtaaatccaccgtcccttcaaacgttccgccgacgcttttggaagcctccagtgtaattggttcaaaatctgctccggtaaaagacagcaccgctgtggtatccgccgtacaatttttaggtgtcacggtaaactttacccgtgcctgtttggtgacaggctgcaaactaatgatatcgtagtggtactcagatacgatacttgtctggctttccaagctctgttctatgctggcgcgcagggaagaaatcgccacagaccactcggatctcacgctggaaagaccgctttgaagatctgacatctgacggttcaaatcttgaatctgcacctgcaggcaaaacacagttacagccaataccagagcaaagccgacaatggtaagcacgagcagtttatggtcttgttttttccgtttatccgctgtgcttctaggctgttccgctatatttttttccgcctgttgggaaaggagattctcttcttcccttacttgaccgttttcctccagctgcagcaattcgtttaaagaaactccaaaaattcggcaaagttcctttaatttttccagttccggcaccgcctggctggattcccacttggaaacagcctgacgggatacacccaatttttctcccagttcttcttgagagaatccatgtttttttctcaatgccgcaatttgctctgccaattccaaaatatcctctcctttctatatcactttaccaaataccgtctcttttcgccaccaaccagtgctttctttttgtcaacctgtagttgcatccgattgtttcatgctttttcccttttcggcatcttggaaaaacatgccgctatgaaggaatggaaattgcactcacgccgcaaatgtgatacactaaggcgaaaatattttgggggatgaaagaatgaaaaagctggttctttttgatttagacggcactttgattgactcgattgacgatctggccgacagcacaaactatgcgttgcaggaatgtgggcttcctttgcatacggtggaagaatataaatattttgtgggaaacagtgtcgatccattgatccgccgcgctttacccaaagaagatcaggataatcaggagctatttgatcgggtcaaaaaaatctatctatcccgctacgccgctcacagcaaggacaaaaccaagccttatcccggaattgccaatttactttcccaatgcaacaaagaaggtgtattgattgcggtggtttccaataaaccggatgacattacggcagacgttgtacggtattatttccctcaaattcatttcgccgctaccatgggacaaaaagaagggattcccaaaaagccagatcctgccggtgtgcgggaggtgcttcgtctgaccggaatcgatccgaaagattcgctatatgtaggtgacacttgggtggacatgcagacagctcaaaacagcggcgtaaaatcctgcggcgttttatgggggtttcgaaccagacaggagctggaagacaaccatgctgacgatatcgctgccaatgtaaaagaattaacggaaataattttcaaatagaacttgacaaatcctttcagaatcattataatgcagataatttaatatgacaccacaaaggcaatgacggagacaagtcttttcaagtatccttttcagagagctgtcggttgctgtgagatagcatggatcgaacagataaatccctcctaagccaagacaccaaaacgttattttatgtgagtagatgttcttcgtaaggctgcgttaaagccagggatttgttggaatcctgtaagaggcgcgttttttcgcgtaaattgggtggtaccacgggtttaagctcgtcccatttggggcgggctttttattttattttgatcaggaggaattatgttatggaagcaaaactcgttgaaatcgcaatgcgaattcgggaattaagagaaattctggaaataacaccagaacaggcagcgcaagcgaccaatacctctatcgaagaatatctttcctgcgaaaacggacagaaagatttttctttcacctttttgtatcaatgcgccaagctgtttggcgtagacatggtcgaactggtgaccggtgaaaatcctcgcctaagcttttattccattgttcgaaaagacgaagggcttcccattaaacggcgggccggcttcaactatcagcatctggcctatctgtttaaaaacaaaacctgtgagccattcctcgtcaccgcgccttattccgaatcggaacaggatcagccgatccacctttcttaccacaaaggacaagaatttgattatattttagaaggggatctaaaagtccaattggaagaccactgcgaaattctccacgccggcgacgctatttactataattccggacacggtcacggcatgattgccaccggtggaaaagaatgccggtttatcgcagtcgttttgaaagaagagaaagaagaggaggaataagacaatgaaacctgttgcagttgaagatttttacgaacgcttttgtgacgaaagctttgataaacacggagttttaaaaaccttccgccccatttatgaggaaaattttaattttgcctacgatgtggtcgacgaaattgcccgcctggaacctaaccgccgcgcaatggtctggtgcaatgatcaaggggaggagaaaattttcaccttcgatgatatgcgtcggtattccaataaggccgccaacctgtttgtcaaatacggcatcaaaaaaggcgatatggttatgctggtgctcaagcgccactatcaattctggttctctattctggcactgcataaaattggcgcagtcacaattccagccaccaacctgctgacaaaaaaagattatgtctatcgatttgaagctgccggcgttacctctattatcgctactgccacaggtgatgttgcacagcatgtagaaagcgcctgcacagaataccatggtctgacctcccgcttcaccgcgatgggctcccgccccggttggattgatttcgacgcggagttggaagctatgccggacgaatttccccgggctgataccaaagctttggaacccatgttgatgtatttttcttccggtaccaccggttatcccaaaatggttcttcacgattacacttatgccattggccatttaattactgctaaatattggcacaatatcccgtctgatgggctgcacctgaccgtatccgataccggctggggtaaggcggtttggggcaagctgtacggccagtggatggtaggctgcacggtttttgtctatgactatgaaaaattcgttccgcatgaccttctgcagctgattgaaaaataccgcatcacctctttctgcgccccgcctacgatttatcgcttctttatcaaagaaggcatggaaggttacgatctcagttcactcaagtatgccactactgcaggcgaagcgctcaatccagaagtttacaaccgtttttatgaatataccggactcaaactgtacgaaggttttgggcagaccgagacaactctgactctggccaatctggcagggaccaccccgaagcctggttccatgggtaaaccctctcccctttatgatattgcggttgtagatgaaaacggcaaagaagtacagcctggtctggtaggtgaaatttgcgtacgtactcatggagaaaaacaagttggcctattcataggctactataaagatgaagaaaagacccgagaagcctggcacgacggcctttatcacacaggcgatactgcatggacggatgaggacggctactactggtatgttggccgtaccgacgatgtcatcaaagcttccggctatcggattgggccgtttgaaatcgaaagcgtgctgatggagcatccggctgtgctggaatgtgcagtgactggcgcgcccgacccggtgcgcggacaagtagtcaaagccaccattgtattgaccaaaaattatgctccttccgacgaattggtaaaagagctgcaggtctatgtaaaaaaacagacagctccttataaatatccccgtattgtagagtttgtaacagaactgccaaaaacaatcagcggaaaaatccgacgggtggatattcgaaaagccagtgaaaagacctctcaatcagtataatatcttggcaatgcaggaaaaaccccatgcttttaaaagcatggggtttttcagataagttttttcagtttttcattcgaatcagtttccccaactggaattctccgaatctctttccttgttttcctcatttgattcttccaattttgtttcttccggaacaacatcgtcttctggctgcgccgaatccacctgcatctcgacatagagatcctctatttcgttctgcaattttccgccacatttcatacagtaaaccgcctgtatatcattcagcgcaccacagtccgggcattttactttatgccgcgtctcattgattcttttctcattttcctctaaagtagccaaaagctcatcgatttctttcacacacatatcgattaattcgttgttttctttcccgcttttgcggaatttataaacgaaagcacccagtttttcatatgttttttgaatttcgccgtttatttttacattgttaatctttaacttggaaacctcaactgcttccccggcttttttgccggccaaatcagccaattcttttgcagtattgataaactcattgatatttgccataatgattctcctttcacagaacctatattgatattatacctttttccattatgcagggcaagaaaaaaccgtatctattccgactgctcataaaattttacaatttcgtctttgcggcgtaaaactgtatcaaatcgttcaatatactcgtaagggtatttgtagttaaaaatacggtgcagcagcgttcctcccggctttctcagtttggaaacaccaccggcacccaacgcaatgatcgagtgggtttcatccatgatgtaaacattataatacccttctgttccttccttacagtagccgacattttccatattttccatggtatttttctggcggtacagataataaggcagatattgttcctgataaaaccgctggccagcataagaaagcatatccgtaacccgctgatgctcctgaaggtaaaaacttttcgcatgttgccccagctgagaggaccgctttacggaaagggtgtgcagcgtgatattttccggtgccaagtcaattacctgatccaccgttttgcaaaagctttccaagctatcccccgttaaaccggcgatcaggtccatattgatattccgatgccctgcttgacgagccatctgaaatgcttcgatggtctgagcagtcgtatgccgccgaccaatttgctctaaaacggcgtcattcatggtttgcggattgatgctgatgcgggtaaccccttttctcttcagcatttccagtttttgcatcgtaatcgtatccggccgaccagcttctaccgtatattcccgcagatgagaaagatcaaaatgctgctcaaccgcacagataatctgctccagctgtttggacgaaatggcagttggtgttcctccgccaaaataaacagtctccaatctcaggcccagtttttgaacaatcggcgccacatactcaatttctcgaatcaaaagcgttacgtattcgggaatcagcttcttggcccgttcaacagagtgagaaacaaaggaacagtaatggcagcgggaaggacaaaatgggattgacagatacaagctaaacgactcgggacgggacaaatccaaaatttgcttttccttatttgctgttcggagtaaaagatcaattttttcatcagttacaaaataatcccggtgcagatgttcccgaatctgcttgtcatccatacctctttcccgatagcgatacaccagccgtactggacgcacaccagtcagcatgccccaagccagcgaaatacctgtggccttttccagctgccgatacagcatccggcataaatggtattcgcaaaaccgatccggatcagttttatccggtctgccctgaaattcctcttcccgaagtttctcttccagcctggtaaccactttcaacgtaattataccatccatattccgcgaaagagatgtgtaaagatattcgccttgactaaaatccttctcctctacaacccggaccttattttcatgaaaaaacatattggccaaagattccaactcatatttgtaatgatgtccatctaatatcaaattcattgctttgatcccataaatcgattatattttctttcctgatccagagatgtttctccctcatgccagggataaaccggccggtctccttctaaaagcgctaactttgccaaagagtcgtgcatagcccgactgtctcctccataaaaatcacaacggccgcaggtgccacgaaacagcgtatcgcctgaaaaaatcgcattttcataaagataacagacggagccttttgtatgtcccggtgttgcaataaccgtaaagtgcattccttttacattgatttcatctccatccgaaagcaggcgatccgcttttaaatgcaaactatccggaatgcgggaaagcattcccttatacactcgctccggttccaacaagagttcttcgtccaaggcaccaatcataaccggcacctgcggatagcgctctttcaacgcttttaccgctcctacatgatcgaagtggccatgggtcagcaaaatggctttcaacggtttccctaattgctgtaacgcagtttcaatccgctctgcgtcatccccaggatcgatcaatacacaggccaaatcgttccaaaccagataacaattggctcttacaatacccaccactaaagttttaatgttcatttcacgcctcgtctcataatttcatctgtatccagcatcagcgttaccggtccatcattttggatataaacctgcatatctgcgccaaactgcccggtggctacctttttgattccctgttgttttgccgcttcaataaaatattcataaaggggaatcgccgtttctggccgggctgccgccacaaaagagggcctccttccttttttacaatcaccataaagagtaaactgggaaacgatcaacatttctccgccaatatcctttagagataaattcatcttttcctgctcgtctgtgaaaattctcagatgcacaagcttatctaccagaaaatcgcaatgctctttcgtatcttccgcggtaataccaagcaaaaccatgagaccctgcccgatttcgccggaaactgctccgtcaatttccacgcgggaagcctgcacacgctgcacaatcacacgcattttcttttcccccttattgattggctctttctactgagattacgccgctaatccgttgaaaagtgctgatgatattattcagctgttccaaatgggtaatacccaatgtaatttgaatgacaacatggtgatcttttgcttctctggcgctcaatgaatgaagcggaatccgcatattggcaatcgcaatactgacatccgctaacaaatcgctccgatccgccgcataaatttctaacgttgatttaaacacagaacctctgacattgtctgcccattcagctcttacccaacgcgccttctgttcttcttcgttgatactgtttaccacgttcacacagtcccgcttatgaatggaaacgccaaacccgcgggtaataaaaccaacaatttcgtcaccgggcaagggattacagcagcgtgcaaacttaaccaaacaaccgtctaatccttctacaatcacaccgctttgcgcttttcgttcctttttgggccgaataagcgttttatccagcttttcttcttcgctggtccgataaatacgcagataatcctctttaatccgcggaataattcgggacagtgataccccaccgtaaccaatggcagcaaggaaatcatctatattggtaaagtgctgacgtttggcaatgtccagcacaaattccgccgcctgtccttcggtcagggaaatgctgttgcgtctaaattcgcgctccagttcctccctgccttctcgaatgttttcttctcgccgctctttcttgaaccaggatcggattttatttcgcgcgccgctggttttcacaatcttgatccagtctcggctcggaccatgattggcactgttagaggtcaaaatctccacaatgtttcctgtcttcacttcataatcgatcgataccatccgcccgtccaccttggctcccaccatacgatttccaatagcggtatggattgcataagcaaaatcaattaccgtcgcgcctgccggcaaactgatgacatcgcctttcggcgtaaaaacaaaaacttcttccggcgaaagatccgttttaatcgaccgaaccaaatcttccgcatcctccgattcctgctgtgcctccaaaagctgacgcacccaagccaaacgctcgctgagcttatcgtttccgctgaccccagctttgtatttccaatgggccgcaattccgtattctgccgtataatgcatatcccaagtacgaatctgaacttcaaaagggattccttccttatccaccactgtcgtatgcagggattgatacatattggattttggcgttgaaatataatctttgaaccgattgggaatcggccggaacatatcgtgaatgatgcccaaaatattataacagtcaaacaccgtgtctacaatcagccggattgcataaatatcataaatttcttcaaaggcccgcccgttcatatacacctttcggtaaataccatagatactttttacacggccttcaatatacacatttttatgttcctgtgtcacccgttcccggattttttctttcatcctgtttaaaaaagcagcgcgctcttctttttttaacgcaagtgtcttttcaatttcctcgtaggcaatcccgtccaggcaccgaagagacaaatcctccagctcctctttaatcccccgtatacctaaacggtgcgccaacggtgcataaacttccatcgtttccaacgccttatcccggcgcttttgatccggcatacagtcaatggtgcgcatattgtgcagacggtcagccaatttgataatgactacccgcacatcctgtgccatcgccagcagcattttacggatattttccgcctgctgttcttcccgagaagaaaacgggatttttcccagcttggtaacgccgtctaccagcaatgcaacttcttggccaaaatctcgtgaaacgtcttccagcgtaaccggggtatcttctaccacatcatgcaacagcgccgctacaatcgtttctgtatccattcccaatccaacgagaatagaggcaacgttcagaggatgaatgatataaggctctcccgaaacgcgcagttgtcccccatgggctttttccgccgtttcataggctcgctgaatttggcccaaatcaagctgttttccattattcagaatttgttgcctaaggtcatcaaagatactaagcatcaattttacccctttatcagatgaagtttctgcataatcggtgactgttccagatctactttttgtttcatctggggcacggaaaaacaaaatcctcttttttctttagatactttcacaagacctctttccgtcaagatttctaaccccaaacgaaaagaacaataatttttttcttgcgctcccaaacgtgcaaacagcccatcgtaatcaccataaaaaggactacgatcccgcaggccgcgatatagctgcgcgatatctgcccgatccggaatagaacgactcacagaatcttctaaaagagattcagaccgctggaatcggtcatactgttcccgcccttcaaaataggcatcctgtggaaattcggaaaggcggatatctcttatttttaccgatatctgttccttcccctgataattattgatatcacagtttgccgcaatgtcggccaagtctcccacttgatagtgaaaattctccggaggcatgtgaaaatagaccgcataaaagcattgtccattttggttcagcttcaacctcaaatgttttccaccgcccatcgcataaatgccctctattctacagtgttcatatacaaataccggtggctcattggaagaaccaaagggttccatcgcccgcaaaaatttcagttctgaaaccgttatttcctgggccgataccagtttgtcgattcggagaactgccggaggcatgtattcatacatgttagaagcttcctgctgcatcatcgcataaaaatcttcatatttttctttctgtaaggtcactcctgccgcagctggatgtcctccatactgttctaacaactcgtgacatcggctgatacagccaatcaggtcaaacccatcgacgctacggccagagccgcgcagcaccccattttcttcactgaacaagatacagggttttccaaatttttcgaggactctggcgcaaacaatcccaagaacaccaggatgccatcctttaccggaaaaaagcaaaacgcgttcctgtaaacaggaaggctgattttgaatctgcaaagcaacttcttttaaaatttcagcttccagtatctgccgttgtttattatagccgcagatttcttcggccaacgccgccgcactctcttcttcttcgcacaaaagcagctccacagctttttccacatggccaagtctccccgccgcattaattcgcggcgctaacaggaatgcaatgctgctggccgtcactggtttgtccgctaatccgcaagccgaaagcaacgccgccagccccgcattctgcgtatgctgcaaactttccaatccatggcggacaatacagcggttttctgcctttagcggcactacatcagcgattgttcccaatgctgccaaatcagaataatactccagcatctctccgctggaatccgcttccattgcgcaaaccagtttaaaagctacgccgacacctgctaaatcccgaaacccgccctgctggtctttccgatgtgggtttaccacggccgtacaggcaggcagtttctctctgggttgatgatgatcagtaaccactacatccattcccaagcggacagcataagcaatctcctccatcgccgtaatgccgttatctaccgttacaatcaaatccgtttcttttgctgcaattgcctgtatggcccccatgttcatgccatacccttcttgatcccggtccggaatataaaaaaatacatccgcgccaacattttgtaaataggtataaagcaaaaccgttgccgttatgccgtcacaatcataatcaccgtagatacagattttctgtccttcttctactgctcttccaatacgctccactgctttatccatatcccgaagcaaaaaaggatccagcaaactgtcctctcccgctaaaaagctacgcgcttcctctgcgctggttattccgcgcacagccagcagatgagcggtcaaaggagggatctgttcctgacacaacaaggctaccgtttcagaacaaggagatgccatctcccaccatctcatcagaacgcccacctttctttccagcagcataatagagatattttatcactttatcaaaaaaatttcaatattcgcccttatccctttgccggtgcataacacgctatcatttgctgcgctacccgcacaccgtctactgccgcactgacaattccgccggcataccccgctccctcgccgcagggatagagtcctttcagtgccggagactgaaagtcttcttcccgcaaaatgcgcaccggcgaagaagttcgtgtctccaccccggtcaaaaaggcgttttcatcggaaaaaccgggaattttcctctcgaatttccgaagccctatttccagcatccgattgattgggtcaggaaacagatttttcagctgatatgggcgaactccacaggaataagtcggttctaatgatcttggtagaacaggctgcgtttgatctaaaaaactttttgctgtttgccccggtgcaatgtatcctccgccgcctgccaaaaaagctgcctgttccaaatgccgctgaaaagataccccatccattgggttggcgccaaaatctgaaccatccaccgaaacgactaatgccgcattggcgttccggccatccctcgcgtattcactcattccattggtcacaaccgtatcccattctgaagcggaagggaccaccacaccgcccgggcacatgcagaaagtatagactccccgttctctttcccggtgggacagctgatattcccctttttccaacgctggatgtccggcaaatttcccatatagtccccggtcaatcaccgattgcaaatgctcaatcctcagccccactgaaaaagcctttgcaatcatgggaatctgatgtttcataagcatttcaaaggtatcccgtgcgctgtgccccacggctaaaaccaactgatcgcaggcaatcggctgcccatctgcaatcaggcccgccagctttccttgacaaacccgcaagtcctccacctgcacaccaaactttatttcaccgcccagccgttcaatttctctgcgaatatttttcaccactccgcgcagcttatcggttccgatatggggttttgcacggcgcattgtctgtgccggcgcaccaaagcaggtcaactgctccattacatagccgcatctgggatcgtggatacgggtcgtcagtttaccgtcggaaaaggtcccggccccaccctcaccgaactgcacgtttgtctttggatccagcactccagacttccaaaaactctcaacagcctgaacgcgtctgtctacatccattccccgctccaatatcaatggccgatacccctgctgtgccagtaaaagagccgcaaacatgccggcagggccaaaacctgcaatcaccggccgatgaaccatcggtcttgtcccaaaggaaagctccagggtaccggatcgccgcagggaggcgttggacagatttgcacgcctcagtaccgcttcttcattaccggcaagctcgattcccactgcgtaaacgatttttattttttccggatgccgcgcatcaatagagcttttaactggatatgccgataagatatctttcgttctcactttcagctgttttcgcgctgtttgcaccgctttttcaaacggatcgtccagttccgtacagattcccgtcaaaataattgccacgcgtatcccctcttttcacaaagaaaccgtctgaacattgggtccagacggttcatattccatccatgcaaataaattagtctttttcgctgatgactaccactgccgtataatctcccactgcccagacgagattttttgatggtgctgagattgtcactgccgttttaaattgccctgtttcgactgatcgtttgctcagatcaatctgccctaccaaatcatctgcggtcattgtttccaaaacctgcgccgggccaatgattttaacctttgttactctgtcggtaagaagcctggcatcgtaatctgatggtacattcaccaaggaaagattggtaacggtaaattccttggccaccatatctgtccaatcaaaagtaaccgtcaccgtttctgtatgagccacattgatgaaattttccggcaattccacatcaaaagtaaagttgctttccaaatccagcgctttaaaatcaatgtaccccaagataatttcgctatatttatcaatttcatctactggacctgccactgtaacggtttcattggaaacggcatattccaactcttccaaatccaagtttgtgggagcgtttaagaattcaacctttaccggaagatcaaccgtttttaaaatcggcaccgttacttctgcttgcttgatatccatcgtcaatccagatgtttcaattttatttccatctttatccagcaaaacaatatctgaagtaaacgctgtggttttcgtcagacttccctcatgatccaccgataccacacacttggcgatcttagcaatatccgtatccggtcccgttacagatacctgcgttgggctaacaacagcttcctccatcaggtagccttcttctggaacaaccaaaccttccattttcacgtctacattgaacttcttcgtaaccattcggtcaaattttagatttaccgtagatggagaaatcgaggaaatggcaaaatccttgcctgatacattttccgccaccagaggcaatgaaaagtttcccgctccattgaccgaacccaaatcaactgacacagcaatatcctctggtttgatgctaccgactaccagtctttgcccttcgatggtaacatctacaaacagactttcatccccaataatagtaagccccattctggtaataaaggaggtttggttatccatcgtaaccggaacctctttgatttcccggggaatatccgttttcatattcattgccaccactatccaaatgatacaggcaatcacgactgaaattactttgaagaaggtattattctgccaaagggaatccagatggaattttggaattttcattttgtaatcgccctccaaaatcctggctttttatcttcagcctttttttcaggcagaagcgttttttccagaagctcgcgcagcatttccgcatcataaccgcgggtcagctttccttccagcgccactgagattacaccgttttcctctgagacaacaatgaccagcgcgtcggaattttcactcatccccagcgctgcccggtgccgggtccccaactgcttgctgatatcgtaattatctgaaagaggcaaaaaacagcctgcagcatacaattttccatcccgcagtatcatcgcaccgtcgtgcagaggagaattatggaaaaaaatgtttccaatcaactccatgctgggaacggaatcaatgatcgtaccggttttgatgatttctcccaaccgggattttctttcaatcaccatcaatgcgccggttttctgccgggaaagaaccggcgcagcctcacaaatcgccccgattgctgttttccattgctgatccaccgatttttcctcctgatgggaaaacaattccagtttggaaatccggctgcggccaactcgttccagcgccgtacgcagttccggctgaaaaataaccgccagcaaaatcaaaccgttgctgaataaatactgcatggcgtatttcatggtttgcagctgcatccaatctgctaaaaaataagcaatcaccagcgccagcagccccttgaccagttggccggtccgggtaactttcgcccaggtaatcaatttataaaccaaaaaagaagtaatcagaatatccaaaacgtcagtcggcctaaagcttttgacgacattcaccaaattaagccatgcatcggaaaagctgatcatgcggtttcctcctgactttccaaaattgcacacggatgtaattctattttaccacatcccaccacgaattcaatggctgttttctgaaaattctacttttgcggcatgttttcatctgccgtttccagcagacaaactgcatgggcagcaatcccctccatgctgccggtaaaacccaacccttcttcggttgtcgccttcacactgatattgctaacgtcagttcggcatacgcaggcaattttttcccgcatttgagggacatagagtgctaatttaggctgttgggcaattactgtgctgtcgatattccccacttgataaccttctgtttccagcataagaatcaccgccttcaaaagcgagagactgtccgcaccggcataggccggatcattgtccgggaaatgcttaccaatatcgcccaacgccgcagcgcccagcagtgcatctgctatggcatgaagcagcacgtctgcatctgaatgacccgccaaccccttgtcgaaaggaatggtcactcccccgattatacattttctccctttttcaaaacggtgtacgtcatatccgtgtccaatccgcatcatcccgctcatcctcccatccgtattggtatgccaacagactttgggctatcgccagatcttccggagtagtgatcttgatattgtcataagagcctttcaccatctgcaccggtattccagcgtactccaacagctgacaatcatccgtaaaatcccgctgttcacggtccgccctttccaccgctgctttatagactgcaacagaaaaaacctgcggtgtctgcgctgcgtacaaaacacttcgatcaggcgttgcaacgattttcccctcgccatccacctgcttaaccgtatcctttaccgggacgcccagtgtcgccgcacccgtttttctggcggcagcaatgcatgcttctacatcctcggggcgtataagaggccttgctccgtcatgaattgcgacaaactggctttgcgtgcctatttcccggaatccgttttgaaccgactgctgcctcgtttgacctccagtgacgatggtgcgaattttttgcaaatcaaaatctgcgatcatctgatgtaaaatcgggatagattgttctcttgtcactacaataatttccgcgacagatgggcaactccccagtctttgcaaggtatgaaccagtaccggagcatcagcaagcggcatcaactgcttatctatcccccccattcttgaggcgatccccgcggcgacgactatcacagaggtatccggcgtttccacctttctttttcgtccgctaaacatgacagccctccttataaaaatgatcttttcctcataccagccgaataacctttacttcctaataaccagctgttttgaaactattttatcatattcttgttctcagggaaagtaaagcgtttttacaaaaccattataaagcgtcttttcgcgctattttggattttcccgcaaataaaataaaagccggcgggatgaaatctcgccaggcttttatgtaattgatttaaattctcgccatcaggaaacctcatctttctccgccacctgcacctgattcaaaataaagggtaaaacttgatcttttcgaatattcagtacataggcaaattcttcatacagcattttctctgcttctttcataaaccgttcatcggtaatatgcaatcttctgccgtttttctgctgttcccgctgatgaaaataaagggcttttatcattcgtaccaactctgttctgtctccatcggaaaggatttgttgataccgctcttttctggctgcctcctcttcaatccaaaaaaaattttcgcccggcatctcccgtatcagtttcttaatttcctctcctgataaaatctgccgcattttcgagaccagattttcattattcacgggcacaaaaaagtggagtctggtgtatatacaggctttagcatatagtattcctgtttctgtccgccaaaatcccgctgtgttttatcctcaattctgcaaataccatgtacgctgtataaaaccatatctcctactgtatactgtctcattccgcacttcgttcctttccgttcgactctttccagggtcttttcccaccataataaacagctgcgatttttgcctgccgtccttcttccatttcgcttaaacgccggcgccattgtatttgggattcttcccggtctgccctattttgggagaaagaacagagttcttttaagcattctcttacattgagaatgccgcatttgtaccgttctgtcagataaatacagtccggcattgccaacggttttggatttttcaccgaaaaaggaatgaagttttctgctttactcatcttttccactcccaataaacaacaaactctgtatttttccaccgccgtatcaccgcgccaaatattagaacagcgttttgtgatcagaacacttttttatactgaatctttcgtcgtagaagactacactgcgtttttattttggttctcggcccggaataaaaaaatagtttgcttcaactggacttacgttccgcaaagcaaactacacgttgatttcaatatttatgataacatattccatcggaaaatgtaatagtcattttccacaaagcttttctttttcctattttccttaattttaaagcgaaggaaaatctttgttccaccttttaatatttcaaaaaaaccgaattttcatctagccgggtgccgaataatcgtttttagcttttctggtgctgttcttctgggatcgcttaaataaatttcatgatgaaatcgattctggcaaaaatcctcttgatatccattttcccgtacaaaagcttccatctgtgcaatcgttgcgggctcgttgtcatacgggccgatatgcatctgctgcacgcaaagcccttcttcccagcagaataaccgagctgcggaagtatccatttttttctttcggcaaacctcttccttcgcccaatccaaaactgattgatctgcaaaatccggcaagcgaatcatagaaatccagcaaaactcagatttcctgctgtaatcgacgcctggttctccatttgacatccaccaaagtccttccagcggaggcactacataaggaa

SEQ ID NO: 4259 - DNA, 7156 bp, Unknown
  16S sequences of unknown bacteria
aaagttcctttttccgccgtttcgacgaaccttgtttcgctgcgcgaaacaggttaatggctgaaaatgaccgaacccttatcgcccgacacaggctgttttcggttattttctctcttttcgtcttggcgggcgtcagcccgcctgcgtctcaaaaggaaaaaatttcccgaaaatttctctgtggcgcgtgccgagcagtttttacggagcggatttttgtcataacgacaaaaaagccgcagtgaatacttgacgtatttgcaaggcttttgcgaaagtcagggcaaaaatcagcccgtcaaaaccgatgagagttcggtcatttttagccaaattcctttacccgtcccaaaagcaaaaacagccctctttcgaggactgttttttcggaaatgtcccctcttttgccttgttataactttatacgatgtaaaggggtacgctgcgtttcacaaaacttcgaccgctgatgcggtgcccgaagttttttgctcactcgcgacttcacggtcggaaaaagttcctttttccgccgtttcgacgaaccttgtttcgctgcgcgaaacaggttcgtcaatccctttacccaccccgaaaataaaaaacaaccgcaaccaaatggttgcggttattttttatggggtgggtaaagggattcgaaccttcgatctccagtgccacaaactggcgctttaaccaactaagctatacccaccgaatggcgtgcttgaagggactcgaacccccgaccctctgcttagaaggcagatgctctatccagctgagctacaagcacacataaatggagcgggtgatgggaatcgaacccacgcgactagcttggaaggctagggttctaccattgaactacacccgcaaattatgttgacggaacgccgctccgtttttttgaaaaagagcgctgctctcaatcaaggcttaataattatacaacatatcggcggctttgtcaataggggtgtgtgaactttttttatcttttcggtcaaagccgccgatcgggcataaaacgaagcgtaaacagactctttattcatcgtcaaggtttgtgtcgtgtttgataacgtcaacaagttcgaactcgccgtcggacataacggcaagcgcgaagtttgtgggatacgttttgccgtagatatcggtcacgagcgcctgaaaaatgtaggcgtcgttgtcaagtctgcctatcgagagaggcatttccgcggacgaatattcaaacgtttcgccctcggtgaacgaggctgtttgaagatcgtccgaaaaaacatcgtacatcaccgttatcacgtcgccgtctttgagcgattcgatgcggtcggcctcggaatcggcgtttacatagcctgaaaggcttatttcacgggaatttttgtcaaaggtaaacagcagatacgaaagcgcgccgtttatcttgataacggaagaataaaaagtatggttttccgtttcgtcaacaacgtcacagtttaactgacagccgttcagaaacgcccagtttccgacaaagttgacggcgtattcgttccccttttcaacgatgtctgtatcataccctattccccaaagtttgtatttgccgttcagaagactttccatgtcaacgcggtaaagggtgtaacagacggagcagacgatgttttctgattcgggcgtgacggagaaccacagttttccgtttctgacctcgccgcggttttcaaaagcgatttgcgccgcgttgcccgaggaaaaatattttttcagaaaatcgccgtaagagggagttgcgatgccgttcgtatacgcctccatatacttttggctgccgacggggaaataaaaactcaatccgcctgcgtccgcccgagcggtgccgttgaagcaggtaacgcagtccgaaaggtcgtattcaaggtcgagatagtccgcaacgccgcagagatcgtaaaggtctcccgcatcgcctttgccggacgaagatccgaagccctgcgcgtaatacgcggcgcgggcgaacaggtttttctctccgcgtcctatcttttcgacaacgcgcgaaaaaaggtcttcaacaatgccgaatttttcgaggtcgataacggacacggtgtaataatccgtatcggcgttcttcacggcatagcctttcgcaatctccgtcgggtcggaaagattttcaagcgttttcttccaatcccagccgccggagggctcgagttcctcggacgctatcatcttttcggcgtaaggcgagagaatacgcgcggtttcgtaatttgccataaggcacgcgtcgaagccgacgaacgagagtttctttttcagcccgacgctttcaagcgcggacgagatttccgaaagagtgagaaaatcgttgccgttcagcgcgtccgagcagacgccgacagcggaaccgccgccgtgattccagaaaatcacggcggtctgttccgcaggatatttttcaattccgaatttcaaaaaatccgaaaaggcgcgctcgctgcccatattgacgggcggattcgactctataagttcaagcgtcccgtttttgacggcgtagcggttcgacctgtcggacgggatatcgaaatttctccattttgaagagccgcctgtctggagaattacgttcaccccgtcgggaatatccgccgacagcatttcggcaatatttgccgttgccgcgccgcgtttttgttcgaggtcgctgccgcagatatagacaagcagcgtgaaatccgagatttccgcatcggtcttcgcgccgtccgtgccgctttgttcgccgcctttgcaggcgaccgttccgccgaacaacacaagcgcaagaacaagcgcgaaaagttttttgattttttcagtcatttatttgccgcgtataacaaagcctacaacgttgtatgtgccccagcactcggtctgactccaccggtcgataccgaagaaggcgttgaagccgctgcgttcatctttttgataatatgttttgacgtttttctcaacctcgtgcgtgtcgatgtttattcttgacgtcaaagtccaccattctctcgtcgttttggagtattccttgtgcttttctattttgaagcaaagtttgtcgtattcaataccgtttctgtttttgcgtctgctgacggagtaaaatccgcttttttcaaggtcggcgcgaagcgttgttccgcggctttcggcgcgttttgccatattgagcgcttttgcctcgtcaagcgtgtaatcctcgttggagaacatcgcttcgacaaagcgtttcacttctttgccgagagcgtagcagtaaacgtaatcgtccttatccgcgcggcgaaccacttctatgttcttcatggcggcattaagtttggtcatctggcttttcaggtcgcggagcagttggttttcggggtcggtcagttcgtaatagagcaccgcttcatcatacgcttcaagataaagcgaaagaacgaatacgcggaaattctctttcaaatcgtatgtctgaacgtcgaaattgtatatataagaaagcatttcgtcataagttccgataataccggaagtgagtcccgccgagcccgaaagtatcttgctgccgagaagatgcgcttccgtatatattttactgctttccttttcaaccgctttgacatattcagccgccgccttttcgtattcgggcgtgccttttttcgcgctgtcaacagcctttttcttgttttcgaggtgcagaacaagagaacgaattctgtctgccagagtgtcaaaatcgtcaagcgcgcggctgcaatcgtttttgccgagtttgtcggacattatggagagttggagattcagttcgccgagagcagccgtccactttgcgtccatggacctgagatactcgttcagtttgctcaactcttttgcggtctcgtcctcgaacgagtcttcgtcgataaacgagaatatacgctttgcgccgacagaacccgcctcggtcgcaagcgccttaattccggtttttataaggtcgaaaacaaggcttgtttcaacggcgagaagttcctttttttcctccgtcgcgtgatagtcaaggctgatttcggcatctgatttttccgcgccccagagcgttttcgcatatacgccctttatcgaaacggtcgcttctatctcgatgttctcaagcgtcgcgccgtcctttttcacggtatttttcagcgtcagttcgcttgcggaagttttttcgagagaaagcgtttcaccgagatctccgccgactgttaccgaggaggcgtcgagatccgcaaacgttccgttcgctacgcggataacggttgtcacaacaaatccgtctccctgcttttcgacaaaatccactttcgcggaaagcgccgcgtcgtagatatcgaacgcgccggaaagttccttgttgcaggcaagcgcgtcggctgaaattttaagagagccttcttcgagcgaggcaaaagcctcgttcgcgttttcggcaaacgttaaaagacagtttgcgtcgtcttttctttcggcggatgcgacggagagtgttttttcaccgacggcaaccgtgaaatgttcggggctgatgttatttttgaatgtgtcgtccgtgaggtttacggtgaccgcggcgttcttattatccgtgttttcgattatgacttccgctttcggtctcgccacggttatcgtgacggaatacggaaacgcgtccttttcggcggcttcaagttccgcttttgccgctttttcttcgtcggtcaagttttcctgttcaggagctttttcttcgatcacggcttctgccgcaaacgcgataaagcccgagttttcgtccgccgcgcatgcgccgtcggctgcaaccctaacctcggtatcgctcttgcgctcaacggttcggagcgtcatttccgcaaatgcgccgccgagttttacctgttccgcggaaacggtgtccgcgaatttcatacctttcagggtcacggtcgtgtctattccccgcgcgtcgttcgcgacagaggacacatcgctgtaaatgcccgaaacggtatcatcaaaatttttcgaagcgcaaccgctcatcagtccgagcaacataaaagccgcaagtataaccgcaactgcctgtgtgatatgttttttcattttattttgcctcttttcttcgcttacttttttttcttcttgtttttatacgcgtccgcggctttgtcaagcacatcggaccacgcgccgcccgtgacagtttccaaatcgctggccgaaacggggtttggcgtattcacgttttgaggttttacctttgttttgctgctcatgttttttctcctttattttcggtctcacttctttatacgatgctttttcgaatatggcttatgaattttgatatttattttcgggttgccgaaaaaaaagataaatacataagtaaaattatagcatttcttcattagaatgtcaacagcagacattttctttctgagatatttctcaaaaaaaggggctgtaaaaaacttgcgttttttacagccccttaaaaatcgccgtcgttttgaaaagtcagatcaatcagataaccttatcgggattgaggatatttttggggtcgaacgcgcgtttgatgccgcgcattatttcgacctgcgtcgcgccgtactgttccgccataaacgatttttttgcgtagcctatgccgtgttcgcccgagacgagacctcggagttcgtaacttttgcggtacatacgctcgaacgctatcgcgagttttttctcaaactcttcctttgaaaggtcgtcgcggcagatataaacgtggaagttgccgtcgcctgcgtgcccgaagctcggaatgcgtatggcaagttcttccgctatcttatgcgtatacttgatgaaatcggcgacacggttgcggggcacgacgacgtcgcactcgtccatttcgcccgcggatgcctttatcgcttcaaggaaagcgccgcgcgttgaccagacagaatgtttgcgttcgtcggtatcgacgatgaacgcgtcaagtgcgcccatatcgacgcagagacgggcgacgttttcgatctccgcattgaccgcgagcggcatattgccgtcaacggtcagcagcaggtacgcaacgccgcttttgtcggggaattttttgccgagatattcttcggcgaaaagtattgtgtcgcgctccataaattctattgcggtaagcgacgcttttgattttattatttcgggcacggcttcaagcgccatgtctatgctcgggaacggagcgagaagcgaaacgctctttttggggagaggaacgagtttcaaaattgcttccgtcacaacggcaagagtgccttccgagccgacgataaggtctttgaggctgtaacccgcgctgtttttgacgactttgccgccgaacgtttcgatttcgccgttgggaagaactacggtaagtccgcggacataatcgcgtgtgacgccgtatttgacggcacgcattccgcctgcgttggtgctgatgttgccgcctatcgtcgcgcttttttcaccggggtcgggcggatagaacaggtcgtgttcttcgacgaacgcggcaagttccataagcaggacgccgggctgaacggtgacggcaaggttttccgtgtcaagttcaagtatcttgttcataaaggcggtttctatcatgattccgccgtttatcgcgacgcacgcgccgacaagccccgtgcccgagccgcggacaacgacggggatattgcgttcgtatgcgtgtttcattatttttgaaacttcttcggtataaagcacgcggacaagcacttcgggcatggctttgacgcccgcaagttcgtcgtggctgtaatcttcgcttatctcatcgccgacaagcacacggtcgggcgaggtggcggcgcggagaaattcgatgtcgttttcggtgactttgttatacattttgtttttcctccgcaagtttttcgatgagtttgggcagaatttcgtaaaggtcgccgacaaagccgtaatgcgcgatattgaatatggaagcggcaggatcggaggttatcgcgattatgcggtcggggtttttcatgcccgccgcaaactgaacggcgccgctgatgccgacggttattat

SEQ ID NO: 4260 - DNA, 4314 bp, Unknown
  16S sequences of unknown bacteria
aggtaccggcgggccgtgtccaagctgcggatgccgccgcccagctcgacgtgcaggcctgtcttggcgacaatctgggtgacgactgcggcattgggtgtcgtaccgtcccgggcgccttccagatcgacgatgtggatccactgggcccccgcggcggcgaagtcctcggcgacggccaggggatggtcgttgtagacggtcatctgggcgtagtcgcccttgtgcaggcgcacggcctttttttcgtagagatcaatggcgggcaggatcagcatggggtgcctcctttgcttgcgggcaggctgcaaaaggcctgcagaatgccaaggccgacggggccgcttttttctgggtggaattggcagcccaggacattgccattggcgacggcggcggtcagcggcgcgccgtattcggcggtggcgaggatataacgcgcgggcgtatcagcgtagtagctgtggacgaaatagacgcagtcgccgtcttgcgtgttcgccagcagcggatgggtcggctgggatagatgcagggcgttccagccgatgtgagggatcttcagattctgcggcacgtggcccgcaatggggcggacgacgccggggatcaggccaagcccggcgtattcgccgtactccaggctcttttcaaagagcagctgcatccccaggcagatgcccagaatggggacgccttttttcgcctgctccagcacaagctggtccagcccggtggcccgcagctgcgccgcagcgtcgcggaaggcgccgacgccggggaggatcagtcggtcggcccggcgcagcgctgccgcgtcgctggtcaggcaggcatcctcccccagcatggccagggagcttttcagggaaaacagatttcccacaccgtaatccaggatcgcgatcatgccagaactccttttgttgatgggatctcgtcccggcaatccgggtcgatggctacagcctggcgcagtgtccggcccagggccttgaacatggcttcgatgatatgatgggaatttgtcccgtccagctggcgcaggtgcaggttcatccgggcttcccgcgtgagggcctggaagaattcttccaccagctccgtgtcaaatgtcccgaccttttccgttggaagctgcgcctgcaggcgcaggcagctgcggccggacaggtccgctgcgcagagaatgagcgcttcgtccatgggcaggatgcagctgccgtagcggcggatgccgcgcttgtcgcccagcgcttggcacagcgcctggcccaggacgatgccgatgtcctcgacgctgtggtggtcgtcgactttggtgtcgccggagcaagtcagggtcagatcaaagcggctgtgcttggcaaagagggtcagcatatgatccagaaagccgacgccggattgcacctggcttgcgccggtgccgtccaggcagaggcgaagcgtgatggcggtctccgctgtcgtgcggttgatctcagcagttcgcatgggggcattcctcctttaaaatagccgcgatggtattcagcagcgcggccatctggtcttgggtgccaatggtgatgcgcagccagtccgtcagcgccggggtatcaaaatggcgcaccaggacgccacggcggcgcagggcggcatacagtgccgtgccgggcatggcgtcgcagcgggcgaagacaaagtttgcctggctctccagaacggtgaagcccatggaccgcagctgtgcgatggtatcggtgcggtttttgcggatggtctggcagcagcccataaaatagtcattttcccgaatggcggcgatcccggcggcctgggtcatccggttgacgttgtagggattgacggaattacggacggtattgaggtccgcgataagcgccgggtcgccgatggcaaagccgagccgcgcaccggccaggcttcgggatttggaaaaggtctgcgtaacgaggagattgtcatagcgcgccgtcagtgcaacgcagctctgcgtgccgaagtctacgtatgcctcgtcgatgatgacgagccggtccgggtcagcctgcaggatggattcaatttgtggcagtgtcagggcaaggccggtgggggcattggggttggcgatgacaatggaggcgtccagcccagcgtagtccgccgggtcaatggaaaaatcaggccgcaggtggatgggcatcgcctgcgtgccggtgacggcggcaaagacggggtagaagctatagctgacggcggggaaggcgaagcgccgccctgggccgccgaaggcgcgaaacgccagatacagcgcctcatccgagccgttgaccggcatcagtgcctccggtgcaacgccgtagagtccggcagcggcagcccgcaggtcccggcagtccgggtcggagtagagctgcaggctcccggcggcttccgtggccgcgtcgatgacagcggcaggagggggaaagggggattcgttggtgttcagcttcagatagcgccggtcccggggctgctccccgggggtgtaggcggtgaggctttgcagagcgaagaagcggctcatttttccacctccccgctgcggatcagggcactgcgggcgtgggcttccagcccttcggcgcgggcgagggtggcaacgtcaccacagagggcggccagcgcgtcctgggtgaaataggtgtattgggttttcttgataaaatcgtcgacgctcagagggctggagaagcgggccgtgccgctggtgggcagggtgtggttggggcccgccatatagtcgcccagcgcctccgggcagtagcggcccaggaagacagacccggcgttgcggatctggggcagatattgcatcgggtccgcgatgcacagctccagatgctccggggccagctcgttggcgatctcaatggcgacggccaggtcgcgtgccaggatgatcttgccgttttcgtcgatggatgcccgggcaatctcctgccggggcaggcggcccagctggcgctcgacctcggcctgaacgccctctgccagggccgggctgtccgtcaccaggacggcggtggccattttgtcgtgctctgcctggctgagcaggtccgccgcgacccaggccgggtccgccgcgccgtcggcgacgacgaggatctcgctgggcccggcgatcatgtcgatattgacaaggccgaagacctgccgcttggcttccgcgacaaaggcattgccggggccgacaatcttatcgaccttcgggactgtctccgtgccataggccagggcggcgatggcctgggcgccgccggtttggaagacccggtccaccccggcaatcttcgccgccgccaggatgaccggcgcgatgccgccgccgcaggtgggaggtgagaccatgacgatctggctgcagcctgccaatttagcggggatggcattcatcaggaccgtcgagggataggccgccgtgccgccggggatatataggccaactttttcgatgggcgtgatcttctgacctaggataacgccgtcccggcgagtaaattcaaagccggtgcggcactggtgggcgtggaaggcgcggatgttctctgcggcctgctccatcacgcggcgcagtgccgggtcgatggtttccagcgctgcgtccaggtcccgggcggggacttcgatctcggccagctctgccttgtcaaagcggcgggcatagtcccgcagggcggcgtcgccgccgtctcggacggtgcggagaatttcggagactgtgtcccggacgccggattctgtcacgccacggaaaaacagcttgcttttttcaacgttttcatagggatagatctgcatcatgaccggttcctcctattggttctccgcgcgctgctgggccacggcctggcagaacgtgccgatggcaggctggcggaatttccaggccgccttgttggcgatcagccgggcactgatggggcagatggtctccagcggcgccaggccgttttcaagaagtgtcttgcccgtctcgacgatatcgacgatgacgtcagaaaggccgaggatcggggccagctcgatagagccgttgagatgaatgatgtcgatctggcggctctgggcggcgtaatagctctgggcgatgtgttggaattttgtggcgacccgcagtgtctgggcggggtcgtcccggaattgggcgggcccggcgacgcacatgcggcatttgccgatgcccaggtccagcagctcgtagacatccggctcgtattccaataaaatatccttcccagcgacgcccaggtccgccgcaccgcgctcgacgtagatggc

SEQ ID NO: 4261 - DNA, 5804 bp, Unknown
  16S sequences of unknown bacteria
tgataccttcttctactgctgctcttgtagcattcagagcatcttccatacgaagctttgcttccttcatctcagtctcggttgcagcgccgacacggatcactgccacaccgcctgcgagctttgcaagacgctcctgcagcttctctttatcaaactcggactttgtctcctcgatctgagccttgatctgagcaacgcggtctgcgattgctttcttatcgcccataccgtcaacgataacggtgctctccttctgaaccttcacggattttgcatgaccaagcatatccatggtcgcatccttcagctcgatgccgacctcctcggaaataacctgtccaccggtcagaatcgcgatatctctgagcatctcttttcttctgtcaccatagcccggagcctttacacctactacagagaaggttccgcgcagcttgttgacgatcagggtggtcagtgcctcgccctcgatgtcctcagcgatgatgagaagctttctgcctgcctgtacgatctgctcaagcagcggaaggatctcctgaatattgctgatcttcttatctgtgatcaggatgcacggatcatccagaactgcttccatcttctcagtatcggttgccatatatgcggaaatgtatcctctgtcgaactgcataccttctaccagatccagctcggtctgcatggtcttggactcctcgatggtgataacgccgtcgccggttaccttctccattgcatctgcaacgagctgtcctacagtctcatccccggatgaaacagtcgctactcttgcgatctgctccttgccgcttaccttctggctcatcgcacggattgcttctacagcagtatccgtagcctttctcataccctttctcagaacgatcgggttcgcacctgctgccaggttcttcattccttcatttaccattgcctgtgccagtacggtagcagtcgtagtaccgtcaccagcgacatcattggtcttggaagcaacttccttgatcagctgagcgcccatgttctcaaatgcatcgccaagctcgatctcttttgcgatcgttacaccatcgtttgtaatcagcggagcgccatactgcttatccagtactacgtttcttcctttcggtccaagtgtcacacgaacggtatcagccagtttatttacgccagtctccagagattttctggcttctgcaccaaatttaatttcctttgccatgatcatcgatctccttttctttttatccggcggaattcctcttccgcctctctatccgtctaaagccggatcgttcgaatccgcttctttgtctgcccggcatccgatacgctttctctgatgcctgcgcaattgtcttactctactactgcgagaatatcactctgctttacgatgatgtactcttcctcgccaagctttacttcgtttcctgaatacttggagtagattaccttatcgccgacctttacctgcatggtcacttctttgccgtctaccagtccgcccggtcctacagcgataacctcagcctcctgcggcttctcctgtgtcttgctggtaagaatgatgccggatttggtcgtctcttctgcttcaaactgctttaatacaactctgtcgcctaacggtactaacttcatatttaattcctccttagatggtttcatccagatccattgtggcaggtgaaccgatcgtccacatgctgcctgcttataaccgaacgtccactgcggtattcggttaaattcgcttttatttgctagcactcgtcaagctcgagtgctaatcaacaatgctatattaatgaaattaccggaataatgcaaattcatcagtttcctgtttttacatatattcttttgatattctctgattttctccgtttttctccgttttactcatttatcgtttttttgaagattttttatagcaattccataaaataatacaatcaagaccgttcagcagagcgcgaaggacaaggaagatacctgcaggcgtgctgacgcacggcaaagatatctgacgcaggacttcacgctatgatggactggattgtttgcagtaatttatgaaattgctatagtaagctccatcccatcttcccatacgcggacacgctccgcatgtcccagctcatcaagtgtcacatagctgatcggttcagcaccgatgattctggtaccggtcaaggacgctatctcctctaaggttcctttttcttccggcgcccataccgccaccatccggacaaagccctgacgcacgaatctgccaagctgctcgtatgcatccctgctgtaatcttttgcaacgagcagcagcttccggttgtctggtatgatctgtccgaaaaatttataccgcagctcctctatattgttgatcttccgacccacaagcaggacatagacatcctccagcacggcttcctgcgtgtcaggctctgtgaccatatcctctgagagatacccgccatcgaagataaggcgatcctgcgtttcattccgaccaccgctagtctggcttccccagcctgcccggtcatccagactgccctgcgtcttccagccccggtcatacgaactgccctggcttcccatcgtcttccaggcattctgaacttccgtctgatttctttctgccattccacactgcgagcgaaaggtctgcgagctgatattctccccgccatttgccagtgtctccagatccgcatacatctcttctgcagaggcatatcgatcctgcggacggtatgcacacgccttcaatacgatccgtttcagctccgggtgaccgtttgccggcggcggcacctgctctcctctttgtctgcggtccattgcctcatcgattttcttcgctgtaatcggttcatccgcgcggataaatggcactctgcggttgttcagcatctcatacatcataattccaagcgaataaatatcaaccgtctgtccgtacttttccatgcgtaccacttccggtgcccagtagagcggagtccccgccttcgtcgcattggtcgtatggtccagcactctggaaatcccgaaatcacacagcttgaaatttccaaaagaagataccatcacattttccggcttgatatcccggtggatgatatgcttctgctcgcacagcatcagggctctgcaaatatccatgcccagccgaatgacgccggaatccttttccagcatctccttcggtaccttttttaaggaagtcagaagctccatccggatataaattttccagcctagcccatcctgattcggaatcagtgcaaaatcatcacagctgacgatgttggactggcctttcagctccatcatcatacggtattcacgaatatagcgattcagactctcttcataatacgctgcaacactttttttatcaaagccgctctcatacagctgctctacctcatcttcatccttcggccgcgcaatcaccttcaccgcagcccgctccgtgatgccaagctgcgcgcgctcgacctcatagacactcccgaactgaccgtttccaagatactttactgcccgccatcccggccatggcaactgaatatttaaatcttccatatttattttcccctttttctataacttttctatcgccttttcccagctgcctgccatcttccagccaaacgcagacagaccccatacagaaacaacaatcagtccaattacataccatggccagtcgctgtcaggcagatatctgtcaggcagatatattgcgaataaaaccacgaaagtcataatgccaaaaacaaatccaaacactgcccctgcaatcttagccagagcactgctcttcatgatataaattgcaaccagcatcacaaccggtacgagcatcactcccatccagatcagaattccttctgtctcaaaattatccagatttttgccaataacataaaacgtgtaataatagtagaatggcatcgccccccaaagaactccttcactcgtcgtttccgtgtcatctcctaccaaaccgctggcgaggaaaagcattgcaccgtaactgcttgcaaaagctactacatcaatccaaatcgcatggttcgagtaaaatgaccacttctgtaaaacctggcttccaatttctgtgtatacgctcagataagatgcgatcgcaatgcttgcgatcatcttcaccacgattccatttcggaatatttctctgcgaaacagaactacagcaattgccgccaggatcggcagaaaccaggaagcactcaaggtagcatttaccagaacccagctcctggcatatccatattgaccgtggaaataactctgcagaccgtggaaataactctgcaaatacatcgaatccttctgataacagaataacagcagataatggacgacaagcacgatcgcggtatcggcgatacacagccacagatccgaggtcgcatatttccaccgcaaccaatttttctttttttcttctgcctgtgacacctctgccttcacctgagctatcatctgcttctgcttttgttcctgctttgcataagcctgtctgacaccaacggtctcttcaaccgttcccatatcggagtcggtttcccacatttgcttatgtgcctgctttggcttgccgatcgtatgctgggtatcatcgttccatgcatttccctctgtccggccgctccagctcccctgtgtgctgccgtaggttccttttccaccgatcgttccattaaaagcagtatgctctccaccgaccgttccaccagaagtacttccatggaactggctttcatttctgcccgtaccagactgcagtgcctccagatctgcatacatctcatttgcagatgtataccggtctgatggacggtatgcacaggccttcagtacgatctgcttcagccgatggctccccttcgccggcatcggcaaacgctcaccgctgtagcgccgccgcagtgcttcattcattttctgtggggtcatcacctcatccgcatcgataaatggcatcttgcggttgttcagcatccaatacatcatgatgccgagtgaatacagatctaccgactttccgtatttttccatatgcgcaatttccggtgcccagtatgccggagtacccgactgagatgcattcgtcgtatggtccagaaaccgggaaacgccaaaatcgcacagcttgaaatcaccaaattgtgacaccataatattctccggcttgatatcccggtggataatatgtttctcctcgcagagcatcagcgcccgacagatgtccataccgagccggatcacggtctcttcctttgtaaatatctctttttgcatctttttcaacggtgtcagcagctccatccggatatagatctttccaccgatcccattcggattctcgatcagggtaaaatcgtcgcaactgatgatatttgactgccctttcatctccagcatcagacggtactcgctcgcatactgctgcagttcctccgcgtaggacgccgcaacgctttcctcatcaaacccgttttcataccgtgcttccagctcgctctcatcttttggtcgtgtgacgatcttcaccgccgcatgctccgtgatcccggcctgcgtgcgctcaatctcatatacctgcccgaactgaccgtttccaagatacttcactgcccgccatccaggccatggcagctgaatgttcaaattttccatatgcttcttagcctcttctctttccgtttctgggtcaagcggatattcacaatccgcttcgctacttgctcata

SEQ ID NO: 4262 - DNA, 2331 bp, Unknown
  16S sequences of unknown bacteria
caatactttccggtggattccatacaaacatgatagcaattattctcgataagccagttgtgaaacctttgaatatctgagttgatggttgaaaaagatttttgcagatattcggatatgccgtccttattggtagttacgatggttgcaacgataacatttttgtggacatcaagtccacagcagatggagtattttaacttcatcataagtatcaccaccttaataaaaggggaatagcaacattgactgtcatcctgcgactgaataaacatggtttattaccaatgataagagtccgggctcaatgtcccacttgtttgtgcttgtaaggatgacggcacatataactatacggggtcgaaataaattcgccacttctccttccgtgctctgtagtgtattgctattccttgaaagaattataaatcaaagagtggaggggcacaacatttttcataacttgtttgtgccttgagcgaagcgaaaggaatgataaaaactatgaaaaatgtaaatcaactgattggctgctgcgggctggactgcgaaaaatgtgatgccagaatcgcaacgattacaaacaacaacgccctgcgtgaaaaaactgccgacctgtggacaaagctcaatggggtaacgatcctacctgaaatgatcaactgcactggatgccgcatagagggtgcaaaaacgcccttctgtgacaagctctgccccgtacataactgcgtccgggaaaagggactggatacctgtgcagactgcgggcagatggctggatgtccaacgttggggcaaatcgccgtaaacagcccgtttgttttggaaaacctgaaataaaaatttttcaggagacatactatgttttatactatttatgttgccaaccgaaagcaacagaaaagagcaatttatgattgagtatagtaaacttcagataggttgtatgcttattataatttatattgcatttatatatttctgtgagctatatgcatgatgttgggaaaattgcaattccggatgcaattcttcaaaatcctggaaagtttaaggcacagccaaagcagccgggatatatcaggacaccgtacacgacagttacctttaccaatcaggttgcaaagcggtctgctacacgaacaaaacggttattcgagttaccagagaagcactctgccatgcgaagcacaagaaaaaacacgccagaccacaaagaaaacgtggtatgaaccgatggctgcatcatcacaggcaggagcagaagcttgtatatttcgcactgttcaaagcaagaacgcgcgcgggagtatcactttacgaagttggagattgatggctacatatagtattctaactgaaaaaatataatgcacctttaagagatcaggagaaaatgttatgataaaagttttattcgtttgccacggcaatatttgccgcagcccaatggctgaatttatttttaaagaaatggtcaaaaaacatggtttagaagatcaatttttaattaagtcagcagcaactagtacagaggaaatttggaatggaattggaaatccagtatatccgccagctaaaaaggagttagctcgtcatggaatttcttgtgacaaaaagcgggcagtacagatgtgtcgtgcagattatgaaaaatatgaatatttgatcgggatggacgaccggaatatttctaatatgattcgtatcgcaggtggtgatcctgcgcacaaaatttacaaacttcttatgtttgcagatgatccaggtgatattgcagatccatggtacacgggtgagtttggacgtacatatgaagatattgtcagaggctgtgaggggctgcttaaacatttggttgagaaataaagaaaaggttatctgcgtacaattatagaaaaatcctataacaggttaatttctaaagagtggtgcataaattgttaagattgcgcttacggcattccttatgaatagccgtcaaagcttttacagcctgacatttttgcaagattttaaggcaataggcacggcaaaatggtatatgatacatacgatgacagatgagacatatgcggtaaattgtacgctttcaccagaagatccaaatcgcagacaggtaatgttttttgtcgcattgttttctcgaatttactggatggcaggaacaatacttggggggggatttggtcagctgttaggtcagattccagatggcattgatttttgtatgacagcgttgcttgttataaaaattttaggcaaaaacccaggggcttgcccctgggatgaagccaagaaatatttttctaaatctttaatgtcgat

SEQ ID NO: 4263 - DNA, 32759 bp, Unknown
  16S sequences of unknown bacteria
ctgaatagcagcgggtaaaggagtgccgttgtattcctttactgacatcttgttaaagcaacttgcggtaggcataatcgttatgtttgttttggcaatgggaactccgcttgtgataaacggactctcgcattgggtaacttggtaggaggagcaaaatgcttatattttttcaagaattatgcttgcttctttttctgtggctgttaaaactcgttgacggactgatggaaattttctctgcgattgcaggcgttactgacgtaacctatcgcggcgagagagtgaatatcatcgaatttctcgcaggcgacaatacggtaaacacgattttttggtgcatattcattttggcgatcggattgacttgcatcttcacgattgccgcgcttatcaagaatatgataacgagccaaagaaacgtatcgacgatcgtcgggaaattctttctcgctctgctcggcacaatggcaatgctcgccgttgtgttcctgattattctgatttccaattcgcttttggttctcgtgtcagagatattccagatcggcaatacgacgaaattatcgagcgcgctgttcaacgcttgcgcgggagaatggataaacggctattcggtgtcggagtttgatatatcacggctcggagtgagagatattttcggggactacacgacaggtttcgtattccctgacgaatggcgttacaacggcatggtaaatcccgacgcattcttgtatctgccgtcgctgatcgcgggtatcgcgcttgcgatttctcttatcgtggcgatattgaaccttgcaaagcgcgtgtacgaaattatctttatgtactttgtaatgccgctttcgatgtcaacgctttcgcttgacgacggctcgaggttcaaggtttggagagaaacgttcattacgaaaatcgtccttgcctacggcacggtgttctcggtcaatatcttcgttttgcttttgccgatgataaccaaaatgcacatcgacggagtgagcggattcgggaacgcaatgttcttaatttttatgatcgtgggcggcgcaatggtaatcccggcagggcaggcgttgtttgcaaaactgttcggacaagcggacgatatgcacgcgggcggaaatttcctgcgctcggcgttctacggttcgcgcatggtcggtgcggcaacgttcgggttggcgcacaagattattcacggcggcgtcggaatcgggaaaacgatagcaggtcacaaaaaaggaaaaggcgggggcgacagttcggataaatattccgaagaaaagtcatcgaccggaacaagcgaagaaacaacggaaaattcggatagcggaggtgaaagcacagaatgagaattattccgaagaaaatcaaagtaaaaaacacggtatggaaatgctattcgatggcggacgtaatcgttgcgctcgtcgtgcttgcaatcatcttcgtggcaatcacgtcgggaagttatgcgtttgcggtcattatggggctgatagccgtcgtaatgtttatgcctacgcaggacggcatcttctattcgtgtattttggagaacataaaattcctgtttgcaaaaaaggtctataccgaaaatgcaagcaaggcaaaagaacgggttgacgcgattatcgacctgaaagacataaaagaaaacggactgatcgaatacgggggcggttatttcggcagagtcgttaaagtgggacaaaagaacttcggcatcgaggacgtcgaacagcagaatatcgacatagggtatcttgcaaacgccctgaaaatgcttgacggaacgcaaatagcggacgtcgtaaagattgaccgtcccgtaaatcttgactgtttcgcgcaggacttgttcgcgcggctcggcagtattaaggagagcgtggacgagaacggcgtgaaagaaataaaggagaatattttacaggagcgcatcgaccgtatcgacaagatgaataacatccgcaagcagtatctttcggattactacatagtggtgtacggcaagaacgaactcgaccttgaaaacacgacgataaacgtggcaagcgagataaacaaatgcggcttaaataccaaacttctcggaaaacgggaaacggcggtgttcctgaaatacagcttctcccgcaattttgacgaaagggagataaaggaagtcgcggacagcgaccttctcgcttgggtgaaaccgaaaaaagtggagtttaaggcaaactcgtacacggtggacggaacgcaagcggcggtgttcgccatagcggattatccgttgcgcgtaaaaaacgcttggggagcagacctttataacattccgaatacgaaagtcgttctgcacgttaagcccgtggacaagtttaaggcaatcaaacgtatcgacaagtgtatcggggaaatggaaaccaaacagattatgtccgaaaaagcgagcgaagcgaacagcgcggaaacccacagggaaacgatgcacgcgcttctcgatagtctgcaaacggaaaacgaatcgcttttggacgttacgctgaccattacggcgtacaactatcttgacgacgagaattacaagaaatcggtgcgcagaaatattatgacgggcaatttcaagccgtctaatctttacggtttacagatagaagggttcaggtcgtcggcaatctctcccgtttccaccttaaaaacatacgagcgcggcatcaacagctccagcttggcggcggtatttccgttcgtgagaacgttcgttatggacgagggcggcattatgctcggagagaacaaagcgaacggctatccgttcatcttcaatatgtggaaacgcggcaacctgtatcagaactcaaacggtatgattatcggtaagtccggttcgggcaaatcgttcttcttaaagtcgctcatcgcaaacgaatgggcgaacgatacgagggtaatcattctcgatcccgaagccgagtacctgaccttgacaaaaaatctgtcgggcaatctgatagacgtcggcaacgcgaaagaaggcagaatcaatcctttccatatctataagatactgacggaggacggaacgcccgccgagcctgcggttacgttcaatacgcacctgaaaatgcttgaaagtttcttcaaaatcgttcttgtgggcgcgagcgcggacgttatcgaactcatcaataatctcgtcgtggaagcgtatgagagaaaaggcatcaccgaaacgaccgactgcacgaacttcaaagcagaggactttcctttgttttccgacttgcttgcagtattgcaggagaagaacaaggaggaaatggacaatctgaccttgcgcgatatgcgcacggcggaactgtacttgcagaaatttgtaaacggcagatattcggacatttggaacgcgccgtccacgctcgaagtcaatgcaaaccttatcgacttcaattttcagtcgctttttgcaaataagaacaatacggtggcgaacgcgcagatgttgcttgttttccgttttatcgaacaggaagtcatcaatgcgagagaagcgaacaagagcggaagaaacttgcggacgctcattatcgccgacgaagcacatcttttcatcgacgcgaaatttccgattgctttggactttttcttttcgatgagtaagcgtatcagaaaatataacggcggatttattcccgccacgcaaaacattgcggactggaacgcaaacgaggaactcaggagcaagacgagcgccattctcaaaaactcgcagtacacgtttattttcaaattaagcgcgcccgacatgaaagacgttttggacgtttacaaggcgggcgacagcttcaacggcgacgagcagagaatgattatatcggcggttacgggacaggtgttctttgtcggttctacggaacttcgcacctgcgtgaaaatcacgacgggagaatatatcaagagcctgtttgaggagaaaacgggcgaaaattatcaaaaaggggaggttaaataagtggtaaaaaccaaactgaaaggcatagcaaggtggctgtgtcttgccgtattcgcactctgtatcagtctgtgtttggcaatggcgacgacaaacacggcgtatgcggcgacaacgccgaaatataccttggcgtatgactatacgcactattacaactataacacgtctaaatcggctgacggttcgggaacgggcgttttatctgcaagcgtaaagggcgacaacggaagtatgacgaccgtacagttttatatttacggaagctccacttcgggtactgcgaatcttaccaaaggcggagcgatagcaagcaactcgctcacaattacgcttgacgcgtcgatacaaggttattcgatgagcgtaaccaacagttcgggaacgaccgtaggttctcagtcaggaaagaattatacgctgtcgaatttgtcggacggtacatataatttcacctgttctttgaggggtgcgggatggaatccgaacgcacgagcatacgcttggtacagtatggacgtttcgtcctcatttgtcgtagatactacggctccgacaatcaacggcgcatcgacttcttcgaccgggaaatacacaaacgcttccacatatatttccgtttccgattcgggaagcggtgcggaagcactttatatgaaagcgccgggcaacagttactattcaaacgtcggtacttccacaacggtttcatcgaccgcaacaaacgggttgtattatttctacgccaaggataaggcgggaaatacttcaagtacatattacttgtatctcgacacgacaacacccacgggaacgataaagaacagcagcggcacggcaatatcgggttacacaaacggcgcattttcctatacggcaacggatacggggagcggcgtgagctacctgcaatataaaaaaccgggtagttcttcgtggttgtcctatacttcgggtacaacgattgcttcaaccgcaacgaacggacagtatcagttcagggcggtagataaggcaggaaatgtgtcggatacgaaaacgatctaccttgattccgccgcgcctacgggaacgataaaaaacagtagcggtacggcaatatcgggttacacgggcggtgcgttttcctatacggcaacggatacggggagcggagtgagttacctgcaatataaaacgccgggcagttcttcgtggacgacttattcttcgggtacaaccatttccgcaagcgcgacgaacggtttgtatcagttcagagctgtggacaatgcgggaaacacttctgcggtgagttcaatttatctcgatacggcgattccgacgggaaaaattaccgacagtaacggaacgacggttacgactacgaccaataaagcgttcaaatatacggcaagcgacgggttgagcggaatcgcttatatgcagtacaagaagccgaacagtacggtatgggaaacttatgcagcaggtacgctgattcagaccacggatacaaacggcatttaccgttttcgtgcgtttgataatgcgggaaacgaatccgaaacggttatgatttgtcttgataccgtaaaaccgacgggaacgctttacggcggaacttcgacggtcgcaagcggcggaaaaaccaatgcgaactacgttaagtttgtgccgagcgattcgatgtcgggaatcaaaagcatttacgttcaaaccccttcatcgtcgggctacgaatcctacacgagcggaagccagctcgcagaagaaggcacgtacagtttctattgtacggacgctgcgggaaacttctcgatgatttacacggttattctcgacaagtctgcgccgattctcgggtgcttgcagacggagttttattcgacttacggactcggctttaccgtatcggcaagcgatgacagcggaagcgtaaagctgtattacaaaacgccgtcaagcagcagttacgtacttgccggaacgtcgtcctattcgacgacgcttgaaagcgaaaacggaaagtattatttctacgccgttgacgatttgggaaacagaagccaaacctattggattgaccttcaaatcttgtatcctgatccgacggtagaacaatcgggaacggacaattccgtctatatcacttggacgaacggcaacacggcaacgctgaacggagatgattatagggcttcgcttcgttcgtgaacttgaacagggcaagaaaactgtacgtatggacaaggttaatcaagccttggctatgtttggtatgcaagtggacgttggggtaatggataaacctgagatggcggaagaagactgaggtgtgtaaaataagatgagacaaaaagtgccaaaatggcactgaaacttaaaaatatgtcaagattaccgattagattttatttgattaagtcaaaatggcgtatttataaaaaacaatttacgccaaaatgacataaaccccttgattttttgaggacgatagtgtataatataatcgaggtataaatatgacgctgaaagaactaagaaaattgaaagggctaacccaaaaggattgtgctcaattcttaagtattccgcttagaacgtacacgagatatgaagcggacgactcaaaacagaatgccataaaatatcaatatatgctacaaaagttaaatgagtacggatatgttgacgaagaacacggtattttatcgttggaagatattaaaaatatatgcaatgaagtgtttgcggaatatgaagttagatatgcctatttattcggttcttatgcgaaaggtaaggcgaccgagaaaagcgacgttgatttgcttgtagagctgacgggaaaaaacggcttaaaattctttgagatggtagaagttttaagagaaaaactgaagaaaaaggtagacttgcttgacgccgggcaattagagaacaattctatgctggcgcaagaaatactaagagatggaataaaaatttataaaaaataaattacagacctaaaaatttttataaatatgactaaaattgtcatattttaaatgatataatgaaaaaggaggagctaaaatgaaaacatattatttaaagataagagataaatttatacaagatatcaaaaatcgtactaaaaagcacgaatatagattagcttcgcctgaaaggatgcaagctaaagtaggggataccttcgttttgatatcaaatcagaataagggcaattttgttcgcacaactataaaaggaattaaaacttataaaacttggagagaagcgttagaaaaaaactgggaacaggattttaaaaatttgttttcatcgatagaggacaccttaaaggaatgttataagttttatacgaaggaagaggttgataaatatgggattgtcgtatttgagatagagcctttatatgtcgactactctaaagccagcgttttaattgatactaatatttttataaaacgtgaaagtagcaataacgttacttttgaaataaatagtttatttaagtggtttgataaaaagcacataaagaaatatatacataattctacggtagaagagttaaagacttacaaagatgagaaagtaaaaaatacaatgctaacaaagattaattcgtatgatattttaccatcatttaaaatggagacagataggtattttgaatatattgtaagtttatatgcaaaagatgcaaatagtaagatagataatatacttcttatcttaaaatagaagatgaaaatgaaaactattctgatatagagccgatattaacgccaaaaagaagattgaaagtaggaacgtttaaaattgaacgtacaggttttcgcttaggggaacgttttcttaaaattatttttgaaaatgctacaaaatgggatgttgatgaagtttatgtgacactttttgaagataaaagaaatggcgttatagcgttaaaaaacacaatggaacaatggggattcgttaaacatggatataaaaaatcaaatggcgaactggtacttgtaaaggatatgaggcactataacattaaagaatctcctaagtttaattatccaatattgaaaccagaaaagaatcatttctttttgcctatttatccgcagtatcatacggatttatttcctgacaatatattgaaaagtgaggatatgcgtttatatgaagacaaattggctcataggtatgcaatagaaaagatatatttaacaggtgcttttgatattcgagcaaaacccggcgacgtaattttaatttatagggttggggaaggactgtacaaaaactattcttcggttgttacagggatggcaatagttcaggaagttgtagagacaaaaaacgtggaagaatgtatcggtatttgcaaagataaatctatatttagagaagaagacatacgaaaagtatatagtaaatatcctgttgtattaaagctattggattataaaccatttacacataaagttactttgagtgaattgagaaacaataatatcatagataagcattcaggccctcgtccgtttaattatgtaacaaaagaagaatttgaaattatttataagttaggaatggaggaataacaatgaaaaagaaaatattgatatcaataaatcctgaacacgtacaaaacatcataaaagggattaaaaaatacgaatatagaaaaattgcggccaaacaagatatttcttcaattattatctatgaaacaactcctatcaaaagaatagttgctgaagcggaaatcatagatgttttaatgtattcccccgaggaattgtgggcgattacaaaagatgaatctggtataagtaaagaattttttgatgaatactttgcgggaagagaaactgcttatgcttacaaattaggtaaaattaaagtctatgacgagcctaaaactttaatggattatggtattaaagctgcgcctcaatcgtttgtgtatattcaaggataaaaaacaggagaaaactatggagttaggaaaacttaaagaagttaatattagaaaagtttggggacacgagcaatatggcttttcggcttggttagcaaatgaagaaaatattaatgagcttggcgaaattttaggattaagcttaaccgatataaaaacagagcagttcgtaggaaattatcgctgtgatattatatgcaaagatgaaatatctgaaaaagtggttttaatcgaaaatcaacttgaagccacaaatcacgaccatcttggtaaaataataacatatgcttccggtttagatgccgccgttattgtatggattgttgaatcggctcgtcctgaacacgcaagcgccatcgagtggcttaataagcataccgacgatacggtcgatttctttttgattgaagttcacgcttatcaaattggaaattctcaacctgcgccgcaatttaaaattattgaacaaccgaatgattttgcgaaaaatattaaatcactctcaaaaacaacggaagtcggtgaagtttttgccaaaacaatggttaacagattagatttttggacgaggtttaacgagttcatagacaacaatggcaaaccgttcaataaacacaaggcaactaccgaccattggtacaacgttgcaatgggttcttccaagtgtcacatttcaatagatttggtaaacaaagagcataaaatcagggttggaatttggattccggacaataaagaattatatgataaattctatgaaaacaaggacacaattcaatccgcggttactttccctctttgctgggataggttagagacgaagaaggcatcgcttgtttgtacatatataaacggacttaattttgaagataattctaattataacgatttaatgactcaaattgtaaaacttgtgcttgagtttaaaaacgtattcaaacagtacgtataatttttttaccctaaatgtaattcaaattagtatatagggtaattaaaaaattttatgataaaacttcctatagcttttgctataagaaaattgggagatatattatggctaaagaaaaagtggaaaaacctcaatcgcttgaaaaaactttgtgggcagcggcggataaactaatcggtgcggttatgccgcacgattatatgaaaatggttttgggacttattttcttaaaatatgtgtcggaccgttttgatgcaaaatatacgcaattagtcgctgagggcgatggatttgaagaagaaaaagatgcttatgctgaagataacgtcttttggattcccgaaacggctcgttggaattatattaaaaagtttgttaaggatgagtctatcggtacaattttagaccaagccttaattgatattgaaaaggaaaacgaagaattgaaggggattttgcctaaagtttattctaaaggtgacgttgataaacgccgtttgggtgagcttgtcgatttgttctccaacaatctcgccacagaaaatatgacgggcgatttgttcggcagatgttatgaatatttccttggtgaattttccaaaaaattcggtcaaaaaggcggtgaattctatacaccgcgttgcgtagttgaccttattgtgaatatgattgaaccctttaatggtcgtgtttatgacccttgttgtggctccggcggtatgttctctcaatccgctaacttcattaaacaacatcaaggaaatatcaacaatatttccatttacggacaagaacttaatcccgatacttggcgcatggcaaaaatgaaccttgctatacgtggtattaccgctgatttgggagatagctacgccgacactttccataatgacaagcacaaaactttgcgcgctgattttattatggcaaatcctccgttcaatattagcgattatggtcaaccgtctttgcttgaagaccctcgttggatttatgatattcctcctcaaggaaatgcaaactatgcgtggattcagcatatagttagcaaattggcacccaagggtgtggctggttttgttttagcaaacggctctctttctacttcttccaaacaagaatatagtattcgcaaaaaaatgcttgaagaaggtattattgactgtatcattgctttgccgtctaatctttttagtacggttacaatccctgcctgcttgtggttcttgcgcaaagattgccgcaacaaagggaaggtattgtttattgattgcagagcaaaaggcgttatgattgaccgtaaaatccgagagttgacttataacgattttacgacgggacatacggataatgacgaacttatagagaaagtaaaagcctataatttagaaacttacggtgatgagaataagggcgatatagaaagtattgcggctgtatatcacgcttggcttaaaggcgaagggtatgaagacgttaagggattctgcaaatcggcaacccttgaagaaatacaagaagcagactactcacttgttcccggtcgttacgtgggaattgatgatagcaataaaatgactgacgaggaggttaaagcggagataataagagttaagcaagaattaaaagaattatttgcaaagaataaagaattagacgaaaagattcaagcgattcttgatagtgaagaataacacacggtatcaactatgtgcgattgctcgggtaaatcgtgtatagaaattttatattgctttaacagcgaacttgataattctttaaaagtagaacctgtagaaatattattaaaatcttctacttttgtttgtagcaaataatataaatattcaggaattattaaatcttgattacagaccattgacttaaatccttgattggtacacaaacttttgccagcgatagccaaatatccaatcggagctcttgaacttaacaaaaccgtatttggcggcaataattgtgtagaggaacgactcaagccttcttctgtgattttattttcactatcgtaaatatatttagatttattgtttgataaatccttcggcgtaagccaaacaacatccccgttccaataactagagatttttgttgatggtgttccacctgatataacattacaaacttcacttattctaaattctctcatatttataggtgtcctttatgaaaataggtaatattgcaaaaattattaactcaaaggttgatggctcgcttttagatgcaacaacatatatttcaacggaaaatatgttacctgattgtggtggcgtaacaacagcttcttccgttccttcaacgaaagttacggcttttttacgagacgatattttattatcaaatattcgcccgtatttcaagaaagtgttttttacgcgctttaatggtggttgttctaacgatgttatatgcttgcgtgctgataaaacagagtgtgtcccgcaatacctttactatctattgagtacagataaatttatcgacagattttccgcttcgtcaaagggaacaaaaatgccccgtggagataaaaacgccttgctttcttatgagtttcctcaaagaagcattgacgaacaactttacatagttgatattctcggaagtattgataattgcattgagaataaccaacttacttgtgacaaattagaagaattggcaaggcaaaaatatcttttgagaataagtacttcaactaaaaaaattgctttggaaacaattattactatttttgatagccaaagaattccattatcaagtagagagcgtttcgatagaaagggtaatttcccatattatggcgctactggaatattggattacattgacagctatttgtttgatggcgagtatgttttgattgctgaagatggaacagtaattgacaacgatggttatcctattgtgcaaattataaacgataaattttgggttaataatcacgcacatattttacaaggaactaatggatattctaatgctttactttatgttgtattgaaatgcttaaatattcaaaaggcggtaaccggtgcggttcaattaaaagtcaatcaagcgaacttatgcaaattagaaattcccaacttgaacagccgaacggttgaaagtctaaacaatgaaattgttccattgtttcaaaaaatacaagacttgaagcaaaagaacgcaaaattaaacgaattgaagcaaatttatcttaaaaaattctttggataaagggttttgcaagaaaagttgaatttcaaaactttaaaattatagtacaaataattttaaaggaggtttaacatatgttaaacagttttgaaaagcaactcaaacaaaccaacttggcacaaaacaccattgtgtcgtacctgcattcgctcaagcagtacatagatatgtacgatggcgtgttcacgaagaaaaacctactatcttataagggatttcttcttgaaaagtacaagcctaaaacggttaatttgcgaatacttgcaatcaataagtatttagagtttaataaacttgaaaaactcaaactcaagatgattaaagtacagcaaaaaacttttttagaaaacgtcattagcgatgccgactacaaattttttaaaaataaactcaagaaagacggtcgtataaattggtactttatcgttaggtatttagcggcaacaggcgcaagaatatccgaacttgtgcaaattaaaatagaacacgtttacatcggctatattgatatttacggaaaaggcggaaaagttcgtagaatttatattcccaaaacgttacgcaatgaaaccttaaaatggcttgaaagccttaatgcgacaagcggatatttattcttaaatcgctttggcgaaaagataactacacgcggagtcgctcaccaattaaagattttcgcggcggaatatggcatggatacaaaagtaatatatccgcattcgtttagacaccgttttgctaaaaactttttggaaaaatacaacgatttagcgtttttggcggaccttatggggcacgaaagtatagaaacgactcgaatatatttacgaaagacggcaaacgaacagcaagaacttgtagataaaatagttacttggtaacaaaggaaaaagttcctcggctctcaaccgaagaacttttttaaatacagttgttttaattcattaagcttttggttttctgtccttaaacgcataacttgttcctgtatatcttttgtgtaattataaaaatcaaccaattcagattcactaggcagatatacttcttgctcgtttaaaatagcatctaaatccaagtttttaatgcctgttgttccgttttcataattaaaaaatacgttagtgttataaagataattgaaggcagcatatacgtaaggggcatattctacttttttgcatttaattgctcggcaaaaattcgtacatataatcggggtattatataaatcaagtaaataatttgtaattaaagtacttcttcctgtggattgcgttgggctaccgcctgaaatttccacgattatatcccaagcacatagtttttttagcttgcagttcttttctaaaataaatcttgttggaggggagccttctttcccttggcttatatccgaaatatctgccccacgaatacaaattacttttgtattatttgatttagacggctcgtctttcccccaatcgcccccaatcgtagaatcaataaaatattgaaaaggaactagagttttacttttttttaaaaacttttcaatataataaaattgtatttttttaagcaataatatcgttattttctcattattttcaatcttgtcgtccaatgttccgagaatatcaactaaaggtaaatttgaaaattctgatagttttttattataagatgttgttaatagtgcacaagggattgaaaaaaaacaatatatgtgctataataatatatgtgttagtctatattttgtggaggttgccataaatgagtactgcaaaatttactgagtctagtttagaagacgctattatagagcaacttgtcgatttggggtatgaatatgcgattgatactgaccaatggatgataacgcgccctttgggtgcttttatcaatgaagatttgttgctttcttctttaatgaaaataaacgcaggcgtgaaagtttccgtgttggaacaagctatttctgcgttaaaaaatatagacaatccatcgttatttgaaagaaatcatattgtacataattggcttgtggacggcattcaagtagaagattatgacgctgaagtaaaccctttggttaaattcattgattttgaaaatatagacaaaaacacgtttcaagtagcaaatcaacttaagtttaaggaaaatagaaatttaagaatacccgacgttattatttacgtaaatggtattcctttggttgtgtttgagctaaagtcaatcgaatacgacgaagatacttttattgatagagcatacgagcaattaggaagaaacagcgaagccgatggctatcgttacgatatcccaacgctttttaactataacgcttttcttgttattagcgatggcgcaaacaataaggttggaacgcttacaagtgatttgacgagatataatgagtggaagagtgttgacggggaacccgggtataaaaagaattatgcgtataaattacaggtccttttagaaggattgttgaagcctgaaagacttttagacgttataaaaaatcacgtgttctttatgaacaaagataaggaaagaccgattaagatactttcccaatatcatcaatatttcggggttaaaaaggcatacgcaagtgttaaatctgctattaaaccacagggaaacggtaaggcgggcatcgtttggcatacacagggaagcggaaaatcgttttctatggttatgcttgcgcataaacttattacggactcttcattaaataatcctaccatagttgtattgacggatagaaacgatttggataatcaactttttacaacgttttctaatgctgccgagtttttgcgtacacgtcctattcaagtggaatcaagagatgatttgcttaaaaaagttagcgaagtaaaagaagggggtatcatttttacaacccttcaaaagtttgataaagagcgtattgttcctaataaacgaacaaatattattgttatttcggatgaggcacaccgttcccattatggcatagatgaaaaaattgttattaaaaagaatgacgatggtacattttccactatttcaaagtatggttatgctaaatttataagagatgctttaccagaagctacctatattggttttacgggaacgcctgttgaaaccgatgaccattcaacgtctgcaatttttggcaaaactgttgatacgtatgatatgactcaatcggtagaagatggttctacggttaaaattttctatgaaagtcgtcttgcgaaagtttggcttgatgaagataaattgaaagaaatcgacgcttactatgatgacctcgcaaatcaagacgtgccggacgaagttattgaggaatcaaagtctaaattatcttcaatgcaagttatcgtaggcgataaagatagactgcatttgcttgcgcaggatatattagagcattataacgaacgaaaggctgttttaaatggcaaggcaatgattgtctgtatgacaagaaagattgcggcggacttgtatcacgaaatcatatctattgagccttctcttgaaccaaaaattgcattggtcgttacggaaagtaataaagatactgaagaagagcgaaaattgttcaaagataagtcatatcgcgataatatggccaatgagttcaagaaaaaagacggaacgataaaaattgccattgttgtggatatgtggttaaccggctttgatgttacagaccttgacgttatgtatattgataagccgatgaaagggcacaatcttatgcaagctattgctcgtgtaaatagagttcacgcaggcaaagaaagcggtttgattgttgactatattggcattaagcgttctttggaagaagcgttaaatacatatacggcaagagataaagaacttaatttgcgagacatacaagaaacggcaaaatccatattggatgaaaagctttctgtcttggacgagatgttctataaagtagacaagatggggttctttgccggaacaaatgccgttagattaaaggcgatacaaaacggtgcagattttgtatttacgaaagatgaaatcaagaagacgtatttgcaaataaccaagcaattaaaagatgcatacgtcgtttcaattggtattttagataacgattataagaagaaggtgctatattatcttgcggttcgccattttgttcaaaaggttgaacgcggtaatatgcctacacatattttacccgaaactatcaacaagcacgttgcggatttaatcgctgaagccatcaaaggcgatgaagtggaaatccttacaaaagtagaagatactgacgacaatagaaatatttgggatttattgtccgaagaaaaggttgaaaagttaaggaaatctcaaccgccgcacgtatttattaagattatggaacgcttgttaaaagaagcagttcgtgaatatcgtggctataacttggtcaaagcaaaacaatatagcgaaagattacgtcttcttttagaagcgtataacactcgtgaagatgatttgcaaacagatatgacgattgttggcttgattgcgttctcgcaagaaatggtcgaatctgaagataatgcaaggaagaacaatttgtctggaagagaaagagcgttttatgatgctttggttgccaataagagtgcggtagaattgatgtcggatgatattcttcgtgtgatggcaatggagcttaagggaattgttgaagaatacgctacggttgattggtcaaagaaaaaagatacaagagcaaaaatgcgtatgcagattaaacgtcttctcaagaaatataactatccgcctgattatacggaagaagcaattacgcgtgtggttgaccaagctgaatttatgatgtaaggaaatacttaaggtacttaaggtacacgagtaaatcgtgtgccttattttaaaagtaaagtgtatctatcgaaattgacaatatataaatacggaacaatcgaaaaagaacaaaatcaaatttatttggcattattccgaaaaactttgatattgttccgaatgttggatttcgtatccacatgaagtaatacaaaaaggtatcgcaagattcccaatcttctcataatggcaattaagttttaaaaatggggaagataaaagtgtatatatacgataaaataattgattcttttgtgggaatatgctataattaaaatataaaatcgcaaaatggtgaggtaattatggttacaaggaaagaagatacgtcaagaagagttgcaaggcgcaagtacgaagaaaagaataaagaattgcgcaaagagagaagtgcgaacttccaaacgatgattccgagagaattgtatgaagaaatcaatgtgtttttaaccgaaaacgggaaaacaaaggtcgattttatcaaagaagcatatcaaataatgaaaaataacaaataaaataatcgttatcggttgtttcggaaacagcaaaggataaagacgaaacatgataagtatcgtatccggtgaagaatttttaaaaaacaaagaaaaatatcagatgacagggaaagttattccgtttaacgaggcgatggcggatggaaatctaacggaaacaatcttttcacccgattttatagaagaaaggtgtaaaacgcacaacgttaccgtttccgattatgaaaaaatcacgatggcgcacgtaagggcgatgagccaagaggaagaaattcatttatattttggctttgatatgttttgccaaatcaatcttcttacgctcttggcgtatttagagcaaattggctatcggaaggaaataacggtttttatttgcgacgaaatccacgataaggtaatagacgttttcaaaacgacggccggcggctattcggaagcgtacaagtcaatcgttgtcgagaaaaaacgaacggctacgcccaacaaatatttgaacgaagcggaagagttgtattttaattatgcaaagaagtatgcggctgttttgcaaagccttttaagcggttttaatggaaacaatgaaaaggagaagataggttatttgattcggcataacgctacgtacggtcttggcgatatacaatgggtgaaatggctgcataatctttaagaagataaaaacatcttagtttcaaatcgagcttgtgcaaattttgcacaagctgacgataacgggaagacgtatcaatatagtcgacaattggggtagacatataaaataatggcatcaagaaaagcaaaagaatcaaatggacgagggctatcaggcgcagtgagataatcattgcgtcgattttttataatggcagtttgtttgtaaaaattttttgttataacgtctattactattgacaaaataatataaaacgtctataataataaatgttaaatgtaaagaggatgctgttatgagaaagaagacggttcagttatttccggatacgattaagattttggagcaaatgggcgaacaaatcaagttggcgagattaagaagaaatttatccgttgagcttgtcgcggctcgcgcaaatataagcagggcgacggtttgggctattgaaaaagggagtccttccgttgcgataggatattacgccgccgttttgcatgcactgaataatatggataaagatttattgttggttgcgcaagacgataaactgggtaggacgcttcaagatttaaatttgcctaccagacaaagagcgcctaaaaagaagggggattaaagtatgtcgcagaccataaaaatacacgtatattttgataataatgttgacgaaaaatttaaggttggctgtctttttgtcgattatcaaaagggaaaagaaaagttctcgttcgaatatgacgatgcgttttttacaagccctcttttctgttattttttcgactacgatttacaaccttataagggaagacaatatttgccgatggataaaagcagctttggcgttttttcagatactgcgcccgataggtggggcaggcttttaatgaaacgcagagaaagaatcagagcggaagaacaaaaattgcccaaagtaaagacgttatatgaggctgattatttattgggcgtttttgacgaggcgcgcatgggcgcattgcgcttttctttggaagaagacggggaatatctctcggcggaaagggaattgtcaacgccgccttttgaaagtttaagaacgttagaagaagcgtcaaggcaatttgaaaaagaagaaaatttgttggagggtaaatggttaaaacttttgcttgctccgggctcttctttgggcggagcaagaccgaaagctacgattaaagacgttgacgaaagtctttggattgcgaaatttccttccaaaaacgacgaatacgatatcggcgcttgggaaaagacggttatggatttggcgaagttatgtggacttaacgttcccgattcgcaactgatgaaattttctaaacttggtagcacgtttttagtaaaacgttttgatagagaggggaataagagaattcactttatgtcagcaatgacggcgcttggcaaaaaagacggagataattcgtccggcggaatagggtatttggatattgcggcgtttattagggctaacggagcaaatcctgaaaaagatttaatagagctttggaagagaattgtatttaatattgcggtttctaacacagacgaccatttaagaaatcacggttttattttgacggaaaacgggtggagattatctcccgtatacgacgtaaacccgaatttagataaagacgcgttatcgcttaatgttacggaagaagacaatgcgctgtccgttgatttggcaatagaggtttgtgagaagtttgggatagataaaaaagatgcggtagagttagctaaaggcgtgttggtaacggtgtgcgataattggcgtataattgccgagaagaacggattgagtaagagttctatcgaatatatgaagcctgcttttggggcaacgcaaatataagcaaaagtgcgacgaaaatatagtcgcaacattctaaaagtacccgaaaggggtaatgtaaaaaagaatgcttaaaggctttttcttaacgtttattgataatgggcaataaaatttgtaagatagactaaaaaggcttgacaaaaacttattttgcgactaaaatatagttgcggtatagattagtcgcatttttagggagggcgttatgtatatcaagagaagtatcactgaaattcttaaaaaaagagcaaagaatagtaggtgtttattgcttacgggaccgagacaagtcggtaaatcaacgttactgaaagaaatttacagcgacgttaaatattatacatttgacgataaggttttgttgacctctgcattagacgaccctaaactttttttaaaaaacgcagcaaagccttcgatttttgatgaggttcagtacgcaaaagagttgtttccgtatataaaaatagaatgcgataaagaaaatagatacgaaaactactatttaacgggttcgcaacaaatgaaacttatggataaagccaaggagtctttggccggccgcgttagtattttagaacttcaaggcttgtctatgcgtgaaattaacgatatatcttttaacaagcattttgttccaaccgaagaatatatagcggcaagagaaaaagaagttaaaccgtacgataatatttggcaaaacattcatcgtggtgcatatccggaactttacgtaacggaaagagagtgggtggatttctattcgtcatacgttaggacttatttggaaagggatataaaagatgaaatagaaattaaggacgaaatagcctttacaagatttttaacttcggttgcggcaagaacggggcaaattcttaactatgcaagtatatcggaagaggttggcgtaacgcaagcgaccataaaaaattggatttccgtattagagaaaacgggcattgtatttattttgcagccatattattccagccatttaacgagggcgataaaaacgcctaagatttattttagagatacggggcttgcctgctatcttacgcgctggaacaattacgaagcgcttgaaaacagtgcggttgcgggcaatatgtttgaaactttcgttataaacgagattattaaatcttttataaacgaaggacttgaatataatttcagcgtattctattatcgcgggaaagataaaaagaggattaaacaaaacggcgaaactgttgaaacggaaaacgaaatagatttcatcatagaagaaaatggagttttgtatccgattgaaattaaaaaaagcgcaaaaccgatgaagagtatggcagatgcgtttgacgttttagataaagatatagataaaaagcgtggtatgggcgcgattgtatgtctgtatgatgacaaactttatttgaaagaggatttggtggttttgcctattgaatatatctaaaatatttcgttgatagattatttagaagacaagaaatattaaatattaaaaagtgccaaaatggcaccaagacaagcaaaatttcaaaaattccttgcggtaatagataggactatcaataatccgaacgggcggcggaaaatgacaaaaaagtacccgaaagggtataaaaaaaggtgattttggggtttgacctatcaatcgcactcagccatacagagagaagaggaattctccgcgacgctccaagggctcgaatcccgcctttcgtttctcctaaaaagggacgagccggccgattctactcgcacctttaaaaaacctgcgtttctttaaaaaaggcggccgagccgtcggctatccttcaaaaaggcccgaatccgcggatttttttcggcgcgctctttaagtgcgattgtttttcggtgtctttgctttttttgcttgacgatttttgtcaaaggagatatactgggaacggataaattttttcgggaaaggagttaacctgaaaaaacgagggtggacaggtgagcgacgaaacgacaaaaacgaagaaaacggcacattctttacagtatcccgtcatgctggtgcacggattcggattcagggacggaaagaggatcaattattggggaaggattcccaaacttttggaagagaaaggctgcgcggtattttacggaaagcaggacagcagcggaacgatagaggataacgctctctttttaaaggaaagaatcgaggaaattttgcgggaaacgggcgcggaaaaagtaaacttgattgctcattcgaagggaggactcgaagcgagatatttgatctcgacgctgaaaacggcggataaggtcgcttcgctgacgacgataagcactccgcaccgcggctctgaaacgatagagaagatccccgattttctcttaaaaatcgccggcttttttatgaacgtctggatgcggatcatgggcgataaaaatccgcacgcctatcaggcctatctctctttcagggccgacagcgccaaaatttttaatagaaataatcccgacagcgaaaacgtctattatcaaagctacgcgtttgttatgaagcgagatatctttttgtggcttcctcatctgatcattcgcttattggaaggagaaaacgacggactcgttacgccgaaatccgccgcttggggagattttaaaggggtggtcaaaagcaattccaaacggggaatctcccattgcgatgaagtcgatctgagaaggagaaaattcactaaaaagacgggcgacggaatctgcgatatattggaggtatacgcgaacatagccgacactttgtacgaaaaaggtttttgagcttagaatttcgctccggcggcacggcatcaggcgtcaaaaagcgctctcgccgcacggttcagaacagaaaaattacctgagcggaatcgcaaaactaaaaaactaacgcggattaccgacttttaagtcgggggagggcgggactttttctgtcagaacgcccggcggagataaaggggcaaaacaggctgtgtcttatcggacattggcctttttctataaaggaggcagaaataaaaaatttttgcatcgactaggtgtaacgctctttttcaaagaaaaatagcttggcagggggcgaaaggcgtggaaaaattgttcggaaaagtaaaaaactcctgaatttgaggaatatggaaaataatatcgcgcggggaaagggaacgaatttctcgatttttcacaatcctattgacacggcaataaataaatgatataatttggttaagcgcaaacgtaaaggcggctcagccgacgttttcgacgtgtaactgaaaaaataaaagattcctacgatgcagccgaaagcgtaaaagcgggtgctttttttgcttatcgggcgcgtctattccgccgatcaaaaaaatcgacgggcgcgggggtaaaaaatgatcgcagtgtggtcgatagtattggggggatccctcgtcgttttcgcggcgctgatcgcggtggtatttccccgcatatttttgaaggagggggagatcgatacccctccgagcgaccgcggactgaaaaaggtgaaggagccgaacgggaaaagcattcttttcgagccgtccgtcgaaatgagaaaatacgtcagacagtatatcctgtcggagcgcggtgaaaaaaaagtcatcgtctgtcggctggacgaggaaatttcctatctcgattacgatatcctgttgttcgactgtctggacagaatgttcaggattctcaacgtaagggaaatcgtcgaaaaaaggggatatacgcgggaggtggagcttccgaaacgtacctcttacgtcgctttggcgctcaacgaagtcaacgataaaaaaattcccgggaagcctgcgcttttgaataagggcaggcggatagcgtttgccgcactcctgtgcacgctgatcgtcgcggagatctttttgctgaaaatttgctgcgcgcatctgttcggcgggattttcgcggaaagctttatagaatcggggagcagttttctcttcaccatccttctctctctcggcgcggtactcgtcaatctgatctgctttatcctctttataaaaacgaaatatcgaaaaaaatccgtcggaggaaaaaggcgatgagcggatacgaagtgatctccaagggaacatatccccgctccgaaacggacggttttgtttccatcgtgcaatatctgttcgtcagacaggacggacggaaatttttgttgctgaaattttccaatgacagcgcggaaacggcgacggggataaagctgtcgatcagacagacgggcgcaaaaggggcggacctcggcacgattgtcgaggaagcggaggtgaaaaggggagcgccgcacgcgcagttcgtgctgcccgagaaaatcgctctcgacgacgattgcgtcggcttttccgtagagattctctccgccgatttcggggcgtatacgtattctttaaagggagagcgcgtgatcgtttcctatggcggggaaaagccccgaaggaaacacggcgccgaggaatatctgtccaaaaccaagggcaaaaagttttccgtttccattcgttcgttcaaagcctccgttttttgcctcgtcggggttatcactctgtttctcgcactcggcatcactttgtttcagctcgacgctttcaaggaaacggcgacgggatttttgaaaaacggcatcgaatacgagtttcttgacgccgattattcggaatcgactcccgtccgcgtgagcggatacaggggaagcccccggcggctggaaattcctcaaaagatagaggaacatcccgtcacggaggtggcgccgagggcgttttccggctgtaaaagtctggaatatctcgatctgggcagcgtcactcacgtcggcgagcgggcgtttgaacactgcgtcgctctgcgggaggtaaaggcggaaaatttggaacggatcggatactccgcctttgtagggaatacgagtcttgctttcgtcgatatatccaatgccgaaaaaacgctggaaatacaggactatgcgtttatggactgcgacactattgaaagattcgatatcgatcagtttctttcctattccgggataaacgtgctttttggcggcagcacttccatagacagtctgcatttgaaaaattataactatcgcatcgaaatttacggcagcccgaacacgataaaggggcttttcggctacgcggaaagaaaacaactgtcttcgctgaccatcgattatatagacgtgattccgagagaattctgcatggactgcatttccctcacttccgtcgagttcgggtatctcagagattccatagtgggcagggacgcgttcaggggatgtaaaagcctgacctccgtttcttttccccaccccatcgcttacgtatacgaatacgcctttgcggacacggcgatctccgcgttcgacgccgaaaaactgcaaacgatcgagtacggcgcgttttcaaactgcgcttctcttagttccttccccttagaaaataactgggaattgacggaaatcgaaggcggcgcgttttcgggaagcggtctggaaagcatctatatccccgcgcaaatagagtctatcgagagcgaactcttccaaaactgccgcaatttgtcgacggttactttcccttccaacagcagagtgaaattcatcggcgacaatgcgtttgcctcttgcaccaagctttcctcgatttcgcttcccgctaaattggaggaattgggagaaaacgctttcgaagagtgctccgctttcaccgaatgtaaactgcccgcgtcgcttacgcggatcaggcagggcgctttttcccggtgtacgtctttgcgttccatggtcgttcccgaaaacgtttgttttatagggttcggcgcctttaaaaattgcagccggctggaaagcctttcggtgccctatgtgggcgaaacggaaatgggaaacggatacctgggctttattttcggcgcggagtcgagcggagtttcgtggaattgcgtgcctgtttcccttggaaaagtcaccgtcaccaaagcgacgaaagtgcccgaaaatgcgtttttcggatgccatgatatcgagcaaatccttcttcccgccgctacggacgagatcggcgcttatgcctttgcacgctgtacttcgctgaaaaccgctcccctcggagaaaatctcgtgaaaataggggaacgcgcgttttattgttgcgaggcgttgacttcttttactttgtcgaataaaattaccgaaatcggaaaattcgcatttacggaatgcgaaaacttagaggaggtcacgcttccctttatcggcaggtccaggaagtcgtcccgctatttttccgatattttcggcgggtcggattcttgggacaacagggacatcccccaaagcctgaaaaaagtgacgctgacggatgaaaccgtcatcccgaacgccgctttcagatactgttcgatgctgcgggagataacgctgaacgagggaatttcggagatcggcgagtggacgtttgacggctgcttaaatttgactaagataaacattcccgcgtcgatgaaacaaatcggaatcggcgcttttaataattgttacaagctgttcgaggtgggcaatttcagcgctttgaaaattgcaaggggttcttcggagaacggcgggatagggtactatgcgctcaacgtctacggccccgaaaaagcgccgatgaagcggacggaagaaagcgggtatacctttgcgaaagcggatgaagattggtatctcgtgggctatgacgaaaacgaggaagagctcgatctgccgttgggtttctacgacgacggagcctatgtcagccgctatcgtattccctcttatttatttatagaaaattaccttatcacgcgggcgcagattccttcggcggtcaaagaaataggggaatatgccttcgaaggctgcgcctctctcgtttcggtgtcctttgccgaagattctcccttgaaggagatcgggcaatatacgttttttaattgtctgaatcttcgcgttgtcgagctgcccgcggcgctggaaagtatagaaagtcatgcgttttataactgctcctcgctcgaaagcatcgctctcaacaaaaagctttcctccatcggtgcggacgcatttctcttgtgtttcaatctcgtagaagtttataattacagcgcgctcgccgtgaaggcgggaagcagagattacggtctggtggcgtattacgcgcttgccgtctatgactcggcggatggcgggaggatacgggaggtaaccgtaaacggactcatttttaagacgtacggggagaaatggtggctggtcggctatacttcctgtccctccgcgcttacgttggattccttcgaatacgagggaaaaacgatctcctcttattctgtcaggcgcggggcttttcaaaattgttacgagcttaccgcgcttcaaataggcgaagcggtgacgtctatcggcgaaaacgcctttcaatattgcggcaatctcaccgaagtcgtctttacggaagattcgcgcatcacgcggatagaaaataatacgttcgaaaattgtttacaattgacgaagctcgtattgccgacgggattggattccatcggcaacagcgccttttcctcctgcgggagcctgaaaagcgtgacgctgccgaaaaacctgcaaacgatctccgccgacgcttttggaggatgcagattattgcatcacgtctataatttaagcggcttgccgctgaaagagggaaacaggcaatacggatacgtcgcgtattatgcgctgaaagtttcttcttctttgagcgacgccgggctcgaatacgcggaaaaggacggcttctatttcgttttgtgcgacggaaaggcctatctctacgacagcgacgatttcggcgggatgagcagaatcgagttgccgaattcgtttgaagcgggcggcaagacggtcgactcttatatcatcaaagcggaagcgttttacaataggcttttttccgccgtattcattccctcggcggtttcccgcatagacgattccgcgtttgtctggtgttatcatctcacttcggtgtattacgagggtacgaaaaaggagtgggaaaaactgaccgaaacgaatacgtccgattgtgcgcttttgtcgtgcgaaataaagtattcgacggaagagagtgaagaaatatgaaaaagtatagagaaacgctggaaaagctcagcgacgggcagaaaatttccctgttgacgaacgacggctttctcgcctctcccgaagcggcggaagcgggactgccccatttggagatagcgagttttgaagaagcggcaaaggcggaagagctctttcgtttttcctttgacgccgccgcaaattcctggaatacggaattgatcggaaaaagggcggaaacgctggcgctggctgcaaaggaaaaggggataaacgcgctgatttccccgcctgccaacgtaaagagcaatctctacggcacgggggcgacggaagacccctttttggcgggcgctctggcgggcgcgtatatgtccgccgtttcccgaacggggctgatgccttgcctttccctctgcgcgctgggtgaaacggacgcggattttgccgatacgctgataaacgcgagggcgttgaaagaatatttcctgaaaccctttgaatcagcggcgcacacgatggacggcggggcgatcgtcacgtcccgcgcggcgttgaagggagagtacgcggccgtcaacggcggcgttatcgacggctggctgcacgagggcttcggaaggggaaagtttattctctgcgactgcgacggagcggattcccatgccgccgtccttgccctgcgcggcggggacgcgatgtgtctgcacgcttccccctcttcgctggaaggggcgttggagtactatcgcgctttgaaaaaatcagagtcggaggggagcgtttcccccgaggaagtggaaacggcgtgccgggagggcgcggcgttttcggaggaagaactcgacgaggccgcggacagggcgctcgatttcgccttcgcgtgcgacaatggcttccacgctttgaaaaaaaacgaagaaaaccgcggggaaagcaaagaaagcgcggaggagatcgccttgcggctcgcggaagaatccgtcgtgcttttgaagaacgaagggaatgttttgcccttgaaagggggcagcagggtagcggtgatcggtcaggcggccttcctttcggggggaaggacgcaaagttttatgcagtatctttccgccgcgaacgaagcggccggcttccaattcgtgggatatgcggacggttacgaaatagacgcggacaggagcgacgcgctgattcccgaagcgtgcgagctggcgcgtagcgcggatgtggcgctggtatttttgggccagggagcaaggcggggggacgttgccgcgacgcggtgcgtcaaactgcctcccaatcagctggcgctagtggacgccctcggaaaggtgtgcgaaaagacgatcgccgtaacgacgggcgactgtcagacggatatgagcttcgataagcgctgcgccgcggttttggtttcgccccctttggaaaagtacggcgcgcaggcgttgataaatcttttgacgggcaggagcaatccctcgggaaaattggcggctacccgctacgacgacgcggacgaaaaattcgcgcagctgcggctgtgcaaacgcctgggcaaaaataaggtggggacgtttttcggctatcgacattacgacacttcgggaatttcggctcgctatccgttcggcttcggtctgagttatacaaagttcgaatactcggatttgcgggagaacaaggaggaagtgcgtttcctcgtaaaaaatacgggcgaggcggcgggcgcggagatcgttcaggtatacgtcggcaagcaggattcggaggcgatccgtccccgaaaggaactgaaaggctttgccaaaatctatctgcaagcgggggaaagcacggaagtgtgcgtgaaattcgcacccgacgatttcgttatcttcgacgaaaaggggaatcccgtgaccgagcagggggaatatcaggtgtacgtgggggcgtccgtttcggacattcggcttacgggcaagattttcgtggagggagaaacgctcggcaaaaacaaggaaacgctctccgagtatctgcaagcgaaatccaacatcctcgcgggcggctatacgatgaaaaagcgcggcgtgcgcggcagccgcaacgcgagaaaattcgctttgatttcttcgatcgccgctgttgcgtacgaccttttgttttggatttatctgcaagtggtgccttggaatatcacgcctttcgagggacaggatcccatcgcagactgcggcttgattctcctgtttcccgtaaacgcagtcatgatcgcctctctcgtcgtccttttggtcgactattggaagaagaaaaaacagcgcctcgcgacgcctgccgaaacagaggaaacagaggaggaaacgttagaagaaacagaatacgaaaaactgtttacggaagaatttgaaaatcaacccgaagaagaggcgcttcccgtcgaaaaggaagaagaagcgcactgttttgacggaaaaacgacgatgaagcaggtgtgcgaggaattttcggcgttcgcgggcgagagggggatcgcggtggaattcccgtcggcgcgcgcggtgttctcggcgatgtccgcttcccgtctaatactgttaaaaagcaacgaatcctcgctgctgcccgcgttcgtatcccttctcggggaatatttcggcgcccaagcgttccgggcggaggcggcagaatatacgagcgcggacgacgcgcttatttgcctgggcgaaaacggaacgtataacgaaactcccgtcgcaaaggcgctcaaagccgcggccgactcggattttcgcatacatatcgcgtatctgaacggcgcggatctgtcttcggcggacgcttggctggcgccgttcgcgcgctatgcctcccatcccgaaaaggcgggctgcgtcgcgttgaaagaaaagcgcctttccgacaagtcctatccgctttctcccaatctttggtttttcgtggagataaaggaggaatactcggtcgaggaactccctccctttgtcggggaaacggcttttgccgtcgaagtacgtttgtctaaaatagaagaaaaggaagaaaaaacgccctttcaggcgccgagatattcccgttttatcagacttggcgaggagagcgaaaacaatttcatgttgagcgaggaaaagtggaagaaggtggataaactggaagactacgtaacgggcgtcacggagggaaaattccgcatcggcaataaggcatggcggaacatggaaaaattcgtcggcgcgtttctcgcgtgcgggggcgaggaaacggacgcgctggacagcgtcacggcttccaaattgctgcctttcgcccttccccttctgtctgaaaagccgaacggaaaaatcgaatttctccgcg

SEQ ID NO: 4264 - DNA, 6342 bp, Unknown
  16S sequences of unknown bacteria
gcttgcttataatatcaaacctttccctctttgtcaacccctttttcccttttttagcatatcccattttactttctcttagacacttttcatactacatgatataatggtaaaataagtaatacccccctatatataggagttgatttggatgattttacatacgcttacagccacatttggctgtttgaacaatagcacgctggagctgcaggaaggtctgaatctgattcaagcccccaacgaatccggcaaatccacttggctggcgtttctccgttccatgctctatggcctgcccacccgtgagcggggcgctttggccgataaaaaccgttatattccctggaacggcgctgccatgagcggccgtatggaattgactgacggagcccaggagctggtattggtccgcgacacggtacacggcggcacgcccatggggcggttttacgccgcatacgccggcaccgccacacaggtagagggcatgaccggccagaatgccggcgagcggctgaccggtgtgccccgcgccgtgtttgagcgcagcgcgtttatccggcagaacgccctgtccattgatcaggatgccgaattggaaaagcgcatcgccgcgctgatttcctccggcgacgaaacgacctcttatttggaaacagaaaagcgcctgcgtactgcactgaaccggcgccggcacaaccagaccgggctgctgccccgcacagaagcagaaatcgcagcgctgcggcaatctctgacacagttgcacacgctgcagcaggagagcgatcaggcccgtctgcaagcccgctgcgccggtgaggcagccgaaatggccgcccagaaactggcactgcacgaccgcatggacgaaatcgaggccaaacgtgcgttctttgccgccaaagcagaactgacccaaaccgagaaagaggccgcagcccagaaagctcaattggaagccgatcacatccctcccccccagcagctgatgcgcatcaaattcaacgccgccaacctgcttaccactcaggtgtccatgaaccatgtacagtcccaggctgaagaggccaaaaagcagaccgccatcgcccgggacgcagtggacgcagccccttttactgcgacaccggaagaagctgccgcgcaggtgcgcgccgtgtcagaacactaccgcgccctgcaaaagcacaccgctccttccctgcctctgatcgctgttcttaccgccgcggcagcagcggctctggctggcgccgcatatgggctgggacagccctattggatcaccctggccgctgccgctcttccaatcctctgtgggttcctccgcaccagaaaccggcggcgcgcccaggaactggccgacgcgctgcttgctccctatggcgtacaggcgccggaggatcttgagccgcttttgacggattacaatactatatataatgtatgggtgcaccggcaggaaaacgaagcgcagatcaacgcttcctggcaaaccttttatcaaacctacaaaaagctttccgccgagattttagaagaaaccagttctttctgccccgatcttgaaaacgtccaccaggtgtctccgcttctggaggccgggctgcgtcggtggcgtcagctgcaaacactggaaacccgggccgggcagctccgggaacgctgcagcgctttgcgcagccggttgccggacgaggctccgctgagcgcagcggaagaagcccttcagcgccccaccgaaagccgcgctgacttggaagcctttttggcgcaaagccgtgaccagcagcaggaagcacgcagccgctgcgaccgctgcgaaggcgaaatggccgccattggggatcgcctggaagttgccgcgcaactggaatcactggaagccgcccgcagccaggcacaggaagaatatgatgctctggccttggccctggaggagcttgaccgggccaataccgacctgcagacccgtttttcgcctgtattgggccgccgggccggcgagatcttccacacccttaccggcggacgctatcagcatgtactcctggaccgcacactgcaccctgcagcggaagatacaaccgccattccccgcagtgccgccctgctgagccagggtgccgccgaccagctttatctggccctgcgtctggccatttccgagctggtgctgcccgccgacaaacaggtccccttcattctggacgataccctgaccaatttcgacgaggcgcgctgcgccgcagcattggactttctgtgcgccgaagccgcgcggcgccagattctgctcttcacctgtcaaagccgcgaagctgtctatttacaaaatcgaaaaaatgtgcatataataacattgcgcgaaacaggctggcgctgaatggaaacgggccactctgcgccggccaggatgaagtgacgccgccccctttggcggcgtaaggaggttttttactatgagcgaatgcaatcacgactgcggcagctgcggcgaaagctgctccgagcgtacccctggcagcatgctggccaagctgcacgaaggcagcaccgtaaagaaagtgatcggcgtggtgtccggcaagggcggcgtgggcaaatccatggtcacgtcccagctggccgtcaccatgcaacgccgcggataccgcaccgccgtactggacgccgatatcaccggcccctccattcccaaggcctttggcttgacggaaaaggccggcggcacggaaagcgccttgttccccgtggaaacgaaaaccggaatccaggtcatgtccatcaatctgctgctggaaaacgacacggatccggtgctctggcgcggtcctatcatcggcagcgtcgtcacccagttctggaccgatgttctgtgggacaacgtggactacatgttcgtggacatgccccccggcaccggcgacgtggccctgagcaccttccagtccctgccggtggacggcatcgtcatcgttgcctcgccccaggagctggtgggcatggtagtggaaaaggccgtgcgtatggcagaaatgatggatgtacccattctcggcatcgtggaaaacatgagctatattgtctgccccgactgcggcaaaaagattgccctgttcggcgagagccgcagtgaggaagccgccgcccgccacgggctggacctgctggcagaaatgcccatcgatcccaagctcgcttccctggtagacgccggcaaaattgaggactttgagggcgactggatgtccggcgtggccgacgctgtggaaaagctgcccaataaagtttttgagcagtaaactgcacaaaaaagctgtgtgttcccacgacgggagcacacagcttttttaatggcagttttcgcgatagctgctccatgcagccacaaccgcacatgcgccgccgatgacgatgcacaaaagcgccggcgcaccctgcgcccaacgcagggccgatggatacccaatgctcgcaacatccgttgtcgccagcgaggacaggaacgcctccatctctgcctgggacgaaaacacatgttgcctctggtcggtcaatacaacgacatagtgcgagatatccgccggggacagcaatagcaaagcgcagcagagcacaagggacaccgcgcaaaaaacaggcacagcccatcccaacttcccaggccgccgacaaatcgccttctgcagtttcaccgcaagccagatgagaagcagcgccagcagaagcagcgcaaaaataaattcgaccgtctcgttcatagaaaattatcgcacagccaatcgttcgcacatattcgtatagatgcttctttgtatattagttcttatcgcagccgaatgcaatcgatccttccttggtacttccattcttgtaactatttacaattcacatctcttccctttgtacgctctccccataaaatttgcccgcactccggaaaagagggcgggtgttgttctttatgcagatcctcctctctgccgccgcggcagcttctgacaaaacaacccgtgacggttgcaataccagtacagcattccgccgcctctggcggcaaagcgagcctgagcgccgccctcgggataaagcttgaccagttcaaaacggtctgacccggcgcaggcaaaaaaggaaataaaatgctcctttgtcatgggatgctccagcgtgacataaaattcatcctccaccagctcgcagtgcagagcgtgcgcatcatccgcctcttccgcctccagcggcggcagctcaacgccgcagcaggaaagatgcgccgcccccgcagcatggatcacattgccgcacaccgggcaaacatacaacacagtgcgcagcagatttcccgcccggttggcgttgatcacctcttcaccggagagcagttccggtacggaaacctgcagcgcccgggccagtggctccaatagcgtgatgtccggcaggccccgggctgtctcccatttggaaactgttttatcactgacagacagcgcagcagccaactgagcctgcgtcagctttcgtttctcccgcagccggcggatggcgctccccgtaacataatgattcggcattttcgcgtgcctcctttcccattcagcatagcatccgcccgcgctttacgcaacctgcgcagcgtagagtacggcccgggccatcggacccgggccgttttttccgtcttttcagaacgtcctgcgcatctggtgccacacgacaccaccgtggacagactgggataccccctcatccgcaaaaccaaacttcgcataatagggcaccagtttttccttacaggtgagcaccacgccacgccgtccctgttcctgcgccgccgcgcacagcgcctcaatcagccgcccggcacagccccggtgccgatactccggcaaagtgttcagtccgaagatcatctgccaggctccctgcgcatcgtgcagcgatgcatcggcatacatttcatcccgcagatcctgttcatctgtggtcatcccgtcgataaaagccaccggacgcgcgccgtcccacagcacataaaaatggttcgcatacactttgagccgcgcggcgatctcttccgccgcagccgcctccgccgcgggaaagcaggctgcctcaatctccgccagagccgccgcatccgatgcgcgcccccttcgaagctccatctcaaaaccgcttcctttcctttgttctgcggtcttcagtatagcgcggcagcagcagccgtgcaagcaaaaccttccgcctccgtccgcacaggacaaaaaggggcgcgacgcgcccctttttgtccaatccgctttctgctcatgccagtatggctccaaccaccagaaacaccagtgtcatcacgaaaaaaatcgccagaagcttccagatataccgcagccaccgatcatagggtatgcggccgaacaccagcgcgcccatgaccaccgccgaagtgggcgtgaccagattgaccagcccagaagccgactgaaaggccgtaattaccagttcgctgttgactccggcaaactgccccaacggcgccataatggggatggacagcgtcgccaagcccgaagaggaaggaattaaaatcgacagcggaagatagagcagatacgtcagcacaatgaacagcacgctgcctgtccccgtcagcagacgctctccccaggagagtactgtgtcggtaatcagtccctggttcatcagcgtggtgataccccggctcagaccgataataaatgcaacactcaacagatctgccgcacccagcgtaaagcgctccgccactttggcctcgcccatgccgtacaccagtccaatcagcagcccgccggccagaaacagcgcgcccagttccgggaaccaccatcctagcgttggcagcgccgtaatacccacgtcttcaaaggggatcacactgtaaaccataatgaggaacaccgccgcgaacagcgccagcaccagcttctgccgccccgtcagcggttcggcttcgtccatgttgggaatttcctgcgccggccagcggttatgcgccatcacagatttttccgggtcggctttgattctggccgcatagcgcatgacaaagaaaatcgccaccgcctcgtaggcgatcagcattaccacacgcagcacaaggccctgccccagggatacccctgcaaagcccgaagcgatacccgtggcaaaggggttcaccgtggaacacagcacacccgcgcccgcacccaaaagcaccaccgaaatgctaaccgccgcgtcatagcccgccgccagaaacaccggcagcaaaatgggataaaacgccattgtctcttcccacatgcc

SEQ ID NO: 4265 - DNA, 8799 bp, Unknown
  16S sequences of unknown bacteria
ggtcacggcggcgcagaaaatcccggcactcgctggcgacccagttggtgggatggtacttttcttcgtaaatccacggacgaaccacccaactgttgcagtccaagccagtatctacggggtctgcatccacaccaagctgctgcttgagccaccaataataatcatcggccacacgctggtcttcataactgggcgtactggggcggcggtaggcatggagatagccatcatgcagccgtacatcgttgaatcccaaattattgcgcagcgggtgaacgtgcattttaccgacgcactgcgtataatagcccgccttgctcagttccccagccagcgtgtgggtatagttccacggcactaaatcctcatacccgacgcgaccagtgtgttcctgtgacatacctgtgtaaagagaggcacgtgcgggaacacaggtcggacaggcagaataggcgttttcatagcgcacaccctcggcggccagtgcatcgagaaacggtgtttttacatccgggtgtccggcaataccaaggcaatcgccgcgcatctggtctgccataagcaggataatattaggatgtttatccataacaaacctcatatcaatgtttttgcagtcaaaggcgtgccgcacagtacggcacgcctttttcctgctttacagattataccatttgatctcgtttgcgtccatgtgcagggtaaagctgcttccatcgccggtgtagacggtggtgtcctgcggctcataggtgttgtttaccacacaatatttgccgttcttaacgtaggcgtgcacctcgacattgtagttcgtgctgaaccatttgtgcaggtcggcttcatcgtgggcagcccacaggatggcgcggtacagcacgcggttgttcacaaagctgtacggcagaccgctgatatacacaccgcgccccttgccgtactcatgcacagccatctggatttccttgtcacgctgaatgagaatttctgtgccttcccatgcaaagatgctctttttgccctcgccaaagtccacatcatggtcggggcagtcggccagaataaagtggtcgcggtgttcatcccagttgtacttgtcgtaatttagggtgaagcctgtttccttctccacgccgagcggcgcggacagctgcaaataccggccctgatactggtgaccgcccggttcgccgacaccgatcaggccgccgccgcgatggacaaagcccttgacggcagcggaaatatcaggatcctcccagaccttgccgccggtgtgggcggtgtcgccgtcaccgacgttgataaggacgtcaatgctgtccagcaccttcgggtcagccttgatgtcgtcaaagctgataaacttcacgtcaaacggcgcaccggacaacgcttcgataacgcccgcatagctgtaattctgcttctggtacagcgcatggtggaccatgtggcagccccacgcacgctgctgcccccaactgttcagcacagccacggtcttgacgcagtagggcgtcgtgcccttgatattctcatacagctcgcggaactcgttgcagacgctctcgacgtagtcgagaaactccgggaactcgcaggccagcttaaggtagccgccatagccgatgcggtcaatgggcttacgcagaatggcgcggcgtgccgtgacccagttctccttggcctcgcgcacagggtcgccgccctcgtggaaagtatcggggaagaagtagggcaggaaacggccctcggtgtacttgacgccgggaatgtcggagatcaggcgcagcgtgctgccgttgccgacgctgccgacgatggcatcgacgccggatttctgaaattccggcatgaacggctcacagccaatccaatggtcgcccaagaacatcatggcttccttgccgtattcgtggacgatgtcggtcatttctttcatcagaccggccacctcacggcgctggaatgcctgaaagtccttgtactccttgctgggtacgcggtactggttattgtagtagccttggtcgatgatgaactccgggcggaacttgtagccgacttctttctcgaactgctccaaaatgtaggggcagacggaagcagagtagccgtaccagtcaacgtacttttcacggcgcaattcatcaaagacgagcgtgaacaggtggaaaaacgtcgtgaaacgaacaacatttacataaggatggctttcgaggtactcccgcagacggcgcatcgtgtaggcgtgggtcttgggctggcgcacgtcgaacgggatctggtgttcgacatccttccagtcgttgatgacggagttgtacatgtgcacggggtcccaaattaggtacgccaaaaagctgaccgtgtactcgtggtaggcggcggaggcgttgataacgacgctctcggttgctgcgtcataatgccacgcggcggcatccagcggttcgcccgttgtgcggtcgatgacctcccaccagcgggcaatatcgtcgtggtcgttgaccttcatcagctcgcggctgatgcccgtcatcagggggatggtcagcgcaccgccttcagcggtgtagaacggcgtcataatgtagcactgctgggtttcgtcggggttggcctttgcccacgcgttgtccttacgggtagtgtaataggtggcgtaaatctttgcgccggtgtcctttagctcctgcgggaactcagtgccatcgcagtcgcggatggcatccgcgccccagcgcttgagcaggtcgagggtttcagggacggcgtccatatcggtggggatcgttacacggcccatttttcttacatcattcatataaggattctccttgaaacgtaatattttgaatggaggaaagttaaatcagcccttaacgccgccactggtagcaccgacaataatcttttcagacaggaaaagatacagcaggaaagtaggcaggaacacaatgataactgcagcaaacatagcaccgtactggccggaatatttcattgcgttgacaatctgcaacaaaccgacaccaacaggggtcatagaatcgctggtagtgaaaatcaacgccatgaagaactcgttccacacagacatgaagttgaaaatcgtaaccgtaataatggcgggctgaaccagcggcagcataatctgccagaatgtccgagaatggctgcatccgtcaatgtaggctgcctcctcataagaccgggacagcgaggagaagaaatccaacagataaatcgtggtgtatggtacgcgcagcataatgtacagcacaaccaacagcacgcgacccttgatgccccactgcacagccaaagagtacagcggcatgatgatcataatggtgggaacactcatggcaatgaccaagccgatacggatggccttaccgccgacaaacttccagcgagaaagcacataagcaccgggcgcggaaataagcaatacgcccacacaggaaacaatggcataaaccaagctgttgaagaaatacagcgatacattttgggtgttccaagctgtgacgtagttatcccacttcagaccattggaaaagtccataacacggcccgtcagaatttcctttgttgaggaaaggctggcgcagacgatccagaacaggatggcagccgtaagcgcgacccacgcgcaaacaatgatataaccgggcagaagccgaagctctttcttccagttgattctatcgtgatattttcccataactgctctcctaccttaatactccagatccgagtctttcaagatcaggttggtgataacgtacacagcaatgataatcaaagtcagcacaacgccaaccgctgcgcctgcaccagcatcgcgctcgacaacgcccttgcctccaaacaccgtatcgtacaggtacacaacgggcacaatagtggccgtttccgtgttgatgggggagaacatcttcgtccacaggaagaatgtggtagcattgatgctccagaaagtaacacaggtgcggatgacgcctttcagcaggggcagcgtaatctggaaaaagcggtcaaagatattcgcgccgtcgatggtggcagcttcgtacaagtcctgcgggataccttcgataccgctgatgaaaatcagcatatagtaaccaacgctgccaaagatgaaagcaatcatcatagcccagaaaatcaggtctgtacccagccagcggacattctcgccgccgaatgctttgacaatctggttcagcagaccataatcatagttgaacacatactgaatccacatggtggccagtgctacggcgctgatgatattgggcatataaatggcggccttgaagaattttgcgccgcggatgccgctggtcaaaattacggccatcaacatggacaggcacatcgtaatgatgccgcctaccagccaaatcatcaccatgtttttcatggaactgataaaaccggcattgcgcaggattttgaaatagttttgcagcccatagaagctccatgtgcttgtagttgccgtaaggctctctaccttaaagaaactcatgataactgtccgaacgaccggatagacatacatgaacaacaggcaaagaacggtgggcagaatgaataggaaaatcattgtcttgttctttttcatactggtaatacctcaaaaatgaaatgtcataagcaaaggcggcacccattcaggtgccgcctccgttcagattgagggaatcctgaataaatccattacagccgcaccgcttgacggcgtaccgtgatttattataggattagccgcacagggtatccaagtaagcgcagtagtcagcgccggttgcgtacttgccttcgaacagctcgatcatggagctcttgatggaggaccagccgtccagcgtgttcagagagccacaccagctcatcggagtggtggtgttcttcagcgtctcaacagagcctgccaggacagactctttcaggcgggtgtcagcggggatctgaccgccgttgtcaaccagctcctgaccgcaggtgccggtaacgatggtcataatgaagtcaaatgcggcctgcgggttctcgcagttagaggagatagccagagagttagcaccggcataagcagaagcatccacattgccctcgacttcggggtagttgaagaagccccagttcacaggctcgccaacagcagcgtcaacctcagaggtaacgtagtttgcgcagacgaccatagcagccgtgccaagaccgaccttggtctggctggcggggtaggcatcgggtgcgccctcggccagataaccggcattcacgaaatcaatgatttcctgtgcagccgtcacagcagcctcgttgtcagcccagccgccgttcttgcccagctcggcaatagcgtcctcgcccagatgacgaaccagatgattgtagaagttgaagtttgcgtaagcaccgtccagcgccagcggctcatagccgttgtccttaatggtctggcagacggtcaggaactcgtcccaagtcttaggggtctcggtgatgccgcaggcatcgaaaacatccttgttgtagaagataccgccgatctggggctgctctacgatggagttcagatagccggcccactctttggactgatcattgaagcaagcatagctgaagtcatcataaccgacagcgtttgccatctctgtcaggtcgtaggtgtagggggcgtaagcgtgaccgatacggttgtagtcatcctcaaagatgtccagcttttcgccggattccagagcggcagaaatcagggtgttgacatcgcggcctttccactcgatgttgacgtgtgcgccggtttcagcttcgaaagcgtcagcggcggcctgaattgcatttgcctgaacctcaccggcagaccacatggaccacatggtcaactcaacgccctcatacttcttgccatcagtagccgtagactcggcagccgtggattcagcaggagcagtagaggtagcttccgaactttgagcgctgccaccacaagcagccagagatgctgccatagcagaagccatcaaaagtgcaacgatcttcttcatttgtgttttcctcctaagtgtaaattctgtgtcgggattacttccctttcgcggtgacttaagtttagtgcttttccagttttttagcaattattatcttgcccacctattttacaatcttgctgtttcgctgcttttcggcatatcgctggttttttgtaggtaatcgttgtgcatttttaccatttgcttttttcatcaaatgttagttgttgacaaaaacgccgaataccgtcttgcatttttcagcctcgtgcaatataatgacaatatactacaaaataggaagtgtgacccccatgagccatattaactactcctttaatcagactgatgattccctgccccgcgataagatgaaattacgcaatattgcttccacaaggtatagcggggattggccctccattccacattctcacagctatgctgaattattttatattgtagatggtgcggggcaatttcaaatcaacgataaattattccctgttcaggcacaccagcttgttgttgtaaaccccaatgttatccatacagaggtcagcttggaatcccacccgctggaatacattgtgctgggtatcgaggggttagaatttacgatttccgatgccgccgagggcagcttttgcgtttatacgtttgacggaaacaacgatgtactgccctgcatgagaaagatccttacggaaatgcagaatcgggaatccaattttcagatactttgtcaggcttatatggatattatcgtggtacagcttatgcgaaatgccagtgtatccgctgttccaattcattctcggctgcctgctaaccgccagtgtgcaactgtaaagcgctatatcgaccaccattataaagaaaatcttacgctggatgagcttgctgaaaaggttagtatcagcaaatatcacatggcacacgcttttaagcgcgaatatggtgtctctcctatcaactatatcattgactgccgcatccgggagggaaagcggctattggccgaaaccgaccttgcaccatcccagattgccagcattctcggcttttcttcgtccagctacttttgcaagacatttagcaacatagagggaacatccccgacagaatatcgtaaagcaaaccaagtgaaattttgatgtccacttcctataagcgaaacgatctcacaaactaaaagtcggcatataatagcacactttggcgatttttgtcaaatgattccgtcatggatagcgtgattcaatatcattctcaacaagagcctgccgcacttcgtatgtattggctgtgtcagcagcaaatatttctgctgctgttcggcacgaaagtacaactcaaaattgccaaaataaatagcagcccgcgcaatgatatgccccctatatagcgaacagtgaaataaagcactgaaagctatatagggggcatatcatgctaaaggcttcttttcgcttattctgcggtgtgaaacgctctgcatgaactcctatacgcaggaagcaagtcgagatacggctgccaacgtctgcgaatctccgcaatctcgtcatcatctgcatcaggataaaagtgttctctcttagcttcttgaaaaacatccgttgcaacttcgttgaatagttcggcacacaattcatccgcagaagtaatgatttgatcctcctcgatggtgttttttgttgggtcgatatgcagcagcagataccccagcttttcagaccagacaaaatccaagaatttacttgcgtgaatataatccttgaaaacgccgtacacgcgctcaatttctttcctttcggcttcactgtaaatcaatgccgttttcctcctcattttcttgtgcttcgcggagaatttcatcgcagagataagcatagtccggcagtttttcgattacaggcttccaagcggcccgcacttgtgcagcttcgtccttatccatagtagaaaagttgtgattgcgctttgtctgcatcagcacggtgatggccatatcatccagcagtcggtggcaaagctgtgtcgcggtatgtaaatcatcgcagctttcagattcgtgggttttctcattgatggtaagaaatacatagccaaccttatcagaccagaggaggtcaacactgccctcgctttccaaataatcggcaaaagcgctttcaacgcgccgcatttcaagcgttcttttcattttgaatgacatagagaagttcctttcaggcaatttttatctttatgctgggggtcactgtctctattatacacacttgcttatcctataatctggactacaactatattttcaacattttgcaagaaaatgtttattcttattgtggagtaactgcatccagtgggttcacgcgcacaccattctgcatcacctcaaaatgcagatggaaacctgtgctgtcgccggtgttgccaacatagccaatgacttgccccgccgtgacggtttcgcccgctgaaacagcagcggcagtcatgtgggcataccgcgtagacaggcccgcgccgttatccaacagaacttggttgccatagctattgttccagccggaaatgatgaccgtaccgccgtgagcagccaagataggcgtaccctccggcgcgggaatatccgtaccgcgatgcccggaattaccgtaagcgtcgtcatcaccaaaattgcaggaaatataggtgtggccgggcagcggccagcataactcgc

SEQ ID NO: 4266 - DNA, 8098 bp, Unknown
  16S sequences of unknown bacteria
ttggggaatgcctcggctttctcttaggaggcaaatgctctatccagctgagctatgccgacatacgatttttggcttactttgctgacgctcagtgacgcagcagtcgccaaaatccggtaaaaactctttggcactgtttgattcgctacaaagctgtccgcagactgccaatgcaacgaatctattctactatattttatgccaaaacacaagtaaaatactaattgaaattaatcctgccctgtaaccagatagatcccttaaagcggcgtccctcttccggaacccccatcagatccttttcattaatacaaatatcgaaatacatgtcattacactcgatgttcatctgataaatattctcatcggtcagttcattacgaaccttatgacaggtaacgatatttcccataatctgatactgatcacactccataccatatggcataaagaacgtatctacgatcgaaaacacgtcctctctgtagatccgccgtgagaccatcgaatacagatccatatcctcgatcgtcagattctcgatcgcatcctgatcaccgttcttcgcagcattcatcagctgataatgtctggcctgagacttcttctgcgcattttccagcacttcattgcgacgaattgggaacaggatcgttccccctgtcgaaagtcccgtaaatgtcgtgctgacggcctgtcccagtacctgattcaatatctgctctttctgatactgtacggcattctgtacgtagaaaatcagagatacacctactctaccgtcatcacaaacgcccgcaaaagaatcaccgccgacccgcttttccactgctacctctgcagaagtcgtgattccgctccccttataatatgggaaataatactgacggtgaaatccatccttatcgatcgcaccgcacagcataatccccatatccggagcataatccttttccaattcaatgaatgcggtatcctcatcccggatcgcatcccgatgttcaaaattatgatatacatccgccagaagtttttccacctctgactcttttttcagttgactgaaaccgattgctctcaagtaagaatgcatcctattctcccctctttgagaaagccagtcactatctgattacttcctgtccgcccatgtacggtctgagtgcttccggaatgcgtacgcttccgtcctcattcaggttattttcaaggaatgcaatcagcattctcggcggtgcaacaaccgtattatttaacgtatgcgcaagatacttcttaccatccttaccatttacacggattttcagacgtcttgcctgtgcatctccaaggttcgaacagcttcccacctcaaaatacttcttctggcgcggtgaccacgcctctacatccagagattttaccttcaaatctgcaaggtcgccggagcagcactccaaagtacgtaccgggatatcaagcgtgcggaagaagtccaccgtgttctgccaaagcttatcaaaccacatcatgctgtcctcaggcttgcagacaacgatcatctcctgtttctcaaactggtgaatacggtatacaccgcgctcctcaataccatgcgcgcctttttccttacggaagcacggagaataactcgtcaatgtatacggaagcttctcctccggtaaaatctggtcaataaattttccaatcatggaatgctcactggtaccgatcagataaagatcctcgccctcgatcttgtacatcatcgcatccatctctgcaaagctcataactccggtcacgacattgctgcggatcatataaggcggaatgcaataggtaaaacctctgccgatcataaaatcacgcgcataagaaagtactgcagaatgcagtcttgcaatattgcccatcagatagtagaagccatttccggctacacgtccggccgcatccatatcaataccattcagcttctccataatttctgtatgatatgggatttcgaaatccggaacgaccggctcaccatatcgctggatttccacgttctcactgtcatcttttccaatcgggactgacgggtcaatgatattcggaatgatcatcattctctttctgatctcttcctcgacaaccttctcacgctcatccaactccgccatacgagcggcattctcggtcacctgcttcttaactgcctctgcctcttccttcttaccctgagccatcagtgcaccaatctgcttggaaattttatttcggtttgcacggagtgcttctacttcctgcttaatatcgcgattttcctgatccagcttcaggacttcgtctacaagtaccagcttttcattctgaaatttattcttaatattctgttttacgatatccgggttctctctcacaaatttaatgtctaacatgttctgcctccagaatttctcttcttattctcttcttattataaaacaaatctataaggaatgcatcctctacaaaagcaataaaggtatccggctgtaagttcacagcatgatacctttaaatatacatcatcttcactttcaagtaaagggatttttactgcatatcactgaaataattgactgcctgacgcagtgcttctttctcttcctgtccaagcaccacataggattccccttttacgatttcttttacatacgtgtagcagccttctcttccgtgaatggcattcaacacaaatcctgaattattttcatccagcatcgccaacgcaaagcttaatctgcctccgacatccggaaatgcatcatacttgacaataccaattttattggccgtgcggctctggatctccttgatccggcgaatctcatccgtgttgattcttgtcagctcgctcaaacggtctacctccgtaaatcgctgtgcaaatgccttttcaagggacacggcatcctttcccttcatgaaaatgcgatagcgcttcatgaagcgcgtcattttcatcgatactctcaccatataaagcaatacgaaaatcatgatccccatcatcacgattacgatgattcccggatcgattccgattgagttcaagatactgctttccattcttcctcctgtttgttttttagcttcgaactgttcttatcccatcatactttctttttcgttataattctcatgaatcatttcttactattacggaactccctttctgtgccaatgcaatgactgctagaaaccgccgcttatctgcgttcactcagagatttcttcggtatacggatgaattgaccgaaacagctccatcagccgttccagctcatcatccgaataataatcgatcacgatcttccctttgtgattggcctttgggctgatcgtcaccttcgtaccgagcagagcctttatcttctcttccatatcctgatagatgaattcatgctccggcttctgcttttctttcttttcgttgctattctgcaattttttcataagcttctcgacttcacgaacactcagcttttcatcaaacacttgcatggcaattttatactgctgatcgccatcctcgattgacagcaatgcccgtgcatgaccggtagaaatcatttcatcaataaccatctgttgtacccgacgatctaacttcagcagacgcacggagttcgtcactgcagtacgactcttggatacacgctctgctacctcatcctgtttcagcttaaactcactgagcagccgcttgtaagccaatgcttcttcgattgggttcaaatcttctctctggatattttcaatcagagatatctccacgatctgctgatcggtaaaatccttgatgacgaccggaacctccttcagtcctgccatctttgctgcacgccaacggcgttcccctgcgatgatctcataatagccgtcccgtttctgtacaagcagtggctgcagcactccaaactgccgaattgaatcagccagctccagcaatgcatcctcgtcaaattttttccttggctgctcacggttcggctctacctcactgatacgaagctttacttcttctttttttacaactgtctttacgattgtttccttttccggttttaccgctgccgaagttgtctgcgtcttttgctccggtcgtgttttcggtgcgataagggaatccagtcccttgccaagtcctgatttttttactgccattcttcttctcccctatgtattacctcttctgccagcaggcgataactttctgcgcctgtcgaccgcttgtcatattttgtgattggcattccatagctcggtgcctctgccagccttacatttctcggaataatacttttatagactttctgattcagattattctttacactctcgaccacctgcaaagaaaggtttgttctggcatcatacattgtaaataccactccctccatctccagattcggattcaagcgttcttttacgaggtcgatcgtgtgcatcagttggctcaatccttccagtgcataatattcacactgaattggaaccaatacggtatctcccgcacacatcgaattaatcgtcagaagattcagtgacggcggacaatcaataatgataaaatcatactgatcctttacttcatccagtgtgtttttcaaaagatattctttattctccgcgctgatcaactcgatctccgcacctgccagatttatattagccggtaatatcgaaagattttcaaaaatttccttctgcatacactcctggatcgtacattctcccagaagcagctcatatacggtattctccacctcatctttctcaacgcccaggccactggtcgtattgccctgcggatccatatcaatcacgagtaccttttgtccttgctctgccagtgccgcagacaaattaatcgaagtggtcgtttttcctactccacccttctgatttgctatcacaattgttctgcccatttcttttatcatactcccttcaaaagaaagcgaatattcatccgctaaaatgtttcacgtgaaacatgccatgatgttgggggcaaaaggtattttgcccctccctatgatacacggatttcttcagctcatccttgcagttcatccagatcacttgtgaggctgtcgacatgattctgtctccagtggctccctgccattcatccaactcttttttcaaaatattgttgacaagatcaatccttcgaatatatacaaaacagatcgcaaagcgactgcgttcatgaacaagtagcgaagctaggccctgccagcagagctgcagggatggattgtgaatgtccgctttacacgaggaaatgcttatctgagttgcaaataatatgtttcacgtgaaacattcccgttttatgtgcgtttgcctgtttttgtttccatcatagtaaaaacgcatcaaggcaactggtattataacatatctcagcgtttatcgcactagtattcattatttttttgatattatcttcacaagatgccaggggcaaaaggtattttgcccctatgatacacggattgcttcgcatttcatgcttttgcaatcctaaagcacctcaaatccgctcatttttctacgaaaaatggatgcttttcggtgttttgcggatcaataagtcatgctttttcatgcaagcatgaaacgcatgaccttttggcccttgtatcttcacaagtcatgacacacacatcctgctgataacaacggcgtcaaacttgtaacgctgcaaacaacgggtattcaggacctgccggcaaagcagcagggatgccttgaaactgtcacagtccgacatcaagacagcaggaataaaatatccctgaagtatgatttctgcacgttgttcgtgggaataaattcctgccatctacgtattgttacgcagctgaaataaacgacaaaaaaatacgcataactgcgcaaatctgagtcaccggcattatccaccactattcggtctgaattctaaatcgtctggtaacacgtaacttcagtcatgtaagaaattcccaggaagtaaaaacgcttttatttgtaaaacagacattcgcaattcgcttcgcgacctgccagtggaaggtttcaactctcactaacagaagcagcccccttgcccaccgcttagtgctccgcgcactcgaagcgaagaaatgcttatctacagtcaaaataacatcaattttaacatatttcgatcgtaattcataatgtttcacgtgaaaccctgctcaatgataccagagagaaaaatcccggggttatctgttcttgcacacagtggttaaagccttaggatccgccctgataatatgagcataaaagcaaaacatagatttcacaatatgcaaatagtgagtgagattgcatacatacgatatgcagaacaatccgtatgcatcatctccaggaactgttgccgcagcagcgttaaaggatccaactaaaaaatgtatatttatgcataagcatgatcaggctgccttttgcagcttcttagagattcaagattgctaaattgatttgttgttcatcgccaacagcggttgaaatcatctcacttagatatcatctcaaagtgcatactgttcttattttatgttttaattctaatattatcgatttatctattttcatcgatgtttattcttgttttttgtcattttattgattttctattgttttactgtttgggtgcatccctctgctgcctatttccagtccttcgaacctttcatgactgaatccatatatttccactcattgcaacacgctctcatcaagtcaatcggatattcgcaatccatccctgcagctctgctgacagggcctagcttcgctacttgttcatgagtgcagtcacttctcgccctgccagcgggagctttcaactgccactgacataagcatccacccattgcttagtgttctgcacgtttaaggcgggagaatgcttatctgtggtcaaataatcattgtaatacgaatattattttctgatgaccattggaactatgatttataagactttttgcacaatgtttcacgtgaaacatagcccttttcgtattctattgttttcgacactcccttagctaaagcagaggttgtaaagcggacattcgcaatccatccctgcagctctgctgacagggcagcttcgttacttgctcatgaaccgcagtcgcttcgcttatgtcagtgggaactttcaactctcactgacataagcatctcacccgtcgtttagtgcttcgcacgcttgaagctggataatgcttatctgcgtttaaaattaacatttagactgcaattttttcgtacggagtatgctcaatagttacattagttacattgttattttttccctttttcatcgactgacgtactttggcaaacccaattgcctttctatgtcgttttttcatacttcttccgtccttcatatatccggtcctatcgatttgctattttattctaattttagagcatttttctgcgtttcattatcctttaaaatcatctgtcaatttatcttttttctaccatttcatttatcttttcatctatctctttcagcaagaacattccatatttcccgtgcatagcagaaagcccggcgtaggaaagcatccttttccccgccgcttaatgttccccgcacacttaaatcagagaaatgtttattctgcagtaaaacagatatttgcaatccgtttcgtggcctgcggtaaagcggacattcgcaatccatccctgcagctctgctggcagggcctagcttcgctacttgctcatgaacgcagtcgcttcgcgatctgtcagtgggagctttcaactcccactgacagaagcatccctctcactcgccgcttagtgctccgcgcacttgaagcaggagaatgcttatctgcattcaaaaaagggccagtctctcacgactgaccctcatttagttcgacaaacccttaagagctttgattatccacttatttccagtacacgtccttctactccttattttgtctgcttttttctacgctggtcaaagcggatattcgcaatccatccctgcagctctgctgacagggcctagctt

SEQ ID NO: 4267 - DNA, 14825 bp, Unknown
  16S sequences of unknown bacteria
atagtcaagctgttgctgaacggtgcaggtttgttcttttattaaaatccccgaggaaaaagtgaagaaccaatttttgaaatatacgagcgaataggctataatgataaagttcgagaaaaaaatgagcagagagaagattgcattatgaatgaaagaaatattgttattgtaaatgggaatttgtgtgatgcgtcagagtacgatgccctgattaattcccaggaagcgtatgcgtacgaagtgattcgggtcattgagggaaaaccgcttttcctggaggatcacctggagaggctgaagaataccctggcgggaatcgggatgcaatgtgattttacggcggagtcgcttcgggcggatttcgggcgcctttgcacggcgaacggtgtttcgtcggataacgtgaaaatcatcatttgggaggacacggtgtgcatgatgttcaccggggccacctatcccagcgaagagatgtatcgtgacggcgtgggcgtaggggttctggcggcggttcgagagaatccccaggtgaagattagcaacttccggcttcgggagttcgccaatcgaatgattgcggaaaacggttttttcgaggtgatgctggccaaccgaaaggattgcatcacggagggcagccggtccaatatgttcttcattaaggatggcgttgtagtgaccagtccggccgagggcgttcttctgggaattactcgtaaaagaatcatttcggtgtgcgaggagaaccgggtgcccatcgaatatcgggagattccgcgaaaagaactgggggattttgatgcggcgtttatcagcggaacgtcgccgaatgtactgccgattcgctttgtgaaggatggcaatcggatgttggagtacgatgtaaatgaccggacgctgagacgcgtgatgaaactgttcgattcggagattgccgggtaccttgaagagaatggttaagatacaaaaaattaatctaagcacacatttatattgaaatcgtgaatttgacttcacttttttcggcgattacaataatcgggtacaataattgggaaatttgtatcatctgagaaaggattgaataatatgcctaatttagaattgccaaagtcatttgacgaatttgtggatgcgagaaaagccggcttcattcacgtaaaagattacgtggaaaacggcggacatttagtcggaatcttctgttcctacactccgctggagctgttcgatgcagccggcgtatgtgcgattggtctgtgcggaaccagcaatgagccgattgcggatgcggagaaggtgcttccgaagaatctatgtccgctgatcaaagcaagctacggtttcgcatatacggacaagtgcccgtacacctacttctgcgactttatcgttggcgaaaccacctgcgacggaaaaaagaagatgtttgaactgctcaacgacattaaggaaacctacgtaatgcagcttccgcagggtcagaagagagcgtatgcgaaggatatctggtacgaagaagtgaagcttctgaaagaaaagctggaagaaaagtacggtgtagaaatcacggacgaaaagctgagagaggcggccagaaagagaaatgccctgagaagaacgcagctggagctgtacgcacttcagggaatgaatccgccggcactgaaatccacagaagtgatgtccaccctcgcccagggactctttcacttcggcgtggatgcacagcacgcaacgtacaaggcaagagtggaagcggcaaaagcagcatatgaagcgggagaaagaccggtttccgagaaagctaagagaattctcctgaccggctgtccatccaccggtgttattcaaaaggtaggcgttaccattgagaacaacggcggcgtaatcgtctgtctggacgactgcggcggtgaacgtaccacaaagatgatggtagacgaggatgcggacgatattctgagagcgatttcggaccgttatctggaaatccattgttccgttatgaccaccaatgaaggccgtatcgagaacacaaaggaaatgtgcaagaagtataacgtggacggcgtggtagaactggtacttcaggcgtgccacaccttcaacgtggaagcaacccgtatgcaggagatgtgcgacgaagaaggaattccgtacatgaagctggaaacggattactccacaaccgacagcggtcagattgaaacaagacttgcagcattcctggaaatgttatagactttcaatagcatcacaaagagcaagagttctcttgctcttttctataggagaaaaatatgtatcaagtaggaatagatatcggctccagtgccgccaaggtggctgtaatcaaggatgaagaaatggtaaaaacaatgctgctggacaccgggttcagcagtcgaaaggtggcagacgaaatctatgagtctttggcgtccgagggaattaccaaagacaatgcaaaatacgtggccaccggatacggccgggtttccgttccgtatgcggacaatgtggtaacggaaatcacctgtcacggaaaaggcgcagactacctgttcaaggaaaacggaacggtaatcgatatcggcggacaggacaccaagggaatttctcttaagagagggcgcgtcatgaaatttatcatgaacgacaaatgctccgcgggaaccggcaaatttctggaggttatgaccggtcggctgggattgacattggaagaattgtcggacttggcaagagagggaaatgagatttctatcagctccatgtgcaccgtgtttgcggaatcggaagtaatcagcttgattggaaaggggacgccgagagcggatattgcgtttggcgtaatcgaatccgtcatcaataaggtagtagcgttaattgctcaagtgccggcggataaatacttcctcaccggcggactgtgcgaggatgactatgtgcgggagcgcttggagctggcattaaatgcgccggtaaagagcacaccgctggcaagatatgccggagccattggtgccgcaattctggcagcggaggaataactgattaaaacggaaaaaatgaaaccggcatctgaggaggatgccggttttgcatgagaaaaagcgcaaatttatctttttaaattagcctttttctctgcacaataacaaaaaaataacaaattaactacaggtagaatcctttgataccataggtgcattgacatcataaagaatagcgtgtaaaataaaaatacgaaaatgcatatgcattttctttgcaaaaaggagagggatatgattgattttcattgtcatgttttgatgggcattgatgatggaagccgaaatttggaaacctccgcatctatgctggaggcatcgaaaacgcaaggtgtgcagcagattgtgtgtacaccccattttgatgcggccaaagatcggatggaagaattcctgataaaccgggatcacgcatttcaagtacttcagaaatggatcgatgcgtcggacgcagttgacattcggctatatccggctgcagaggtcttttttttccgccacatgagcgaagtgaaggatctgaagaagctgaccatccggggtacgaacgtgttgcttttggaaatgccctttgatgtctgggaggattcctacataagcgagattgaagacctgtgctgcgaatatcgagtggtgctggttcatttagaacggtatatgaacttcaagaatcgaaagtatattcgaaaggtaattgaaatgacgcatcggctgccgctgtacgttcagattaattgtcgatcggttgcagaaggatcgatgcgaaaaaaactcatcaagatgtttcggaacggagaggctcattttctggggagtgattctcacaacatgactcgccggccgccgaatatggaaagcggtatgaaggcgttggaagacagcctgggaacggcttttgtgaaacagctgaaagcgcagaatcggaagtttcttcaggatgctcgggacgaagggcacgataattaagaaatagaatagaacaaacagatatacaggtatggagtgagtggatgaacgataggaaccgaaaggtaaaattaaacaaaaaatccatggtgatgatcggcgcagcatttttgatagttctggcggtggccgcccttatgtactatatggatcaccggtccaccggtacaagcgagggctccggcaaaaaggtctacaccattgacggtgaggaatgttacaaaaaacagaacatcgagacgtacctgttcctcggtgtggacgctgccggcgacagtaaaaatacgaagcagaaaaagaatcaatccgttcagtgcgattccgtgattcttctggtaatcgatcgggtgaacaaaaactttgccattctgccgttagatcgggacgcgatggtttcgttggagatcccggacgaagatggaaacatactgggtgagaataccatgcagctggcgttagcctatgcctacggagacggcaaagaacagagctgtgagctggccgaggatgcggtttccggactgctgcacgaccagcgcatagatggatacgtgtctttgagcatggacgctatcggcacggtgaaccacctggtgggcggtgtggatgttacggtaacggatgattttgccggagagagcggcctggcaagcggtcagaccgtacacctgtcggatgttcaggcggaaacctttgtgcgcggacgaaagtctgtcggggacggcaccaacgaaaatcgaatgaaccggcagcagacctacatcgaggcgctgtatccggcggtgattgaccatgcaaagcaggacaataactttgtttcaaacgcccgcaaaaagttggacaagtacatggtcacgaatatgacggattcggatttcagcaagattatcgaagcactttcctccgataaaaaaataaacgtatcggatattaagtattcccgtacaatcaacaaggataccggttatgcggaagtggaatacgacgaggggagtctggagagcgtgattaagaaacttttctatgaaccggtggaagagtggccggatgattcggacgaggaataatttcaaaagatacggaaagaaagatattgagagagagcagttacggaaggagtacacagacagatgacagagaaaacgattgcggaatcgtcgagaagggggaatgaggtacgagaagatgaaatcgatcttctgatgttggcatctcatttcctggaacatgcgaaatttatcattgtaagtttatttatcggggcattccttttcggtgccgtatcgatgtttttaattcatccgaagtatgaatccacggcgaagttgtatatcatttctgcttccaagggttctattgtggatctaacagacttgaatgtaggtactactttgacagcggattacgaagaactgattattagtgaaccggtggcggaacaggttattaagaatctgaagctgaaggaaactccggaaaaactattaaagaagatttccatctccaatccgcaggatactcgtgtactgtacattaccgctacaacggaatctccgtccgagagtatgaagctggccaatgaattcatggacgtctccttgaaataccttccggataccatgagcacgaatccgccgaatgtggcacagcgtgcgaagatgccggataagaaatccggaccgagcaacagccggaatacgctgattggcgcgctccttggttttatcctggcatgcggaattctgaccgtacagtatctgaaggatgataccattcactcggcagaggaattcgaaaactacttcggaattatgccgattgcatccattccggaaggaagcggagacctgtttgacaaggaagaagaaggcaaaaggcgagaaaaacgaaagggacggaaacatcgttcgaagaaaaatggaggtgcaagataaatgaaaaatttaaatatagaattaccggcacttccgtacatgatggaagaagcgtttaagaagctgaaaatcaattttcagtttgtgggaaatgatacgaagaaaattctgattaccagtagcattccaaacgagggaaaaagttttgtagcggtgcagctgtggcagatgctggcagaatccggaagcaaaaccctgttcctggatctggatatgagaaattcggtgctgattaagcggctgaatatggagtttgaggacgagaatccggtgggcatcgattactacctttccggacagtgtgaatacgaggacgttatctataagaccaacgtggagcacggcgatttcattccgtgcatcaacctgttggaaaacccgacatcactgattgaggatcatcgttttgaagagctgctggatcggctcagcaaggaatatcgatatattatcatcgactccgctcctttggcggcggcagcagatgccaatgtcattgcgacaatgagcgatggggcggtattcgtggtacgaaacgaatacacatcccggaagttaattcgaacatccattcagcagctggagcagattcactgcaaactgctgggggtcgtattgaatcgggaatccgtttcttccaagtcttacgggaaatatggctattacggttacgatggctattatgggggagaccgagaagataaatagtggatacgattatcagattacgtggcgaatcgttaatgataataatataaagaaaggagattttagcttgaagagacttaagtttattctgttaacggctattcttgcatttaccatggtaatgccttcgttcgcttttgcggcagtggacagtccggcgaagaacccaacttacaccgcagttgtaaagggtgcgaattccaagacctacgatggaaagtctgccaaagtacaggtatatgtaattaccgatgatggcaacggcaacattaagacggaagtaaaatctattacgacccctgttaatgccggaaagtataagtatacatttaacggcaagactgtgtactacaccatcaaacaggcaaagaacgtagtatctgttacaaagaacaagacttacaccaagaagcagctcaagaagaagggcaagcgcttccagattaagacaaagagcaagaacaagggtaaggtaacttacaagagttcttccaagtatgtcaaggtaagcaagaagggcaaagttactatttccaagaaggcaaagaagggtacttacaagatcaaggttaccgttgcggcaaagggcaactacggtaagtgcgtaaagtacatcacaatcaaggtaaagtaattataaataacctttttatttaaatacagttgcgaaatctcccctcactattctggccacgaagaatattccgggggaggtttcggcggttgtaataaaatttaaaaaacaataaaaataggaagcaacacagtacatttttacaatagacatatttttgctgggggagcgaaaatgcagcagaaaaaagaaagaagaagaccattcatcgaacattggcaagtaattaaagccatgttggttatatacgacgttatttcaattgcggcagcttatttcatcgcattgctgctgcggtttgattttaattattccgaaattccgtacgaatatctttctccgtacaagaagtatatcccattctacattttaatatgcgtcataatctatgccggaatgcggctctatcgaagcatttggcgattcgccagctacgatgaactgttgcgggtggtgaaatctaccggattatgcgtactggttcacgtagcatttgcgattactgctcgcatgccgatttcttactatttaatgggaataacgcttcagttcgggtttacaatcggtattcgttttgcatatagattcattcttcttttacgatctgataaatacaagaagggtcataaggtgaagaacgtattggtaatcggtgccgggaaaagcggatccatggttatccgagaactgaataccaccaaacatctgaacgacgaaccgcgatgcgtaatcgatgataatccaaataaatggggacgattcatcgacggggttctggtattcggcggcagagaccgcattctggaagcggtggatcaatttaacatcgacaaaatctatctggcaattccgtccgtatcgccgcagattcggagagacattttgaacatttgcaaggagacggactgcgagttgaagagtcttccgggaatctaccaaattgctaacggagaagtatctctgtcgaagatgcgtaaagtggaaattgaggacttgctgggcagagatcccattaaggtcaacttagatgaaatttgcagctatattgaaaagaacgtagttctgatcaccggcggcggcggatccatcggatcggagctgtgccggcaggttgccgcacacaacccgaaacaattgattattttcgatatatacgagaacaacgcatatgatattcagcaggaattgattaagaaatatccggatttgaacctggtaacgctaatcggttcggttcgagataacagaagaattttccaggtgttcgagcagtatcacccgaatatcgtattccatgctgcggcccacaaacacgtaccgttgatggagggcagtccgtgcgaagcgattaaaaacaatgtcatcggtacctacaataccgcatttgcggcaatgattcataacgtcgataaatttgtgctgattagtacggacaaagcggtaaacccgtgcaatatcatgggcgccaccaagcgattgtgcgagatgattgtgcaggccttcgaccatttggtgaagacgggcaaagcggatgaagcaccgcagctgttctgcaatccgattctcaaaaaatgggcgtcgacgccggagaaggatgaacagctgcgccaaagcaagacggaattcgttgcagtacggttcggcaatgtactgggcagtaacggctccgtgattccgctgttcaagaagcaaattcttgccggtggtccggttaccgtcacccatccggatatcattcgttactttatgacaattccggaggcggtcagcctggtgcttcaagccggatgttacgcccacggcggcgaaatcttcgtgttggacatgggcgagccggtaaaaatagatgcgttggcacgcaatctcatccgtctgtccggactgaaaccggatgtggacatcaaaatagagtacaccgggctccgtccgggggaaaagctgtatgaagagaagctcatggcggaagaaggtcttgagaagacggacaacgagctgattcatatcggaaagccgattcccttcgatgtggagtggatgctggatcaattggagcctctgatggatgcggcatataagaataaggattatatccgcgatttggtagcggatttggtaagcacttatcagattactgacgagaatcggatggtaaagggtgctcagtagggcaaatacgaaccggcatggaagcgaactccatgccggttatttgttgagcaagaattgattttcgggcagaaaaaaagagactttgttcattttcacgaataagcctcacaacactcttattataccactaaaaaattttaaaattaagactgtttttaaaattctttccgcgctattatatagacaacaaaagaagaagtccaaagaaccaagcgacaaacctaacggttttggatatagaagggtgtatctgaaagacttcggaatcggaggaaagaccaatgggtaagttcgaaggatagctgattcgaaacagcgaatttaatcgaaaggaggttagaccaaaggaaaagtttagcagacaggctggtctgaaataaagccaatgagctttcattgaaaaatcggggaagcagaaagtggaggtaagaccaaaagtagattagaaaacggtaactgacctacaacagtaatctattacaaggaggacggaccaacacacagtcttagcagatagctgatctgaaacacagcaaatagccaacggcagaaagtagaggttagaccaatgggtaacgtgaaggaaggtatccgaaagtagaaaatccgtaaattatggctgattaagctaaagtaaaaacggttgatacgatagaggacggaagttaattttcaggatatcaataaagaaagaagtggaaaagttaatgaatatgaaagaagagtgctaggagccaggtgaaatgaggatatgtcacctggctcttgtggtgttcgctataagaaaataatggcccgtaccgggcataccggcgcacagtagccgcaatgaacgcatttcttcggatcgatttccgccagcccattctcgttccagaaaatcgcttcactgacgcagcgatttttgcaggtgccgcacccttcgcagtcggactgatccaccatcaatcgcttgttcgaaacatccggttggtaatccgctgagaggcgtccgctaaagaattccaccgctcgatctacctgttccgtgtccgccatcccaatcatcaccgaggtattacccgggattccggcagcgtactccagacaactcctgtaatcgtgaatcaagttaccgcccccaaaggccttcatggtaaaaataccctttcccgcatccgcacatttccgaattgccgcttccatctcctctcgggttcccggttccaatcctttccgaatgcccattccatctcgattaatcagcgtaaataccacatcgcattctgaaattacggccatttccgcgcaagcatccacgtgatgggtggagatgccgattgcttttataagacctttggctttcaaatcgcagagcgactgccatgcatccttccttgcatagaaatcctctgttccacggacttcatgaagtaggaaaagatcgactgcatcaatatccaattgttccaggcattccagaacggccgcttccgtttctgaatatccttcctctaaagtcttgctgcagatgatcggaaagttcagattcctttggcggatttcatccagtgccggccggagatatcgataggtgtcgtaatactgtgcggtatccaggaaattaatgccctgttccaccgcgtgtacaattgcccgagaaccggcttcgatatctaagtttttctgggaaaatcccatcgtcagggttcccatacctacgggcgtgacggaaatccccgtccgacccaatattttttttaccataaatactcaccttctgaatgtaataactctagtattatagcatgaaatagaaatgcctgggaatgatattgaaaaacacagatttttcgtgggtggaatataggtttcatctattggtaaagaggtaaattcttcgatatattgaattatatgatgattttttgagattcggaaggagatggacgagatgataagaggggaaggaaaaggcttcaagaggcggagcgtgaggcgtattgctcttctggcggtactactggtgggaatgatgggcactgcggctttcggggcatcggctgtcaaaaagtaccacaatattccggcgtatcagatgcgggatgtgtattcccagaagcaggtgaaaatcgggccgattgatgtttttaacggaagatatagtagtgataaaccggtcgattatgatgtcactttcacgatttacaacagcacccttcagaaaatcgatcaggtggtgactacgaaggatggaaaactgccggagctgacattgacggagggatttaattatatttttatggtcttggataattccagatggtatatggcaaatcggtactattgggttcataatggaaatctttgtaacataaaatcgtatgaaccaaatttaaaagaattacaaaaaagaaaagggaaggattataaaccaacagataaagaacgtgagaattgctatgatagagtaaacagcattactgttatgccattcaataatcagtcagattcaacggatcgactaaatggaaatagaaatgataacatctatgtatactaccagggaaaggaagctgaggccggaattaatattgtttttaccagtgacagagagacgataacggcaaaaacggataagtacggaagggtgcagccgattcttctggaagatgtaaactatatggtttcgacggatgatccaaggtatgaaatcgatccatttccaatcgcagtgaaagataagagtgagtatagtgacagtaaaatttggtcgtatgtaaacagatttttttatgaccattccacctgtcatcgcgttggcttgagatatcagacatttgacaaggaaaagcaagaaatgataaccgtaacggatgaaccgataacactcttggacaaggggcaggctcataagcatgacaagccgcttaccagcctttccggcaacgtaacggtggaaggcatgcagttcaaggatatcgtgcttctggatcgaaaggtggacaaggagattccggaactgggtgaaaaggactatcgggtgatggatatcactaccgtgaatccacaccggggcgaaatctgcaagctggccagcggtgatttcacggtaacgacttcgtcttttggtcggaccgtggacaacgtctaccgcatcgatgccaacggcgcgctgcagaaatgcgactttgagcagaaggacggtaaggtgcgtttccatgtaaatgcgttgccggcggaatccgtggttctggaatattccaatgaaatcaatccggtgctgaagctttctgccaccgcatacacatacaacggcaaagttcggaagccgagcgttgcggtaaaagcaggggaaaagacgttctccgcctccgagttcgccgtgaagtactccggcggccgaaagaacgtgggcaaatacagcgtgacagttaccatgaagggcaaatatacgggcaagaagaccgttactttccgcatcaatccaaagggtatagcggtgcagaagctgataaagggcaagaagatgatgaaagtgacctggaaggcgcagaagacccaggtgagcggatatcggattcagtacagcacttcttccaagttcaagaaggatactcacatcaagacggtgaagagttataagacgaaatcgctcaaggtaaaaaaattaaaggcaaagaagaagtattacgttcgaattcaaacctataagacggtgggtggaatcaaatactactccggctggtccaagacgaagagcgtaaaaacaaaataaatggagtgcatggaggcggcttccgaggtggggccgcctcttcctatgattttcttttttgcatgtaagaggtaccgaaatatgcgttattgtagcatttccttcgatatgataaaatagtaacgtatctataaagggattcagagaaagaggaggagaacgtgaacgactacaataaagaatataatgcaaaactcaccaccccggaagaggcggtgaaggtgattaaaagcggtgactgggtggactacggctgcttgcatgcgtatccggcgcttttggaccgggcactggcggaccgcaaagaggaactggaagacgtgaaggtgcgaagcctgctgatgcatggcccccttcatattgtggaggaagacccgaatcaggagcattttacgtataattcgtggcacatggttaaattcgaacggaatttgtgcgaccgaggcctgtgttattttatcccgatgctgttccgaaatctgccgggatactaccgccgtttcctggacgttgatgtggccatgatggcggtcacaccgatggatgaagaagggtatttcaatttttctgtaaacaatgcaacggcgcgtgctgtgctggatacggcgaaagtaatcattctggagattaacgataagcttccgagactgttcggaaaagagaataaggtgcatatttcggaagtggatgccattgtggaaggtgaacacccggatttatttgaaatcccatccgcttccggcagtgaaatcgatgagttgattgccaatcagattgtttcacagatggaggacggtgcctgcgtacagctgggtgtgggcggtatgccggatctgattggaaagaaaattgcggaatcggatttgaagaatttgggcgttcattcggaactgattgtaaatgccaacctggatatgtataaggcgggcaaaatcaccaactccaacaagaccggcgagatgaagggaaagaccgtcggcggactggtgtacggaacaaaggagctggtggaatggacggcggagaatccggacgtgatgatttgtccgatggactacgtgaacgatgtgaacattatccgaagtctggataagtttacatcgattaacagctgcgtcggagtggatttgtttggtcagatcagttcggagtccgcaggaactcgtcatatcagcggaaccggcggacagctggatttccttaccggagcctacgataacccgacgggaaagagttttatctgtatgccgtcttctcgcgtggatcgaaagggtgtacgccattccaacgtgcatgccacgttccatggggatatcattacggatccgagaagccagagctatcagttggtgacagaatacggaatggtgaaccttgccggacgttccacttgggagcgggccgaaatgctgatcagtgttgcgcacccggatttccgggaggagctgattcagtccgcagaagaaatgaaaatctggcgccgaagcaataagctgaagtaggggaggagaaaccgtttctcaacacagcataaaaaagagggtcttcactttttcctcggggatggattttttgcacggggaatagacaggaat

SEQ ID NO: 4268 - DNA, 19368 bp, Unknown
  16S sequences of unknown bacteria
ggctcggacggcaatgacggcggccagggcgaaaatggctcgggcgcaggcagcggcgcgggcgacagcggcagcggttcgggcagcggcgcaggcagcggccagggcgaaggcgaaagcggcagcggcgcgggccagggttcgaccaatgagcaacagggcggcgcgggcaatccgggcggcgcgcagggcgcgggcgacggagccatgcgctatcagcagggaacgtatgaaaccatctacgatcccacgcgcctggacgccgcgggcgagagcagccagctcaccggcgagatgggcgaaggcgaatcgcagagcgtggatctgggctttggcgagggcgaagagggcggcgacgtgcccgtcggcgagtacgcgggcgaatacgcgcaggccgccgcgcgcgccgcggaggcggaaaatctgcccgacagcctgaaaacctatgtggacgaatatttttcctcgctcaccggcggggatgggagggaaccatgaacgaacgggacattctcgctttttccgaaaccatcgcgcgggtgcgcgcggaaatcggcaaagagatcatcggccagaaaacggtcgtggaacatatgctgatggcgctggtggcagggggcaacgttttgctggaaggcgtgccgggactgggcaaaacccggctggtgcgcgcgctggggcgcgtgttcgatttgcccttttcccgcatccagttcacgcccgatctgatgcccgccgacatcacgggcaccaacatcatcgtcaaaacagaagagggcaatgcctttgaattccggccggggccgctgtttgcctccatcgtgctggccgacgaaatcaaccgcgccacgcccaagacgcaatcggcgctgctggaggccatgcaggagcacagcgtgaccgtggcgggcgcgacctacgcgctgcaggagccctatttcgtgctggccacgcagaatcccgtggagcaggagggcacctatcctttgcccgaggcacagctcgaccgctttcttttcaaggtaaacgtgcctttcccctcgctggaggaactgggcgcgatcgtggatttgaccaccggcggcgcggacggcgtggccagccaggtgtgcggcggcgcggatatcctcgccatgcgcgaaatcgcccgccaggtgcccgtggcgcaggccgtgcgcgagtacgcgctgaagctggtgatggatacgcaccccgagcgggcggaatcgcccgaaatcgcgcggcgctatctgcgctttggcgccagcccccgcgcggcgcaggccattttttccacggcgcgcgtgcgcgcgctgatgcacggccggttcaacgtggcgtttgaagatgtggccgccgtcgcgcccgcctgcctgcgccaccgcatagcgctcaatttcgagggcgtggcggatggcgccagcgcggacggcgtgatcgaaactttgctcaaggagaaataaccatgctcagcgacgcggtgctgcgccggctcgaccggctgcaactcttttatcccgccaacgcgcgcggcggcgcgggcggcatgcgccgctcccgggcgctgggcagcagcgtggaattttccgatttccgcgaatacgtgcccggcgacgacatccggcgcgtggactggaacgcttacgcgcgcttcgaccggctgtatctcaagctctttatggaagagcaggaaaccacgctctttgtgctgctggacgcgagcgcgtccatggccgggggcggcaaatgggaagcggcgcgcgccatcgcggaagcgctgtgctatctggcgctgcgcgcgggcgaccgggtttgctttgcctgcctgcgcggggcggaaacgctggaaagcccgctttttgccggccgcgcggcctacgaaaaggccagcgcgtttttggatggcgttcatcccgcggggcgcatgcgcctgggcgagaggggcgccgccgtgcgagtgcggggcgcgcgcggcatggcggtggtgctcagcgatttgttctccgaagacgattggacgcgttgccccacccgcctgctctacgcccagcggcagaccgcgctcgtccacatcctcgcccgggaggaactggagccggatgtttccggcgcggtgcggctggtcgacagcgaaaccggggagaagattgatttgctggctggtggcgaggccatgcgcgcctaccgccgcgcgctggcagaattcctcgcccgctcgcaggattggtgccacaagcacgccgtgcgctatgcgcaggtggccgcggacgaggatctgctcgccgcgctgctcggcccgctcacgcgcgcggggatgatccgcagtcgggcataacggtatgtgcgctggcaaatgttttttgcgaaaagaggtgaggaaagaacatgcaatttctggagcccatgggcgcgtgggcgctgctggcgctggccgcggtgctggcgttttatttgctcaagcggcaatatgaggagcgcacggtgcccagcacgtatctttggcgcatggcgctcagggacgagagcgcgagccgcccgctggaacggctgcggcgcagcctgctgctcattttgcaattgctggccgcggcgctgttcgcgcttgcgctgatgcggcccgcgctgccgggtcacacggcgggcgaatttgtaatcgtgctcgacgcatccgcgagcatgcaggcggcggacgaaactggccgcacgcgcatggaagaagcgcggcagcgggccgaggaactggtgcgcggcttgaacgcgctggacagggttacggtcctgcgcgcgggcacgaatgtggatgtgcttacctcgcgcgccgacaggcaaacggccattgccgccattcgcgcggcgcaatcgggcagcggcggcgcgcgcatggaggaggcgctgtccctggcccgcgccatggcgcaggagatcgaggggctgggcatttgcgtgttttccgatgcctccatcgcgccggtcgagggcgcttcgctgtatgccgtgggcgcggcggcggaaaaccgcgcgctggtttccctggcggtggaggaaaccgcttcgggcggccgcgcggtcgcgcgggtggccaattacggggcggcgtgcgagatccagctggaaggctatgccgatggcgtgttgtgcgacgtgcgcaccgcgcaggccggggcgggcgaaaccgtgagcgtttcctttgatgtgccgcccggcgcgcagcgcgtggaagcgcgcctggcgaacggcggcgcgctcgcgctggacgatgcgcgctggtggcggcgcgcggaggatgcgcgccgcacagtggtgctcgcaggcgagggcaacctgtttctggaagcggcgcttgccctgcgcgcggatatcgatgtggtgcgcgcctccgtggaggaagcgccggcaatcgagggcgcgcaactgtatatcttcgatggcgttttgccgcaaacgctgccgcaatccggctcgttgttgtgcgtcaatccgccggagggtgccgatatcctgggcatttcggtggcgggggcgcaaacgccgcagggcgccgtgcatgccggggaccggttttcggaaaatctttcgctcgcgggcgtggccctgcgcacctatcggccgctatccggcggggaagtgattttgctgtgcggggacgacgcgattgccgcctgggcagagagcggcgcgcagcgcgcggccgtgatcggctttgatttgagcgattccaatctgcccgtgaaatacgattttccggtgctcatgttgcagctattggacgccttggcgccggacgccagcatgggcgtggcggacgcggtggtcggggaagcggtgcccgtgaccgcgagcgcgcgagcggaggccgtatccgtgattacccctgcgggcgaatcggtttccctcgcgccgcccttccccgccgcgccctttacgggggcggacgaagtgggcgagtacgcgctggtggagaccctgccggagggcgaggaacgcgcctggtttgccgtttatatgcccgccgcggagagcgatgtgcgcgccgtggcggaagatgccgcgcaggcgggcggcggggccgtgcgcgcggcggggcgcgagatgacgatgtgggccgttttgctcctgctggcggcgcttatgctggaatggtgggtgagtcgccgtgagaattgagtttttgcgcccctgggcgctgctgttgttgcccgtgtgcgcggcgctcgtattctggatcgacgcgcgctatgctcgccgggggatccggcgcgccgtcacggcgggggcgcggctgttcgtaatcctgctcaccgtgctcgcgctggccggcccatccctgcccatggcgagcggcgtagccaacgcctggctgctgatggacgtttccgattccatgcgcgaaggccgccaggccgccgaaagcgcgatgcgggaagcgctggcccacgcgccgcaggagcagcgcacgggcgtgatcgcctttggggaaaacgccatggtggaactgccgctgtcggcgggcggcgcgctttcttccctgcaatccgaagtggatggcggcgatacggacgccaatggcgcgctgcaattggcgctcgcgctgctgcccggggacggcgcgggccgcgtcgcgctgatcagcgatgggcaattcgccctgacggatggccaactcgcgcttttgcgcgcgcgcggcgtgcccatagacgtctacaaaatggaaagcagcctgcagcgcgacgcgcaggtcacgcgcgtggatgtgcccgcgcgcgtgtatcaggggcaatccttccgcgtcaccgtggaaatggagtccaacgccgatgggcgcggtacgctcgtactctacgcgggccgcgaagccgttgccacgcgcgaggttacgctgcgccgcggcacgaatacctatgcgtttgaagacatcgcggaaacctctggcacggtcacatacgaggcgcaattgatcctcgagggcgacagccgcacgcagaacgaccgcatgggcgcgtatatgaccgtgctgggcgcgccaaatgtgctgctggtggagggcaagagcggcgaagccgcgcaacttgaggaaatgctcgccgccgccggcatgcgctgcgaagtggttgcgccggcgtatctggccgcttcggcggaggcgcttatggcctacgacgccatagcgctggtgaatgtgaacgcgtccgccatcggcgaagaccagctggcggcgctcacttcctacgtgcgcacgctggggcgcggattgtgcgtgttcggcggcgatgacagcttcgcgctcggcgggtaccgcggcagcgcgctggaagaaatcctgcccgtgacagcggatgtgcgcaaccaggcggatctgccctcgctggcgctgctgctcgtgatcgacaaatccggctccatggcggacgatgcgggcgcgacgcgcctggaaatggccaaggaggccgcctgccgtgcggtggaagtgctcacagagcgggaccaggtgggcgtgatcgcctttgacgacgcctccaaatgggtggtggagctgcaaagcgtgacggacgtggccgccattcagagcgccatcggcaccatccgcgcgggcgggggcacttcgttctattcgcccctgcgcgacgcgtattccgcgcttagccgggcggaggcccagctcaagcacatcatctttttgacggatggcgcttccagcgatagcggctatgagcagatcatcgccatgatggccgaaaagggcatcacttttacgagcgtggccattggcgacgcggccaaccagcagctgctccggcaactgagctcgatcggcggcggaaggttttacgcggcgggcgaatacgacaatgtgccggaaatctttgccaaggaaacctatctggtcagcggcgcgtatgtgcagaaccgcacgttcacgcccgccgtggccgaagaatccgctttgacggatttcgcgggcttcccgccgctttccgggtatctggcggccaaggaaaagccgctgagcacggtagcgctcgtttccgaccgcgacgatcccatcctcgcttggtggcagtatggcgcggggcgcgtgctttgctggacgagcgatgtgcgcggcggctggacggaggcgtatctttcctgggaggagggcgcggatttctttgccggccagctatcctttgtgatgagcgcgcggcaggcggaaggcgcgctcagcgcccggattgagggggataccctgcgcatttcctacgccctgccggaaggggcttcggcggaggggctgcgcacccgggccaccgtcctatcgccgcagggcgaggagatcgccgcagcgctttccgaatccgcgccgggcgtattctccggcgaaatttcttccggcagccagggcgcctatgccatccgcgtagagcagacggacgcttccggcacgctcgtgcgcgcggtggagggcggcgcggtgagcgcttattcccccgaatacgacattacccgccccgtgcaggcccgcgtgctcgaacgcctggcggaagaaacgggcggccgcgtggtgacggacgccgcgcagctgctcgacgcgcccaccagcggcgcgctggagcggcgggacatttcggacgccctgctgtttgccgccctgctatggttcctggcggacatcgccctgcgcaagctgccctgggagcgcgcgctcgcgcgcgccatggcgcgcaggggcgcaggggcagcggcccggcccgcgaaaccggcgcgcgaaaaaacgccgtccgcgcggcacaggcccaaagcgcccgcacaggcttcgccgccgcaggaagacaccgcggcccagcttttaaaggcgcgcgaaaataagcgaaaactgtgaatttgcaggctgctggaattggttttccggcagcctatcgtttatatgtgcgatgaattgcatatttctatagactttaacgcaaaaatatgctacaatcctcttgcactgatacgggagggtatgaaccatgcagcagagttctatggagttcccagcggtgcggccattttttctttccatccggcatgtgaagatgcaggaggcagcggaacagaacgtgcgccagcaccatttgcacagcgagtgcgagatttatatcaacctatcgggggatgtttcctttatggtggaagaaaagatctatcccattcgccccggcgacgccattcttacgcgcccatatgaataccaccattgcatctatcatagcgacgccccgcacgagcacttttggattttgttttccgccgaggggaacgaagcgctttttcccctgtttttctgtcgggagcgcggcgaagggaaccgcatcgtactcccacgagaagagcaaacgcgcatgtttggtcattgccgcgctttgcttgcgggcgaaggcggtattttggcgcgctatcagcatttttttgccctgctttcgctgctgcgcacgggcacggctgcggaggaggaaagcgcgcaggtaccggaggaactgcgccgcgtgctcgaatatatcaatgtgaactacgctggccccatcgccgtgggcgcgctggcggaaatggcgttcgtgagccggaacacgctggaacgccgctttcagcaatacctcggcgtttcgccctatgcgtacatcacggaaaagcgcttgacctgctctttgcacctgctgctgcgcggcgcgagcgttgcggaggcctgcgcgcgcagcggcttttccgattgctcgcaattcatcgcaaaattccgccgcaaatttggcgcgacgccacaccaatacattcgcttgaaaaacccgccaggtggccgcgcatagcggcttactgccctgcatagcatagttttgcggggaggggatgggtatgcagccaattttgcttgtgcgcgccgcaaggccgggcgcgatttttttgggtgggcggtttgccggcgaggtggaagagagccgcgaaatggccctacctgtggcggcgcagggcgcgcaaattctgcaattttttccctatgacgattccctgcccatggcaagaaaactggtgttttctcgcggcaggcccgttgcgtccgcctggagcgcgctcaaaggcgtgcgcgcggtgagttggccatgcggcgcagtggaaatcgaattggaaccttccagcgcgcaaaaaagcgccgccgcgcaggcgcggcgcgtgggcgaaatggatgtattggaggaagaaacggaaaccggacagcggctcacgctttcgcgggcgggcaatgtgctgctatgcgtggaagggcgcgaggcaaccttgcgcgcagatggcagcgtgtacgtgctcagcgagctgggggacgaggtgggccatgcgcgcgcggcggtgtatacgcctacggccgagggatatgcgctggcttcttccgatatgctttgggcgcagggcgcgccagtttggccgcagagcccggaggcctgtgctttggcggcgctacaggcgcagcttttggcgctttccggcgaagcggagggctatctcgccgctggatacgcgcgtgccagcgcgccgctggcggaaattgtggaagggtttgacgcctgtgtgcgcatgaagttccctctgcccagcggagaaaatgccgtggcgctcttgcgtttggctggggaaaatttgctggaagcggttcctgtgctctatagcgcttccgctaccggtggaacgcaggggccctaccgcattgagcggttgcttcgcggagaaggcgcgccatgcgcttgagacggacggagacaaaatattctttcctgttaaatatatgaacgttttgtcatatgcgttgacagcaaaacattcgcatgttaaacttgtaagagtgaaaggaggcgcttgcgttccgaaaggttcgtggccaatccgcatacacgagggggccagtcgcgcggacaggcatccattcggcacgcaaggcaagattttcatggtaagaggccgtgaaggtctttatttacgcaaggaggatggtttcccatgcacgtctttctcgagaactttcagtcgatcacctggcaaatggtggtgatgtgggcaatcggcgcgctgctgatttacctcgccatcaagaaggacatggaacccacgttgcttttgccgatgggcttcggcgcgatcctcatcaacctgccgctccctgcagtggcggaagccgcggagaccacgggcgttgccgctgttttggaaacgctgtacaatgccggtatccgcaacgagctgttcccgcttttgctcttcatcggcattggcgccatgattgactttgggcccttgctttccaacccgaagatgctgttgtttggcgcggcggcgcagtttggcattttcttcacgctttccatggcgtcgctcctgggctttgaccttacggacgcggcttccatcgccatcattggcgcggcggacggccccacttccatcgtggtagccgagcattatggcacaaaatatatgggcgccattgtagtagcggcgtactcgtatatggcgctggtgccgattgtgcagcccccctgcatccgcctgatcaccaccaaaaaagagcgcctcatccgcatgccgtacaaccccaagcagatcagcaaaaccacgcgcatcctgttccccattttggtgaccatgatcgctggcctggccgcgccggattctgtggcgctgattggtttcttgatgttcggcaacctgctgcgcgaatgcggcgtgctcaattcgctgtctgaaaccgcgcagaaagtgctcgccaatctgatcaccctcttcttaggcattacggtggccttcagcatgcaggctagcgagttcctccagccggaaaccctgatgatcctggcgttgggcctggtcgcctttattttcgatacgtttggcggcgtgctctttgccaagctgctgaacctgttcctcaaggaaaagatcaatccgatggtcggcgcggcgggtatttccgcgttcccgatggcgtcgcgcgttgtgcataagatgggccttaaggaagacccgaacaatttcctgctcatgcacgcggcgggcgcgaatgtggccggccagatcgcatcggtcatcgcaggcggcctgattatggcgttggttgtgtaaggagggtatattcatggatttccatattgattttcaggcgtttctcgattctctgcccatcatgggcatgggcatgctgggcatcttcattgtgatttttgtcgtgttcctcatgatcatgattctcaacagcgtaaccggcaaaaagaaggaggacggcggcgaccaataagcccgctttcccgcgctgtggcataacgccattttgcggcccccattgagccaaaattgcctccccgttggcttgacattcgcactcgcatgtagtactatacatgcaaatgcgaaatggaagcgaacggggagttttgttatggtgacgagagcggatgtggcgcgcctggcgggcgtttctacggcgacggtttcctatgtgttgaaccacaccaagcatatatcgcctgaaaccaccaagcgcgtgatggacgcggtgcgcgaactggattaccggcccgattttgtggcgcgcagcctatcgcagcgccaaaccaagcaactggcgatttttatggacgatgcgaccaatcccctctatggcgaaatcatccgcagctttgaggaatgcgccagcgaaaagggctattttgtgagcatctgcgccagccagcgccgctttcaggaatattttgacaacgcgatttcccgccgcctggatgggctgtttatcatggctccgccccggcactatggcgcggaaacgctgcggcgcgtggctggccgcggcatccgagtgatcaccagcgggtattacgatgtggatcgggagcaatgctcctccatcgaaaacgattttgtttccgccatgcgcaagggtatgctgcatctgtacgatcgtgggcaccgggatatcgccttcctcacagggctcaccagcagcatgcaatcggatatgcgcatccgtggctatgtcgccatgctggaaagcttgcgccttgcctgcggcaccgatctattggtggagggttcgccggatttcagcacgtccatggacgatggctacgccctggcgcgccggctcatggagcgcggcaaacccttcacggccgtcatttgcgtgaacgaccttacggccattggcgcgtatacggctttcacgcgcgcgggcttgcgtatcccggaagacgtcgccgtcatgggatttgacgacattgcgttttccaagtttaccaatccgccgctcacgacgtttgccatcgataagcgcgattttggcgcgcgcgcgtttcgcatgctgtatgatagcattcaaaatggggaaactacccactatgtgaacccgcttacatttatagagcgccaatccaccgccgtttggcggtgacagggcaggaggtacagaatgtttcggaaatgcttggcaatgctctgcgtatttttggcgctcttttgcgtgccggggagcgcgagggaagaaagcgaatggctggaagtggtgtttttggatgtgggcaaggcggacgctgccgttttgctgacggaacatagcgttgtggtgatcgataccggcaaaaataaaacgggcgaagatctggtggattttttgcgctcccgggacgtttcgcacatcgacgttataatcatcacgcacttcgataaggaccacgtgggcggggccgataaagtgctcgaagcgttcagcgtgggcacggtgtacgaatgcgcttgggaaaaggatagcaaacaggtgcggcaataccgcgatgcgctggaaagccagggcattcagccggtggtgctggcggaggacgtggcctttgccattgatggcgcgcaatatgccgttgacgcggcgcaacattcttacgcaggggagaatgcttccaacgatatgtccctcgttgtccgcgtggaatatgggcaaacgagttttctctttgcggcggacgcggaaaacgaccggctctttgaactgctcgaggagggggatttggccagcgatgtgctgaaagtgccgcaccatggcggctatgaagcgcttagcagcgcgtttttccaggcagtctcaccggaatacgccgtgatcaccagcgatgcggagaacccagaggatgaaaccgtcgtgcacattctttcttccctgggcgcgacggtgtatctcacccggctgggcagcgtgacaatggtttccgatggcgaaaatttggatgtttcacaagcggcattctcagaacaatgaggtttctttgaaaaagggaaaaattttcgctatctcttgacaggacgggaaaagcgcttaaactaaaattggtagctggatgcgaatcggttaatcctccttcacgggagtaaacaccgcgatccattccagctaccatttttgtatcgctctttgtagcgcgcaatgccgcgccgcggtttacaggatgtcgatgtattcgccgctgagcgccttgttcatgctgcgcacggcacagaatttgccgcacatggagcagctgtcctcgtgctcgggcgcgcgactttcgcggatggcgcgcgccgtttccggatcgatggagcactcccactgcttttcccaatcgaaggttctgcgcgcgtcggccatggcgtcgtccagatcccgcgcgtggggcacttttttggcgatgtccgccgcgtgcgccgcgatgcgcgcggcgatgatgccctgtttcacgtcctccacattgggcagcgcgaggtgctccgcgggggtaacgtagcacaggaacgccgcgcccgcgctggccgcaatcgcgccgccaatggccgatgtgatgtggtcgtagccgggcgcgatgtcggtgacgatggggccgagcacgtaaaacggcgcgccctggcaaatcgtctgctgcaatttcatgttcgccgcgatctggtcgatgggcatatggcccgggccctcgaccatcacctgcacgtctttttcccaggcgcgcttggtcagctcgcccaggcgcaccagttcttcgatctggcacacgtcgctggcgtcggccaggcaaccggggcggcaggcgtcgcccagcgaaatggtcacgtcgtattcgcggcaaatgtccagaatttcatcaaagcgctcgtagaaggggttttcctcgcccgtcatgctcatccaggcgaacaccagcgagcccccgcgggaaacgatgttcatcttgcgcttgtgccgccggatctgctcgatcgttttgcgggtgatgccgcagtgcagggtgacgaagtccacgccgtcttcggcgtgcaggcgcaccacgtcgataaagtcctgggcggagagcgtcgccagatcgcgctggtaatggatcacgctgtcgtataccggcacggtgccgatcatggcggggcactcatgcgtgagcttctggcggaagggctgcgtattgccatgggaggaaaggtccatgatcgcctcggcccccatgttcacggcggccatcaccttttgcatttcgatgtcatagtccttgcaatcccgcgaaacgccgaggttcacattgatcttggtgcgcagcatggagcccacgccgttgggatcgatgcaggtgtgcaaccggttggcgcagatggccacctggccctgggccacgagttggcggatttcttcttccgtgcggaattccttttgcgccacggcgcgcatttccggggtgacgatgccgcggcgggcggcatccatttgcgtagcgtaatttctcatggattttcttcctttcagacagattcagaggattgggcaaagcggctgacgagatcgaaggtatggtccagcggcccggaacccctgccgaggttcagcccggccgcgagcgcgccgcgcaggtattccctgccccgcgccacggcatcctccagcgggaagcccttcgccaaattggccgcgatggcgctggaaagcgtgcagcccgtgccgtgggaattgggattggcaatgcgcgcgcccgcaaaccagcgtaaggtaccgtttgcgtagagcacatcgctggcgtccgcgcccaggtgcccgcccttgagcaaaacggcgcagccgaagcgctctccgagctgccgggcggcgttttccataccggcttttgtgtcaatttttttgccggaaagcgcctgtgcctcgggaatgttgggcgtaatcagcgcggcgagcggaaaaagcgcgtccgtgagcgccgccagcgcgccggattgcatcagtccggacccgctgctggcggccatgacggggtcgatcacgacgttgcgcgcgccgtattccgcgagcttctgcgctgcaacgcgcatcagttccgccgagggaatcatgccggttttcaccgcgtcgggcgggatgtccgcgaacaccgcgtcgagctgctgcgcgaggaattccggcggcacttcgaggatggccgcgacgcccgtggtgttttgcgcggtgagcgccgtgatagcggtggtggcgtacacgccgttcatcgccatggttttgagatctgcctgaatgccggcgcctgcgcaggaatcgctccccgcgatggataatgctgttttcattttgttaccctcgcatatcttttgttgagcgacggaaggtggtgcccccaatccgccgctggcctttacaggcccgcccagcgccagaaatccccggcgcgttcgtaggtttcgagaaaaacatcggccagggcgcgcagttccgcctggcgcggctcgtgcgaatcgtacaccgcgaccgcgccaaagccatccgcccgggcggtggcaagcgcgtgcagcgcgtcttcgaatacggcggtttcgcaccgtttcgtttgcagccgctccagggccgcgcggtaaatgtgcggttcttccttgccatgccccaccgccgcgcaggtgaggatatcgcgaaacagcggcagcacgtttagtcgccttagcgccgctctggccagcggttcgggcgtgaccgtagccacgcacagggaaacgccgcgctccttcagcacacgcaggaaatccgccgcgcccgccttcagggggacggtttgccggtaggcgctggccaccatgtcctcaatgccgcgcaggatttcgggcacggatagcgtcacgccgtagtgctcctgatagtaccgcgcggcctgctccagcgtgaaggtggcaaacgtctcttgcaaattctctctgggctcgatgcccagggagcggaggtaatcctcgccgatggtgtcccagatggacatggaatccagcagcgtgccgtccagatcgaaaatcgcgccccggatcatgcttccaccgcctgcagggtgcgcgttttcagttccgccgcagccgcgcggatgtccttggcggcgaagatggcgctaatcaccgccacgccgcaaatgccgctgcccctcagttgctccacgttgtgcgcgccgatgccgccgatggccaccacggggatggaaaccgcccggcagatggcgcgtagggtatccaaactcacatcctccgcgtccgccttggagccggtggggaacaccgcgcccacgcccaggtagtccgcgccgttttgctcggcgagcacggcctgttccacagtttgcgccgaaacgccgaggattttgtcctcgcccagcagggcgcgcgccttttgggcttccatatcgctttggcccacgtgtacgccgtccgcgtcgatttgccgggcgagcgccacgtcgtcgtcgatgacgaagggcacgcggtagcggcggcacagggcctggatttcgcgcgcctcggccagcagcgcctcgcctgcgagttccttttcgcgcagctgcacgaaggtcgcgccgccccggagcgcctcttccacctgctccgccagcgtccggccgcccaaccaggcccggtcggtgaccgcgtagagcagcaaatcttttttatcgcacttcataacgggctcctttttccagcgtggcggcatccatgttataaatcgcgtcgatgatgcggttgcggtagctggaattgccctcgcccggctgcagatgggcaaagccaatctcgcccgccagccccatcaggcacaccgcggcggccacggccacggttttgctctgcgggttcgcgacggcataggccgtggccacgccggaaagctggcagcccgtgcccgtgattttgctcatctcggcgcgcccgttgcggatgatataggtgattttcgcgtcggacaccagatcgatcgctcccgtgatggcgatgacggcgccggtcttttccgcgaagcggcgggtgaattccaccatcgcgtccagattggcctcggtcacggtgtcggcggcgtccgcgtccacgcccttggtggtgccgctgcccagcgccagcgttttgatttccgagatgttgccgcggatcacgtccggacgcaccttctccatcagcgcgagggctgtatcggtgcgcagcgcactcgcgcccgcgccgacgggatccagcagcaccacatgacccaactctttggcccttgcgccagcgatgaacatggcctcgatgctgcgccggttcagcgtgccgatgttgatgtttagcccgccgcaaatggaggtgatgtccgccacgtcctccggctcgtcggacatgatggggctgcctccacaggcgagcagcgcgttcgccacgtcgttcacggtcacatagttcgtgatgttgtgcaccagcggcacggttttgcgtacattttccagacaagttcccagcataatggcctctttccccgaatgcgattcggatgcggtattcagcggaaatccatcgcatgcttctgcgcgcatacaaaaaagggaaatcaccgatttggcaatttccccgcatacacgaaggcacaggcatccctacgttggcattatccaaatcaggttatgggtcgaaggtcataccttcctctcagcctgtcacacaagctccccgctgtgcccttattataccgcgcgctggcccgaattgcaagggcaaaattcgcgcatgttcgtgacgaacgcgcaaaacgttccccgcggcgcttttagcggtatgccctggcgaaaacgcccgcgcactcctcatccgacatcgggcaggggttggccaggaacaggccgcccatggtctcccgtgcgttgatggccagcgccatgcactcgtctttccggatcccgtaatcgctcatcttcagatccgccacgccgcacgcctcctgcaattgcgcaagggcggcgaggaaatcctccggcttgtccgcctcaggcattcccatggcgcgggccatcttgatgaactgcccgtcgcaggcgtggcgcttgatgaagaactccgcgaaagcctgggaaatcatgatcaggcccgcgccatggggcaggttgtggtgataggcgctcatggcgtgctccatgctgtgctgggccgtggtggaggtcagctgcatggtgatcccggccatggtgctgccataggcgatgcgttcgcgcgcttccaggtcgttgccgtccttcaccgcgcggggcaggtatttggcgatgttctcaatggcggacagggcgatggtttcgctgaggatgttcacgccgcttgacatcatcacctcggtgttgtggaacagcgcgtcaaagccctggtaggccgtgtatttggcgggcacggttttcatcagctccgggtccacgatcgccagcacgggcgtgagctcgggatagccaaagccgatcttttccctggtttctaggttggaaatcacgccccagcaattgacttccgaccccgtgcccgcggtgagcgtgatggtgacgatgggcaggccgggatgcaccagcggctggcccttgcccgtgccgccgttcacgtaatcccacaggtcgccgggattggtggccatggcggcgatggccacggcggaatccagcaccgcaccgccgcccagcgctacgatgaaatcgcagccgttttcccgggcaaaggccgcgccttccatcaccatttccttgatggggttttccatcaccttggcgaattccaccgcttccacgcccgccctggccaactgctcgagcgtgcgcccgtaagcgccgctcaccctggcggatttgccgccggacatcagcaaaagcgcctttttgccgggcatgcgttggctgccgagctcgttgagcgcgccgctgccaaacagaatgcgcgtagggttgttgaaatcgaatttcaggttcataatggccatcctttctcaaattccctgctttgggttttctgcgccctttttcagcgtgtaaatcaggtaatccaggcaatccactttcttttgctccgcgcgcaccgcctgccagagggttgcgcggtgtttcaggaggaggcccagcattccgctcgcgtttcccgcttctgccagggccatgcaggcctgcacagtctgcgcgtcgcaaccggcgtcctgcaggttttgataaagcatgcccagggtatcgaacgcttccgccattcctttgcacctcccgcagtgcgtattataagcgcccgtgcacgatatgtcaaatatttatattttatatcgtgatattcttgacaggaatagcgatttgcgctatactatgcccggaaacccgaaggagagtggctttatggagatccgcgtattgcgctattttctggaaattgcccgggcaggcaatatgtcgcgggcggcggaaacgctgcacgtttcccaaccggcgctgtccaagcagatgaaggatctggagcaggaattgggcaagaagctcttccgccggggcagcgccggattgagcctgacggatgaaggcatgctgctgcgcaagcgggcggaggacattgtggatatggtggacaaaacggccggggaattcgcggcgctggacgatatcgcgggcggcgaggcgcacatcggctgcgcggaatcctatcagatccgctatctggcgcgcaccatcagggcgtttaagaaaaaatatccgctgttccgctatcacctcaccagcggcaacacggagcaggtggtggagcggctggaccggggactgatcgattttgcggtcatcgccgagccgccgaacctctccaagtacaattatctggaagtgcccggcgtggaccgctggggccttgtgatgcccaaggcggatcctctggcccggaaggattgtatacgcgttggggatttggccggcttgccgctgatttgctccgcgcagggcatgaaattcgacatcccccgctggtgcggggaaaaggcggatgcgctgaacttgaaaaactagaaatcataatcaaaaactctgaaaaacaaactttttaattttgaaaaggaag

SEQ ID NO: 4269 - DNA, 15681 bp, Unknown
  16S sequences of unknown bacteria
agaacagttctccctcggtggtgttgtctcgtggagctctgtatattttgccgcccgtcgtgtcgagtatgggacgtccgttccttgaaccgagctgaatcgggtcatagacggtgtaatatatgtaatcccttgttaactgaaacgaagttaccatctcgctcggcattgggatttctgtcagattaaaatctttgtcaaccttataaaccttgcagttgatatccttgcccgacatatcgggattcttcggatagtaaagaccggtgtatgaaacgagtacgtacatttcttccgtgtcttggtcgtagtagatgtttctaaaccagtagccgtcttcatatgtcattatagtcacgggattttcaaaattgtagtcggtgtaatacagctcgcgcgtgtctacatcggcaaacaacaacttactccacacttcaccaactaagcctgctcgggtgggataattgtcgtttatgacctcggtttgctttgttttcaggtcaagatacatcagctttgatttttcatcatgctcggtttcgccgttttcgtttacatattcatactgagtgttataaataaagtatagcttttcgtctttctcaaacatgaggtcaatactaaccatattaagtccgtctgttttttctacaggtgtgtatatcggagtaagagttgcggcggagttgtttatctcataaatatatgtatatgtgatgccgttctgttctgaaaatacagttttggttgtaaacaatattgaagcgtcggaagttgagtatagaagttcacctaagtcgaggtattggcagccgctgtatgctccgtgtgtgcaaagcggatccggacaaataaagtgcttttctccggttaagttacttatgtatgcataggtagggtgtcccagtgtatatgaataacctgtctcatattttttttttgattcttccttttttagctgaaagtataggtttccgcgtgacaaaccaaagaaactgctcgtgaaacattcaatattctcgtccgaagcaggtttgtattccgtctcttcgtcaagccagcttcctacgccttcaaggtattcgtagccatcggatgcagtcggagcatcatcggctaatttttcggctttatcaatgacaatacccttgttttctttcgagcaggacgcgagcattagcaaagccaaaaacgcaagtaccgcaagatttaatttcttcataactgtcacctctttaaaaatgatttgcagacttattctttagtacagattagtccatttcagcgtgttttccgctacattcaccctcgctatcgagccggtgtagtaggatgacatatcgtccccgcttccgcgcagcttgtagtattgcaggtatagattgtccccgactacacagtacgccgcaccgatggaaccgtcaaatattatctctccgtggttgtcgaagaacagttctccctcggtggtgttgtctcgtggagctctgtatattttgccgcctgtcgtgtcgatgaggagatagccgtttcgagagccgagctgaatcgggtcgtagacggtgtagtagatgtagtcttttgtcagctgaattgacgttatcatctcgctcggcatggggacttctgtaatgttgaagtctttgtccatcttgtaaaccttgcagtggatgtccttgcctgacatatcgggattcctcggatacataagttcgccgtagtagctgagcatatacaactcgtccgtgtttccgtcgtagaaaaggtttttgagtccgtatccgtcttcaaatttcattattgtcacagggttttcaaaattatagtcggtgtaatacagctccaatgtatctccgtcgccgaacagcagcttgtcccacacttcgcccatcagccctacacgcgttgataaatcttcattcaaaacctcggtctgttttgttttgaggtcaagcgacatcagctttgctttttcgtcatgctcggtttcgccgttttcgtttacatattcgtactgagagttataaatgaagtacagcttgccgtctttttcaaacatcagctctaaataaaccatatccagtccttcggatttatcgtcgggtttgtatatcggagtgatggttgcggcagaattgtttatttcgtaaactgtcggatagaacacgccgtcctcaacagccgatcttgtcgcgtacatcagagaggtatcggaagaggaaaaagtgagattacctaagttgaggtattgacagccgctgtatgctccgtgcgtgcaaagagggtcgggacaaatgaagtgcttttccccggtttgaccgctgatataagcatatatagggtcgcctaatgtataatagtagccggtttcgtcacgctttgattcctcttttttcagctgaaaatatatgttgtcgtttgttatagagaagtaattgccttttatgcttacaatgttatcgtatggtgagcttttgtattccgtctccgcgctgagccagcttcccaccccttcgagatattcgtagccttcgggagcagacggagcgtcgcttaacaaatcttccgttttctcaatgacaatgcctttgttatcctttgagcaggacgcgagcattagcaaatccaaaaccgcaagtgccgcaagattaaatttcttcataactgtcacctctataaaatgatttttagtacaaattaatccatttcagcgtgttttcttttacgttcaccctcgctatcgagccggtgtagtagcacgaagcatcatcagcaacgcctttgtatttgtagtatcgcaggtacaagttatccccgactacgcagtacgagcctctgaatataagctcccctttgccgtcaaagaacagctctccctcggtggtgttgtctcgcggaactctgtatattttcccacccgttgtgtcgagaacaggtcgtcctttccgcgtgccgtactgtatcgggtcgtagacggtgtagtagatgtagtcctttgccagctgaattgaggttaccatctcactcggcatggggatttcggtaagattaaagtccttgtctatcttgtaaaccttgcagtgtatgtccttgtccgacatatccattttttccggataggcaagctccgagtacattataaacgcataaagctcgtccgtgtttttgtcgtagtacaggtttttcagataatagtcgtcatcgtatttcagaaggcttacatggcttttaaaattcatatcagtgtaatacagttcgtatgtgtgttggtcgaatagcagcaccttatcccaagctctgccgaccatatatgtgaattccggaaaattgccgtctatgacctctgtttcctttgttttgaggtcaagcgatattaattttatgtcctctctgtattcggtttcgccgctgtcatttataaatctgtattgtttgacatatttcatgtagagctttccgtcattgtcaaaaagcggatatatatagatagcgtgaagatcgtcttctttttcttcgggtgcgtatatctgggtaatggttgcggcggaattatttatctcataaacacatgaacagtaaatctgatactgttcataaaaaacgtcttttaccgcgtacattaccaatggattagatgaagaaaacgtaagatatcctaaactaagatacctacagtcgctgaatgagccgtgtgtgcaaagcgggtcggggcagagaaaatggcgctcgcctgtctgactgctgatatacgcgtagacatcttttcctgatgtgtagtagtaccctgttccgttttcgtcctttttagtctcctcttttttcagctgaaagtaaaggtttcctccggataaaatgaaattgttttcaaaaagtgtatcaatcccctcgtccgaagcaggtttgtattccgtttccggctcaagccagctgcccacaccctcaagatactcgtaaccttcgggagcagtcggagcgtcgctcagcagattctcggctttctctatcacaagacccttgctttccttagagcaggacacaagcagggaaaaaatcaaacaaatcagaatcgcagttttcttcataagccgcctcatgtatgtctttcgttctaaattttggatattctctacagtttcatgatatcatacataggtacagttgtcaataatttcgcaacattttctttaagattgtagaattacacaagttaccgccattcgatttgtataaacagcataataacataccgaaaaattgtgaaatcatactgtaatataacagttttaacttattgccacatctatttccgcgcgtgagaattaacattacgatttaaaaatagttcccgtgaaaaaagtggggcaaaaaccttattcgtgtaatatgcaaaaaatacttgactttcggtggcgagtgttgtatcatactatgtaaagaaaagttgaaattttaaaaccgaaaaggagaaaaaacatgaaaaaactcaaagtcggaatcgtcggcgcgggtaatattgccacaggcgcgcatcttccgtcgtatcaggagcttaaggatatcgtagaagttgcagctatcgccgatatcgtccccgaaagagcgcaggctgccgcagaaaagttcggtattccgcattcttacgcgtcggttgaagaaatgctcgcgaacgaacctgagcttgactacgttgacgtatgcacatggactgctgctcatgctcccgttgctatagcggcggctaaggcaggaaagaacgtcctctgcgaaaagcctcttgcggcaactctcgaacagggtcttgctatcgaaaaggctgtaaaggaagcgggagtacagttcatgcttgcggttgtcacacgttacggcgcggaacagcagaagatggtagagcttcgcgacgagggcaagttcggtgaaatctactacgcaaagacgtcatatgttcgcagacgcggcactcccggcggttggtttaccgataaggagcttgcgggcggcggtcctgttctcgacatcggcgttcacgctatcgaccgtacatggtacctcatgggcagaccgaagccgatttcagtttccgcggagacgtcataccgcattggagactacaagaccaagggcgttagcagatgggaacccttcggaaaaggcaacggcgtgttcaataccgaggactccgcaagcgtgttcttccgttttgaaggcggcaagtcgatgattgctgaaatcgcgtgggctatcaacggcacggaatccgctaccacacagattttcggctccaaggcaggatgcacattcgagcctttgacgatatacggtgaggacgcggacggatatctctccaccgaaactcccgagattcagggcaacaactacttcaccgaggaaatccgccatttctgcgactgccttaacacaggcaagacccccatttccccgatcgaggacgctgtaacggttcagagaatgcttgacggtatctatcgctccgccgaacagcacgcagaggtcaaaatctaagtaaaattataaatgaaagtaccgcttagcgataaaactcagccgagcggtactatttttattcattttgagcttttcacgacaattccgcgctcggttttgtttcccgatatgcgtatgttttcgcagttgcacagaataatgtcgcagtccgtgtcttctaccgagggattcttgttttctttacagtcatagaatctgtttccagtgacggtgactccctttgccgccgagacgaaaattccgcttgacccgatatccttgaagctgttgtcggtaatttttaggttcgtatgtactccggcgggataatcggcagctcccgagtcatgcgcggcttttacgactatagctccgaggtttgccgcactgccgttcattgcgcacttttcaaatgtacagcctgttatctcggtgttgtccgacggtccgacctcataccaaacgcgaatgtccggcgagattattattccgggaagcgacatacctgagaaggagcagtttttgatatgcatattcctcgactggagaaggaatcctcgtgcgcgtgtgtttctcacggagcagtcggaaatgtccaccgaggcaaagaagctgtcgttcgcgaggatgtccccaacagccggtttcccgcttacctcagttacaaccgcgtctcctccgtcatacgaaactatcctgaacgtgcctttttcgaggaatgtattacggtcgtagaagcgaatcaaatccccgccctgcgcccatttttcgccgagagggcaggaccggagcgaacggtcgcggtatatgaagtgcattttttcgccgtatatctccgctatctcgcccgcctgactgtggatgttcagcgcgtcgtctcccagtccgtcaaagtggcagtccttcatggtgagcgttcccgaaagtcccgttatgtgaattccgtccgcgtttgccgagtacagagcctcgcttccttggggaatacgcacattgaaccgctcgaacgtggcgttatggcatcgcggagtaatgagaacgggtacgcttgttgcgcgctcgacttcgatatctctgaatacggtgtcgtcgcagtcggagagccagaatatatgactgccgtatatcagatatcggtacagcacgcggtgtcctacagtaagtcgggagaggtcgaaatcgctcggcatgaatacgcgtatgttctgcccattgagcttttcgtattttgttcccgtgaacttgacgcgcgtgctgccgttttcgtcggtcacttcttcgcggatgatttcgtcgtaggtttctatcacatagtcgggcattccgtcctcgtcgcaggtgtcggttccccagaaatgctcccatccggttacggggaattcatcggcaatgcggacgtcgtatgtgtgatgagcattgtcaacagatgtaactctgccggcgcagttcacgggattgtcggtgctgaaaacgaggttctcaaacgtcagaccttcgcagtgcgagcagacaaaggcgtggttgttctccgcgggatcatcgcaggtggtgaaatgagtgtacagcgtggtgttgcttccgcgcagcgtcagatttttcttgcccgtcacgtgtacctcatgcccgatgaaatagcgacctgtgggcagagtgagtacggtgttgtcgggggtggtcgatataatctcggcgagtgcggcggaaatgtcctctccgtttttttgcaggagagcggcgtcgagggtgatgttctgcatggctttctccttttggtggaagaattgttgatgaaagtatagcaaatatgcgtggggatgtcaagccaaaaagaaaacgccgttctttcatttttctgatgaagagcagcgttttttgttgattcgtttgtcatagccgaggtattgcagcagagccggaaactgttttactgcggcttagcgatgaggaacgccatgtcgtttatgtcgtcatttgcctcatcgaagaaatcatagaatgtgaagttgtaaaggaagcgttccgcactgtacacaccgtatccgtcctgattgtggtcggtggtgtcgtacgggtcggcaacgattatgacgtcgtcctgagttgtttcggtgcccatggtgtcatatccgattattacctgccagtgtccgccccagtcgttccatcctaccataataggattgccgtcggcgagcgtctgctttataaaatcgaaggtgaagacatcgtacacattgtcgcggcagtcgtatgttgaatatacgtcaaatccgccgactccttcaaaaatctcgatggcctgacgcagacttgtcgcacctggagtcaagccgttgtcgcggtaagctgcgagagtttcttcattgtagtctccgagcttgccgtaccattccattaccatcatggcgcttgaaactccacagctccattcgcttgtctgctgctgagtcttgaagtttgaaagaatcgtgagtgtgtcgtcggacttcatgttgtagaagtcaagtgtgttgaagtaaggactgttcttgtggtctcccagacgttcaacgctgtctgcgccgtcatccggactgagatcgcaggaatacggaatcttcatttcatctgaatagttgccttctgttttgctgtcagcgcagcctgtcagaagtgtcgcacccgatgtgagagcgagtaacaatacaattagttttttcatggttttcataaactccttaaaaaagtaattgtacttgttataaacaatgcctttattgtgttatttatgattggactgaacgtcctccctttatttatccaatggatccggtcgtctttgagtctatatagtaagttgttcttttacaaaatacgaacgttttacttttactactctcatgttgttttatacaagtacggtgggtatttcccacagaacccgcggacttaatatatccgccccgataaaatctgaagtcctctcggacaacagcatgagattgcgctgccggctcttgccccctctcctgcgcatgacataaatattatacctgaaaaaaagctctgccgcaagggattttgctctgcccatacggagatttttggaacgaaaacggatgattttttgggataattttgaattttactctataacaaaagaggacagtctcccgccccctttggttattcagataacatatccgtccattctcgtgattctcgctccgccgagggtttccgctttgacttcgccaattcgcgcgcctacacggtttgagattatcgttctctctccgccgatttccgcgtcaatcaggaatgcgttcattttttcctcgaaatgctggattatgcgcacggtgtacggctttttcacgcagtcaacgttagctatcgagaagttccgcgtttcaacgtgcgtgtctgtgagcgtccacggattcatctgctccggcggatactcgtgtattttctcgtgtatcgggggaattcttccgcttcccacatcggatatctgaacctcgcgcagagctgaatctattctaagcgtgcagttgtcgccgaacgttacctcgacagcgccgttttcagccggatctacgtcgatttcccagtagtacgactgcttcggagaggttttcgcgtgattgtttacgacttcaaccgatgacttttttataatcctgtcctccggcagccagcgcattccgagtgagccgtcctcatgctgaatcagctcgcggtgtactataaccgaaccccatccgataccgttcagccatcccgccatgatgagcctgccgtcacagttcactgccataggtacaagaagtccgtcgtaaatatcgtgaccctcggctgcgcactcaatgtatgtctctccgtccttttcggtgcgccagaatccggtaagacccattataatataattgtaaccgtttttagagaagaacgacgggcattcggatgagttgcgcatggaagagcggtctccgcacggtgggaatccgggatttgtgagtttccattcgccaatgggactgtccgcgttccatatgccgtttccgatgcacatcatgaggctctcgttgtcgaaagaatatacgctcgggttttcctcccagtggaacattttatccatcatcttgaagtggattccgtcgtcacttacagcaaggttcgcgccgttcgggtattttcccgccttgtatatctcgtcgtaggataccgctttggtatagccgttttccttgtactgctcgtatatgtctctgccgtagagatgctcgtcggggatgtttcggcttgtgtggaatccgtaggcgaagtagtatttgtccttccaatgaaacattgtgccggttccgactgactgccacggcttctcgagcacgaatatcggaccgtgatccgtccagtttacaaaatcggtcgtggtgagctgctgaaaatagtgcgcgcctccgccgaatctgtttccgtggtggtgacggtcgaagaagtaaatcaaatggtacacgccgtcataccagaagttcacaacgtctcccgcccatgtacagtgtccggcaggggagtagtagcgtatgcctttgtcgagctttctttcgtagtccgaggtcgtgacggctgagaggtcatgtgagaacgcaatggactctgtcttgccgccgattttgacttctggtgcgtcggaggagttctttatctcgcctatagggaagttttcgtttatgagaagtccgtccgagaacaggcagaggtgcattccgtcgtacagcaggtacatatccttgtcattcgcgttataaagggtcagcggaactcctatcttcatggcggtgcgttcgggatgatagggaacattcaagtaaatctcgcactcaagcacgggaacaaagccgttttcgtcgggatatgaggtgtagttttcgttccatccccatccctctcccgctcccttgagtgtgagcaggcgaaccgttcctcgaactgcgtcgggtatggagaaaatctcggtttcgtcacgctctgttacgggggagcttaatttaaaacggataatgaagccgtctttgagtgagttcggacggtcaaaaaaggagcacgcggaaaagttgtatttcttgagtttttgtgtaatcatgttatttctccgtttctgtggtgtatttataaaagtctttaaatttttcgtttgatatggttccgtcggatgtaagtcccgcgaaaagagccgagccgtatgccgcttcttcctgatgcacgggaacaagtatcttcatgccgaataccctctccagcaccctcctgagcgcgggattttttcgcacggcgttgcccgataccacaagctgtcttatcccatccgtcggcatttcggcaaacatcccgtgaagctcatccgccatgccgtatagtacgcccgcgataagctcgcccggaccgaagttttcctctcctattcccgtgacggagccgcgtatggtgtggtcgcttctgattccgcagaaggtagtgcatacgtggagatgtctgtcctttttgatggcgtcaagcgcgagtgagttcattatctcgtactgctccgagtcggtgaatccgcacgccgctacgtattttcggaagaaggattcaagcagggcatatgctcttcctccgcacaaagccgagccgcttatgagactgccgtggtttatgtacgggcgaatctctatctcgggagtgggcgtgaactctgccgtgctgcctgcgaggagcgtaatctggcttcccgttccgaagtttatcagcgcagtctcagcggggcattgtaccgagccgaggaagcttgcctgattgtctcctatcgctaccgacaccggaattccctcatatgtgccgacgataacgttctccgcggtataatcaggcagaacccacgcgtcaacacctagcttttcaagtgcggagacgtcaaatcctttttcagtggaaaagaatccgaggcttgcggcgtttgtcgtgtggcagagcggagctttccttcccgtaaggctgcatacggcgtagtccattacagtcgcgattttcgccgcgtttttcggtactctgccgtgtctgagcaggtcgatatgtgttgcaagtccgtatcccggaggtacgcgatatccgcttttatcctgaatccactcgcagcttgtcatatccacatcgccgtagactgcacccgcgcggttgtcctcccatgtgtagagaggggagagcagcctgccgtctttatccatgtaaacaatgccgtgcatctgtcccgtgaatccgattgcttttatcgtgggacagcggtggagaagggattctatcagcctgcgcacacgctccattattcccgcggcgtcctgcgttttggtgaatacctcgtcctgcggcagatcggcacagcttgcgacggtgtaaactccgatgagcctgtgcgtttccgttgtgaggataactgcgcttatcgtcgttgttccgatgtcgattccgagcagcgcgggttctttttcgccgtatttctcactgctttccgccgcgtcgtcctccgataatgcgctcagcgaatcgaaaaacttgtccatatctccgccggacatgaggttgcggcacagcattaactgatccgacgccgtgtccacactgtctttcagctcgtgcaggcgttttttcagcatttcctccgtgcttataacattgtcgcaccacagctgaatgtcggcgatggatatgcctgctctgcggaatatcgctatggttttcagccgctttaccattgcctcgtcgtactcgcggtaagagttttcggaacgctcgaccgaaagcagtccttttgactcatagaaacgtatggttttgcgcggcagtccggtctgctgttctacttcaccgattcgcataaataatttttgtctccaaacttgttttttcttatgattgattataaactgtcctctaagtggactgtcaatagctttcttaaatatatttgttaaatttgtgttaatacataaattactcttccgtgcggtatctattcttcggcgaaagattgaatttgcctctccgatatggtataatatgtaaaatgaagtacgggagggagagaaatgttccgtcttatatacacgatgccgctgtacaaggtttgtctcgtcatggttctgcttcttgtgctgtgggcgtattacagagcgtatctgccgaaaaagctgttcacggcgatgaacctttgcttgcttgtgacgtctgtattcgctgtcctctacctaaccgtattcagccgcaaggtcgggatatatgacgttgttctcgtaccattttctgcattgagtgaagcaaaaaaagagcctgagcggtaccgttcaatgcttatgaatgtgtttctcttcttcccgctcggaatggcgtgcgcaaatgctttttccgataagatgaagatgcgccggagagtgattcttacggtcgtcataggctttgcgctcagtacggctgtcgagtacatacagtatcgtttttcactcggtatggctgaaaccgacgacgttatctgcaacaccctcggcgcgcttgtcggctctctttccgtaattcttgcggattttctcggaaaacacaagaaaaagtgaaaaatcccctcgggtacagcttttgaactaatctttcgggagcagttcagtgtacggaggggattttataattatttcagctcaccgacggcttttgtgaatacttcaagctgcttgccgacgagcttctgcgttttcgcgatggtggaggaaatctgatcttccttcgggaggaaaacgttctgcgtgaacatattcttcgttgatgcggaccaaattcccgtaccgaggtcgtatgccgcgctgtcgaatataagctcgagcatttcggcggattctgcgttgcgggcaaccttttccatgagaagcacatcgatgtacgcaggaattgattccttataagaatagtaagcgaaggcgttcagtattgtttctattctgtggtagtccgccggctgtactgttttcggaagcacggactgagctccgccttcaacgagggagtaatacttgtcctgtgtttcgtcggctttgggagggggaaggaaacctatgtcaaagtcaatatcgcgtatgttttcggtctttcccgtgtactcagcgaggaacagcgctcttccggcagggaatatgctttcgtcagagccgcctatgtcctccgttccgcttgtgaatatgtcgttgccgttgttcaggctcacgagctttgacatataggtctgcgcaggctcgtttcctacaagagcgtagtagagagtgccgtcgtcctgtctgtcgatatatcttatgtctgctccggtgatgagtgcgctgtagaatcttgtaacagtacctgtagctccgtagcagtcgtttttcggattcattgtgccgtcgccgtcgaggtcgtttaccgccaaagccgcatatttgtaaagcgcatccactgtccacttgccatcacgaacaagctcgtaaaaatcatcggtgataccgtgagcctgctttaagtcgttgttgaagaggaaagcatggcttgtcgagtagttgtagagactgtacgcaccgctgattgcagcctgagttccgtagaaattgtactgctttgttgcgtcgctgtcaaaccacggctgtgtgaggtcgaggtcaaggttgttccacgaggaaaggcggtcggcagtgagaacgtcggctacatttgcgtcaaacagcatcgcgaggtcaaagtcatgatctcccgcggtaactgaatttgtgatagtcgagacaacatcggactgcgcgttttcttcgataaggcagtgatacaactcctcgaccttctgctcacggtggtacagagcgtcgttcagtatgtcgccggtggtttcttcaacgagaatgacagtgttcgtccacgacatggcttcgggggtgtagttgagtatggtcagcgccgctccgtccatgttctctaccgcgggagtgtcgtcggcttccgtttcgctatcatattctgcggcagagcttacggtatcggtgcttgtttcgcttgacggggttttttcatccgccgcagtgttacctccgcacgactgaataagagaggcgagcagcagtattgcaagaagcagggaagtctttttcttcattgtattgtcctcctatattatgccaaattcggcttcgattacgtttccgcatgagcaggctgtgacggtgttttcaaatttgcccgagcggagggtgattttgtactttattccgctgtattcgagtacaatttcgctctctcccgcgcttatcactgtcggaacatggtcgttcttcttgcctatcctgttctccagtcggaacggggaggtgcgctctattcttatgctgttctcgcggagagttatcgttgtgccgtcaaactcgagcagtgcgcatccgtttccggcgtctgtgaagttaaagtcttccgctgtgacgtcgtgtccgtcctcgccgatgaggtatattcccgcgacagtgccgtttccggagtgcctgtttccgtcagctatggggagagtttcatatgtcgcttcgttggcttcgcataccgtgtcctcaaacgggtcggggaacttttccgagaacagatgcaggtcgcgcagtcttacaacgccgtcaatatacacgttcgtgcgatagaagcgtgaggaataccatacggattttttgttttcatcgttgaacgcggagtgtgcggttatcgttgacgcgggggtagtctcgtatgtcgctttgtatcgtcttcccgtctctccgagagtttccactgtgattttgccctcgtctctgagacgctcgaaccgggcaaactgataattcagtccgtttttcatgctgtcccaaccgaaggagctttcctgtcccgcctgagtatagccgaacgagagacactcgccgttgaagttttcgcggaggtaccagtcaacccactttggaacgccgcctccgcctgaattgccgcagtacacgggctcgagcgtaattacaccctgaacgcctgccgcgccgctgtctctgtccatgccgaaatcgtactgatatacctggtctgagccgagcatacggaaaaggggtgcgggaatttgttcttcctttgtctgggcgggcatgaagcagt

SEQ ID NO: 4270 - DNA, 4812 bp, Unknown
  16S sequences of unknown bacteria
cgggctttttttatctgtgttttcctttgaaaaagagcgccagcgtccctgcgcccgagtgagcgccgatgacggggccgatataatttacggtgatctcgtgtccggggaatttctcatggatcagtcggataaggtattcgacgtcttggaggcaatccccgtgactgatgaaaataggatccccctcttccagcgtctgcaactgttccatatatttgacgagcgcctgcaccgattttttcctgcccatggatttggaaacgggaactaaatgtcccgcgtcgtccacatgaagaatgggtttgatattcagcacagagccgaccaccgccgtcgccgtggatacgcggccgccgcgcttcaaatggaaaagattatccaccgtgaaatagtggcacatatgcagtttgagcttttcggcgtattcggcagtttcttccaaagaagcccccgaatccgcttttctgacgacgtaatcgacaaacagaccttcgcccatagaggcgcagagggaatcgaccacgaccacttttctgtcgggatagatttctttgagctcttttgcggcgatgcgatagctcccttccgtacccgaaagtccggaagaaaacgcgatgacgagcacgtcttttccctctttgaggaatttttcaaagtgcggctttgcggcttccgcggtcacctgataagtggtgggcatagaaccggaacgcaacttcgcgtaaaattctttttcagtgatttttttgccgtcttcgccctcgtaattgacgttttccatcaggaagccgagatgcacgcattccacgttatgttcgagaaaatacgactcgggcaggtcggtggaagaatctgtgacgatctcaaaaagccttttattcatactatctgtttctctcctttcccaaaagtgtaattttttatctgtatttttataactttcaacttctctttgccaaggtatccttgtttatccgcatttttataagctcttaatcccgctttacaatgatttattatacaatatttttttcttttttgtcaagtattcttccccgctcccgtacaaaaatcccctttctgtcacccgtttctcctgaaagcgccaaaaagcgccccttccgtttttgttttcctgcccctttttccaaaacggaaaatcatcggcgtttcccctctttgaaaacggcggtcgtcacgccgcagaaacgctctccgtcgattgcgcgcccgcttccctgacggaaaaggaaaatttgagatctgcaaacagggggatcgtcgagccttccgttacggtcgtcacgtcgccgtaattcacgccgattttcgcgcaaagctcctttacgaggctttcctcgtattcgatgttgaaccaaagcacgatttccgtttccgaaacggtcgtagccgattcgccgaacgaaaccgaggccgttttatccaaaaatgtcaccccccccccgggtcccaaaacaacgaatttcttttcggccacgtcggcacccgcggcggagaacgcggcagtcgccgcccgatacatttcctcgtttgtcgtgacggaggcggcgggctcaaagcttttcagcaagctgattttggccacgtctgacaggtatccgctcgtcgtgtttcccgtttgaacggtcttgccgaaagtatctcccgaaagagcctgcgcgtccacggtaaaaagtttttctcccgccgtatcgagggaaaggctcactttcatgatgacgttgttataggcgttcttttccgtgataatggtatcatattcgggcatttcaaaggcttcggacaattccttgcccgtgtcgtcgtaaacgccgccgcccaaatcgtagcgcaagccgtcgtagcggtaaaaagagcaggcaatatccttgattccgaatcccgccacgtcgatattgcccatcgtcgcgctcgcgcggggagtagaaaaccaggccagcccctgcccgatcaacaaaacgatgctaagcaagaaaagagcgcccgaaacgatgaccctcggcagaattttttttatctctttttttgccatatgcttttctctcttttttcttatttcttatcgggacggatcgcttggaagaaagctctttccggcttttcctattaaaaaccggtgaaaggcgcgcccgtcgctttaaggcaattcttcgacggagccgtaagcgcctacgggctttatgtacgtcttatctccgcccgcagcgacacgcgcgtatacggtatctgtggcgattccgtccgccgaggtgctctttatgcgttcaaaacgcacagtcaaaacgatccacgcttccgtgctctgttgaatcacaaatgccgtctgcgaccagacgtacccctcgcttcccaccaaagtgcccgtttcatcattgccgataaagtcgatcgagaagcccttggagccgatattccccgcgttcccgtcctgctgtccctgcacctctatcgcacagacggcaagagatctatcggctgaagcaataaaatagtttcccgcttccattttaaaagtatgcgctacgattcctccgcttgccatcgtccccttacttccgtcctcattatagcaattaggcgtttgaccgcttccaggcaagcaaatggcgtaattaggacatctaaggggatttacattgtaagtctgatcatctaaatgctcattcacctgatcggcgtcatatatccccagataggcatgacttgttgtacctgtacttatggaagtaagataaagcgtaacgttagcagcttcatataacgtaaaatgaatactgttgtctgcatatttatttccgtctggatcttcaattctattatttttaaaagtcgccttgctagcgttaatattataattgcctatttggaaaaaaaatcgtattttctccacattttctattgttcccttattatctcccgataaagcctcatatttcgccgtgatcccaaaatccttgctcgtcttatcaatcggaagtccgcccgaatagatcagcgtatcgacaagagaatcctgaaaatatttgtaagccgcataattctcggttccttccgctttattttgcgcattgaaatactcagaggtaaaatattgtcccgtagaggtgtcaaaagtagctttatataaataacaatttgtttgtaaattattttttcccgcgacttctgtggttgaggagtacccaccggggatagcgtcccatgtcggcttccatttttcttgtattttaccgcttatataatcatccccctcgggatcctgatattctcccgttaaataataaaaggtattataagtgggagcggctgtaccgttaaaacctcgcacacgaaagtcctcgagctgatttacccaattatctccttcgtttgctacatttttcgttactaacgtaaatacccctaaaccattctgtttggttcccttgatcacttgctgtcctttaaaacatacgcctctgtcgccgcccgcacccaccttcgctataacaggcgttccgttagagtctttcaaaacatagggatcaaacacattttccttgtaacttttatcgagcaattgatacgaagttgtagtattgttgatagttatactcgcggcagtatcctctatatccggattacgcatcgtgttaatcatttccgtaaagttcacgacacccgtatttccgctggcaatctccacgtcgaaatatcccgccgcggtgttcaatccttccggcgtaccgtttcctacaagcgaatacgccgaatacgccgtcgtttccgcggaaagaacgccgttcgccacgcctaacttctcaaaagtgaccgtttttgcggcgctttgattgatatagcccaccatcagtcccatatccaccgaagtttgggaagaatcggaggcagaatcggcggacgaatcggaagacgccgcgccgggattttgcgcggacacgtttacagtgagattgagtacgttaaaactcgatacgtcggtgccgtccgctatcgttccgaacaatccgacgtggggaaaatacgtcgtttcaccgttcaaaacggcgtgatccgtcaccgaacaattggcaatggtgattccgtttcccataaaagcatgagaaaattccgtactcggatctgcggtgcttacgccgatcggaggaatgccgccgtaagacgtatataaactcatgtcgatctgctttttcgtcagattggtgtcgagttcttcgttgtcagtgttgttttgatagacgtaatacgcagcggtcgtcggatcggaggaatcggaagatacgccgatcgaatcggaagaagaggtaagcgctctttcccgagtccacggttttcccaattgaaaggtggttttttcggtaaaaatcccgttatctatcaaatacgccaaattatagaaatggacgggtttggtgatgatgaaaatgctatctttcagattgggagtgccgtccgaattagacttgatgacggaatccgcgtcaaaataggattttacgatagaagcgttgaattttgtttccactttgggctttgaaaaccaagccactgaggaagcgatcagcgtcagggcgcatacgggcaacagcgcccaacaaaaaaacgccgttcttatttttttcccgagcgttttatctttgtttttgttttcgtttttcatgccctttcatctcccttttttctgcgacttaccgatgtcggacgagaaacataagcgacgctgctttacgggtaggactttttatatctttttatatctttttattccattatatcacaagtcaactcttt

SEQ ID NO: 4271 - DNA, 30804 bp, Unknown
  16S sequences of unknown bacteria
tttttcatagtctgcgacatagtatctgatgttttttctgcccttttggattatcctgtgcccctctgcttcaagcatctgcttctgagaatcgatgcctcccggatatttaggattaagctcgccgcccgccttgagagttctccagtatggagtcttgtccgtatctctctggtggcttgcccatgcggcaattgatacaaatataccggctgtaattggatctgtgaaatcggcatcgtttgaacgcgcaaagtattctctgatgccacctacagtaataacctttccgaaaggaacttttttcattacctcatcataggctgcgggagccgcacagtacatcctgtttcctccgtatttctgtatggttctttcatctgttactatctgtatcttaggcatatccctgctgtctgcaagcatagcgttgaagtcttttttatcttcctttgccataatgtcattcctccttatatatacacgcagcttatatattcactgtcatgcctatccggtatgcgcgccctgccttttgagagtatgatggatttgtctcctgcatcatttcttatgactctgtaggtttcgccctttctgtccgtaaggctttttcccggtattatatgctcgctgaccataagcggcaggctgccctcgcctttttcaaagctttccagcgaaagcgcagaggctgtaattccaaggtctttaagaagtttgtcggtgtatctgttgtatacgttaagaccatatcctccgtatactgtaattcctctcgatacaaattcctctacccagcacaggtttccaatcattattccggatgtcttaactacatcacatatgctgtcaatattgctttctatatattcatcttctctgccttttgaaacattgctgatgtacggtattacctgatatttctcaccaaatttttcatctatgttttctctgtttttcatatagcctataagcgggagaaatatgctgattctgccgtcatactgctgcagcagccgtgcaaattctctgctttcgatatcttttatgtctgttacatatatgccggtcatctctgttttttcacccgcaggaagctccggcattgagatttcccgctttgctctgcctctgcttttgatttcctcaagtgcttcgagagcctgtcttctcattgcattaattgcagaaaccggcactgaaatgccgccgtcaatacgacactgtatttcggctgcttcaaaaggggtgtttcctgttttgccaagctgttttctgaccgtttcctcgtcaagcggtctgtttacggctttttcgcatacggcatctcctgtgatttcagccttaaaatcgccgtcttctgcaaccagcttcggatagctgccgtactcagcagtgaaagtaaatctcacaggcgcttttttaatataccgtccctcttcaaaggttttgcgaagtactttgagctgaacgctgctgctggttctgtaaacatctgcccccctgcttacatatcctttaaaatctccgatatcaagcttgcctctgcctgcttctttaatatatgtgactatatttccggtaatgtttttatcgtggatttcaatgccgtcaccgtttgatatatcctcatttgtctttatcctgactatctgtccgttcttttcaagaaccctgcctatatagactcccctgtgtttaggaatatctcccgaaagaaaatccctgcccgggtttttatcaagatagccttgtgtaaatccgcctctgttaaatatctgctcaagagctctgcggtcagcctcatctacggctatgcctcctgtttcatagtacatattgagatatttcctgtatacagatgttacctgcgcaacatactctgcggatttcattctgccctctattttaaaggagctgactcctgcctctgcaaattcacccagcctgtcaacagtgcacatatccttaggactcagatgatagccctctctgccgtcaaggctgtaagcaagtctgcatggctgggcgcaaagtcctctgttgccgcttctgccgcctattgttctgctcatctggcactgccccgaatagcagaagcacatagccccgtgaacaaatatctctatgtctgtgccagttgctgtcgcctgccttatttcctcaagtgacagctctcttgccggcaccactctctcatatccgagctctgcggcttttttaattcctctgacattatatatgcttgcctgcgttgaaaggtgcagcgggaagtccggcagatccgctctgacaatgctgccaaagcccagatcctgtattataagggcgtctgcgcccatttcataaagctgcccggcatattcaagccccgcttcaagttcctcgtctttaaacagagtattgaccgtaatatataccttaacatttctgatgtgagcatattctatgccctgcttcatctcctctgctgtaaagttgtctgcatttatgcgggcattgaagctgtgtccgcccatatataccgcgtctgcgccgttttcgactgctgcaataagctgcttcatacctcctgccggggcaagaagctcacattttgttttcatttcgggctcctcttgtaaatatttcttctttgtaagtacatactaacaattatatagggaggctgctgttatgtcaaaactaaaggaaattataaaagatgaaaatttcataaggctcaccatttttgtatcctttaatgctctgctcctgtatattctgttttttgccgtaaagaacatagggaaagccgcctccctgcttcttaccgctctgtctgcgctgctgcacgccctgacgcctgtaattatagggattgtgcttgcatatatactggcgccgcttgttgaatgggtttcctcatatattcatttttcttcttccgacgatattatcaccgatgaaaagctgcgaaaaagagaaaggtatcttggtacggcaatttcattcatactcattaccgccgctttgtccgctgttgttttcggtcttgtgtttcttatttccggcagcatcagaagtatggatataaacgctgtgatagcccggcttgatgagaagctgaagctgtggattgattttctgccgggaaactttatttatgacaactggataaggttttattcaaaagcggaaaatatgctttcagatattgatgctgcttcgcttacaaggagctttctcgatgcgtttctcggagttatagcctctgtctatctgcttgccgacaggaattttttcatacgcctgtgccgcaagctgcttcatataactctgcctcagcgggcctgcgccgtaactttagacatactgcacgaaataaacggtattatttcaagttttttgagaggcatatttatcgacagcctgctggtggctctgctttcggccgccgcgctttctgttgcaggcattgactttgccgtatttataggtctgcttgcaggcgtattcaatgtaattccgtatttcgggccgctgctgggtatgatacccgcatttatctccggtattgtttcgggggatattatgaaaggcatactcgccgttataatactgtttgcggtgcagcagcttgactccaacttcatatatccaaaggtagtgggaaaatcaacgggattaaagcccctgtttgtccttgcggctgtctccgcgggaggatattttgcgggcattgccggcatgatactttctgtccccgcagcgggaataatcagtctgtttgttacaagatgggcaataaaaaaagaaaagcctgccgggaaagcagactcctcgtaaaaatctgttgtgttatgaattaagccatttgaccatgcctgcgcccattgtatcgttaggtcttgccgtaaagccgaactttgcataaaagccttcatttcccgatgtggccataaggtttatcataatgcagcttccgtcctttgcacgctcttcaaaccatttgtttatctctgtaagcatgtgcctgcctatgcctgatttctgatattcgggcagcaccattacatcggctataagatacatatatccgccatcgccgataatccttgctgttcctatggctttgtctccgtcataggctgcaataacatactctgaattatcaagtcctctctgcgcctgctccaggtcaagcatcttccagcccaccgctcctctcatttcgttgtattcctttacatctatctgattgctgtatgttatcataatttcctccgtttcctgcctgcaattcatatgctttatttactgctcattgagccttaagtccaatagtaattcttccaatatcaattataggtttcaaaagtatgtgtgtcaatgccagcatttacagaaaaaagcaggtgatttcctgccttttctccgttttaacgtcgttttaatatatgtattaaggagttggtttgcgagaaccggggctctgaatatcaaagccccgccccgtctaaggatcatgcgctcgtcatagtataacgaggaaatgtgaattgcatatctattcaagcctgtacgcttcttcgtgatgaagtgcgtggtcaagcccttcaagctcttcctgttcacttaccctcacaggggtgaacttatttataactttaagtattacaaaggtaacaacgaatgcgtatgcgcctgcaaatgccgtcgctcccagctgaatgaaaaactgcgtaacgtttccctcaacaagtccgctgacgccgtttacctccgatactgcaagcacgcctatcattactgcgccaagcataccgcctacaccgtgaacgccccatacatcaagagcatcgtcccagttcagtttttttctgagaagcactgcgaaatagcatatcacgcctgccataatacccagtataaacgctccccacggtttgatgtagcctgccgccggagttatagttgcaagtcctgcaaccgctcctgtaagcgcgcctacaaagcttgggtttttatctcttatccacgagattacaagccatgtaaccatagccacagaggccgtaatatcagtgtttacaaatgcggtggaagcaagtcccgtagcacccatggctccacctgcgttgaaaccgaaccagccaaaccacaaaagtcctgtgccaagcgctacataggttatgttgtgaggctccactgccgaagcactcatgtcctttctcttgcctactacaaatactgatgccagcgctgcaagtcccgcgcttgcgtgaactacaataccgcctgcaaagtcagcagcgccaagctgtgccaggaagccgccgccccatacccagtgagcaagaggtacatataccagcaggctccatattacaaggaatatcaggtaactcttgaagtttaccctgtctgcaaacgccccggttataagggcgggagtaataatcgcaaacatctgctgataactgaaaaatgtaagaaacggtacggtatctccgtatacggcatcgggctccattcccacacagtcgagaaaagcatatttaaggcttcctataataccgtgaatatcaggtccgaatgccagtgagaaacctataacaaaccatatgatagtaacaacgcccattgatatgaacgactgcatcattattgttataacgtttttacgtcctacaagtccgccgtagaaaaatgcaagacccggagtcatcagacatactaacgctgcacaaattattacaaaagaagtattaccagtatctatcatatttctcacttcctttctaactaaagtatagaaaaaaagagccttattgaaaatacaataaaacccttaatcttacggggaaaatcccttaaacttcaattatatgatttctgaccgcataaagcaccagctccgtcacattcttaaaattatgcttgcgcataatatttgccctgtgggtttccaccgtctttaccgaaatagaaagaaaatccgcaatttccctgttgctgtagccctccgcaagaagctttaatatttctctttctctgcccgaaagctctctgctctgtctttcgttttcgagaaatcccgaaagcagcatcggtgaaagcacagaggatatgtagattttgccgttcataacggtgcggattgcctgcaccagctcttcaaaggcgttctccttgagcacatagcctgaggctcccgtattgaacgcctctgcaaccatttcctcatttttgtgcatagtcagaaatatcactctgatatttttaaactcagacaggatttcctttgcagcctcaaagcctcccttgcggggcattgatatatccataagcactatatcggtttcgcctctgatatcatatatgctgcggcaaagctggatgccgtctgccgcctgtcccgttatttcaaagtcctcttcctgtgagagcagcataatcagcgactctctgagcatcttatgatcatcggcaagaaaaatcctgattttttcgttcatcgcaaggcacctccgcaactactcttgttccctctccaactgtactgtatacagtaaacctgccgcccagcattctgatacggtcacccatggacggtatacccataccaaactgcttatcactgacgtgaaagcctttgccgttatcctttatttcaaatatgcaccggctgccctcatacttaatatcaatatctatatccgaagcattaccgtgctttacggcattgctgcatgcctcctgaacaactctgtagatattgagagctgccgtatcttcaaatgcaggcatatctcctgccgcaaaaactctgcatgtaacgccctctattctgtttataccctctgccatagccctgagagcactttccagcccctgctcgagtctgggcgggttaaggctgtttaatacagctctcatttcctgtatggtttcatctgccatatgtatggcattgtctatgatttcttcattgtgctgtctgcctctggcaattcccagcgtcactttgagggctgcaagggattgtcccactccgtcatgaagctctcgccgtattttgtccttttcctgctcctccgttacggcaagcagtctggcctgcttgcgcagaagcctgtttttttcgtttatctgtgtttcgtagcctgatttctccatatatttttcccatgaatatatgtcctcaaattccgtaatgttaaggcccttttcttcggcttcaggcgacactctgatgtctcctgccctgtctataatgcggaacataatatacgctatgccgaaagcccatatgaagtttaccaaaatgccaagacactgtattccaagctgctctattctgctgcccgcctctataaaatgctgctccataaaaagcggcataagcagaagccccgaaacggcgcccgccgcatgaacaggtacagcatctaccgcatcatcaattccgagctttatcagcagatagtggactgccgctacaaacactcccgttatgaatgtaagcgccgcagctcccgcaggactgcaatagtacgaacaggccgttgcagccacaaggcctccgagaattccgtcaaatatgaatacaagataattgccttttttgcctgcaataatatgatatgccagcgcccccgccataccgcaggctgcgcccagagtcatattgagcaccataagtcccgctcttgacgaaagctctgtcagactgccgccgttaaagccaagccagccaaaccagagaataaatactcccagaactgcaaaaggtatatttgacctggcaggtcccgtatcctttcgcctgccggctgtgattattccggcaagggctataaagcctcctgtaagatgaacaaccgaggctcccgcaaagtccataaaacccagcttctcaagccagccggaagttcccgtaaccatactgccccatgcccagtgaccgaataccgggtatattaccactgcacttacggcagctcctgcaagaagcgccgaaagtctgcttcgttcagacatggcaccgccgaaaatagttatagaggctgctgcaaacatagtctgcataaacgcatagctgtatgcggcatcgcctgccgcatcaagtcccgaaagaccaataaagcctgtgcctatcagtccgtgaaaggactctccgaacataaatccgaagccgaatatgcagtaaagcactgtcacaatcataaaggtaagcaggttttctattgccaccgatattatatttttgctgcggataaagccaacctcatagcaggtaaagcctgcctgcatgaagaatataaaggctccgcacataagtatccacgaaatgctcatattcataataattctccatatcaatgcatagattatataccctatcgcctgttgtttgcaagacttctcttaaatacaaacaagcctgctgaattgaaatactcaatacagcagacccatttgttcagttatcgttacactattgaaaatttcatcatatcgctatcatcaatatcgctatatgacatacggcacaaatccgccctcatcaagcagccatattctatcaaagccgcactgctttgcaaggtatacagcctcctcatagccgcaggcaatgccggaagtatcgtgagcatcacttgtcaccgtaattcttccctcaagcttcctcagttcatacagcagattttcaggcggataaggcacggttctatagcccctgcttatagcccccgtatttatttcaaatatcatattagctgctgcaagctttcgcatagcgaaaagcgacgcgtccatatagtccgcttctctgaatatgtcccctttttcgttaaactttgatattaaatcgaaatgcccgactatatcggcatttttaatcctgccgacctcttcaaaatacgcctcagccacagccttggaatttccctcaaagtgcttgtcaattgccgcctcaagtatctgcctgctttcatcaagacttatatattctcctccggcatacagattgtgaacagagcctatgatatagtcatagctgtaatcggtaatttcagagtacaaatcaagctcaagcccctcatatattctgatttcaggatacagctttctgagcctttttatctccctgtgatactgcttctccgcttccggagacatagtccagtcagcgccgaaaggaagccagctgtgccccgaaaaccccatggactcaaggcccgcctctattcctgcgcgcaccatttcctccatagtgttcctgccgtcatcgaggacagtatgaatgtgaaggctctgtttcatcattttatcattttctcctgctttaccttggtgtctatgacatgtcttgatgccatttccttttgaatatcatctacagtaatattcatctggcacatcagcaccattacgtgatacattaaatcccctatttcataaaccgtattgtctttgtcattatcctttgccgaaatgatgacctctgtggactcctcgcccaccttttttaaaatcttgtcaagccccttttcaaacaggtatgtggtatatgagccctctttgggattttccctgcgaccctttatcatatccataagtccctcatatgaaaacggtactttttcctcgtctttaaacagcggatattcaaagcaggagtctgtacccagatgacaggcaggcccgtcctttaatacctcaattacaagagcatccctgtcgcagtctgccgtaatcgacactatgtgctgatagttccccgaggtttcacccttaagccaaagctcctctcttgatctgctgtaaaagcaggtcagctttttttccattgaaatctcaagactttccctgttcatatatgcaagtgtcagcacttttttagtaaccgcatctgtcacaacggcaggtataaggccgtttttgtcaaatttaagttccgatatatcaatcatttttgtcatctccttacgttaattccctggcctgcaaggtattctttaagttcatctatccttacctctccgaagtgaaatattgaagcggcaagccccgcgtcaacctttggaagctctctgaaaagcactgcaaagtcctccatatcgcctgctccgcctgatgctattacaggtatgcttacagcatctgatacagcttcgagcatttcaaggtcaaagccttttttgactccgtctgtatctatcgagtttaaaacaagctctcccgcgccgtttttttcgcactccactgcccattcaatcaggtcttttccggtgctctctctgccgccttttgcatatactttaaatgctccgttttctcttttggcatctattgatattactacgcactggtttccgtatttttcggcagcctcggctatgagtcccggatttttcagggctcccgaattgacgctgaccttgtctgctccgcattttaacactctgtcaaaatcctctattgtatttataccgcctcccactgtaagtggtatgaatatctgagatgctgtttccctcagtatatccgtaaacagcgctctgtcctccgcagatgccgtaatatcataaaacaccagctcgtctgcgccgttttcgctgtaataccgcgccaactccacagggtccgacacatcgtttaacccctcaaaattgacgccctttaccactctgccgtttcttacatcaagacacggtataattctctttgttatcatctgactacctctattgcttcccttaaattcactgctcccgtatagtacgccttgcctattattgctccgtacattccaagttcttttacagctctgatgctgtcaatatcagaaattcctccggaggcgattatatctatgctgtactttctcgaaaggcttttgtaaagcgatacgttggtacctgccattgcgccgtcctttgaaatgtctgtgcatatgacggtttttactcccgcctgctgcagcctgtcaaacatctcctctgccgtaatactgcttgtttctctccagccctttatggctgcatatccgtctcttatatcaatgcccgcggctattttttctccatattctgaaatcatctctgcaagaaatacggggtctgtaaccgctgcggttccaagaattactcgcaaagctcccgcctctatatattttctcacagcgaacttatctctgatgccgcctccgacctcagccttaagtccgcttactgctataatctcttttattgtttcaaaattaggtgtgccgccgtcccttgccccctcaaggtcaacaaggtgtatgtattctgctcccgcctccctgaacttcattgcaacctcgacaggattttcgctgtagacggtcatctctttgtaatcacctttgtagagccttactgcctttttttcatataagtcgattgccggtaatatatacatatttcctcctatagctcactaaatgctttcagtatcgcaagtcccgttttgccgcttttttcggggtgaaactgacagcccagtacattcccttctgccactgccgccgtaatttcagctccgtattctgtcaccgccgttacagcctcgtcacattccgccgcataaaagctgtgaacaaaatatacgaactcaccctcgtttacatacttgaaaagaggacttgtttttctgaatttcagcaggttccagcctatgtgaggaaccttaagctctgccggtaatacaggtctcatatccttaacggcgccttttatcaggccaagtccctcatgctccccgtattcatagcttttttcaaagagaagctgcatgccaaggcatatgcccattatatatttgcctgactccgcaagccgtatgacctctctgtcaagtcccgaggctctcagctttgccgcagcatcgccaaaggctccgactcccggcagaattattttatctgctttttcaagctcacctgcatctgatgttacaaccgcttcctctcctatcatcgctatggagcttttgagagaaaacagattgcctactccgtaatccactatacctatcatttatatgactcccttcgttgacggtatttcatcctttcgtttttcgtctatgccgcatgccttagccaggcatcttgcaaaggctttgaatatgccctccgctatatgatgcgaattggctcccgaaagcttccgtatatgaagcgttatgccgctgcttcttgtaaaggcttcaaagaattcctgtacaagctccgtatcgaagcttccgattttttctgtaggaaagtccgcatcaaacacaagacagcttctgcctgaaacatcacaggcgcagagtataagcgcctcgtccataggcaaaattatatctccgtatctgctgatgcctcttttatctccgagagcctctctgagcgcgctgccaagcactattcctatgtcctcacaactgtggtgatcgtccacatatgtatcgcctgtgcaagaaacctcaaggttaaagcccgaatgttttgcaaacagtgtgagcatatgatcaagaaatcctattcctgaagatatttccgaggtaccgcttccgtcaatatcaagtgaaagcttaatctgtgtttccgatgtctttctttccaataccgcactacgcatttaatatcctttccgcagcggaaaccagggcttccatctgctcttttgcccctattgtaatacgcacataatcgctgattttaccgccgctgaaatggcgtacaagtattccctgttttttaagctctgcgtacagcctttctcccgatatgcggctgcttcttgccagtatgaaattggcctgcgaggaaactgtttcaaatcccatcctcctcagactttcctccgtaaagcttctgttttctataactgtgccgcagttcttcatatatatgtcgttgcgctctattgccgcaatgcctgccgcctgggccacagtacctacattgtaggggtttatcgaatatctgacggtattcatatcagctgttatttcactgcatgcaaaggcaaatcctagccttgcccctgccatggacctcgactttgaaaaggtctgggtcaccagcaggttatcgtatttcttaacaagaggcacgcagctttgcccgccgaagtctatatatgcctcatcgacaattacaagtctgtttctgtccgccgccacgagcttttctatctcgcataccggcacatatcttcctgtctgcgcattgggatttgcgattatgaggcagcccttttcgttcatatagtctgatgtatcaagtctgaaattctctctcagaggcactgtctttttttctgctcccgtaagctctgcaaacaccttgtaaaagccgtaggttatatcgggaaatactgctctttctataaaggctgtaaaggcaagatacagaatttcatcggagccgttgccgcacagtatgttttccttgtccacatcgtaaagctccgccgccttttctcttaatctgctgcactccggatcgttatacacattaaatcccgccgcagcctcttttgcctttgatattacatattcatcgggaggaaaagggctttcatttgtattaagtttaatatattttttatcctgaggctgctctccgggagtgtaggcctcaaggctttcaagtctttttttcaaaaatctgctcatcttatttattcaaaccttacttttatacttctgccgtgaccctcaagcccctctgcctgcgcaaaggtgcatatgtcgtctttcagctcctcaagggccgatttttcaaaatatgaaaactgtattttcttgatgaaatcatctaccgacagagggcttgagaatttggctctgccgcctgtaggcagggtgtggttcggtcccgcaacataatccccaagagcctcaggacagtttcttcctaagaataccgagcctgcattttcaattctgtcaagatagtcaaacggattatccacatctatttcaaggtgttcaggcgcaagctcgttggcaagctctactgccatatcaagattttccgcaattattattctgccgttgtttctgattgacgcctctgcaatttcttttctaggcaggctttcaagctgcttttctatttcgcctgctaccttttcggcaagctctctgctgtctgtaatcataactgccgaggcaagtctgtcgtgctctgcctgacttaacatatccgccgccgcataagcaggatttgtatttttatccgcaattacaagcacctcgcttggtcctgcaatggtgtctatatcaacaatgccgaatacctgacgctttgcctctgcaacataggcgtttccaggtcctgtgattttgtataccttaggaattgtttccgtaccgtatgcaagagctgctattccctgagctcctcctgctctgaacactctgtcaacgcctgcaatcttagctgccgcaagtattaccggacttatatctccgtcacatgcaggaggcgataccattacgatttccctgcatcctgcaatctttgccggtatgcagttcataaggactgttgacggatagcttgcagtgcctcccggaatatatattcccaccttttcaataggtgtcactttttgtcccataacaacgccgcccgctttctctattttaaagccctctctaagctgctttgagtgaaattctctgatgtttgcagccgctttttccattgttttaataagggagctgtcaaccctgttaaatgcagcctccatttctgcggcagtaacctctaaattctccggagctttgccgtcaaacagctcgcagtattttttgagggttttgtccccgcccattttaacgctgtagattatatcctttacaacatcggttatattaagttcctcttcttttctcataaaaagattttttctgtcaaggtctttgtaatcaactatattaatcatcgctttttcctttcttatcccacgttctcagacagattttcgcacattctgtttatctgagagttcttgaatttgtatgataccttattggctatgaggcgggcgcttatgggcgctatcacctccagcggcgcaagtccgttttctttaagtgtcgtacctgtttcaacaatatcgacaataacatctgaaagccccagtatgggtgccagctctattgagccgttaagctttataacgtctatgcatctgctttgctcaccgtaatatttgcctgcaatatgaggaaattttgtagccactctcagagctcttgagcagtcgtctttgaaatccgcaggccccgcaacgcacattctgcatttgcctacatttaaatccataagctcgtatacatcaggctcgtattcgcttaatatatccttgcctgcaatacctatatctgctgcgcctctttcgacatatatggccacgtccgagggcttgacccagaagtatctgactcccgcctgtttattctcaaatgtaagctttctgttttcttccctaagttcgctgcattcgtagcctgatttttcaaatatgctgtataccttttctccgagtctgcccttaggcagcgccacattaattatctgctccaatttcaatcacctcttttgtccttgcacctctgtttttctgtactctcaccgatttgcccgctgcaatgcagcttcctgctgcttcgattatctttttcatatcgctgccctcgctgtaggttatgaggacgtccgcatcatatctgtccgtttttgcttcaagattttcaagctggttaagatatacggcaaatcctatggctccggattttttgcccattctgcgcataaggttgtcatatctgcctcccgaaagcacgctctctgctattcctgcaatgaagcccttgaagaatatgccgttgtagtaatccgtatcgcatatgatagaaaaatcaagatatatgtttttatcaattccatacagcttcagtacatcgcacaattcttcaagttctgtaacagcttccctgcactcctttggaagctccatatttttaagcctttctatgcctgtacctataggctcatacagtctgataagctgctcaagaagctgctttttctcctgcggcagtctgtctttttcacagattttttcaagcatcggagcatttttttcgctcatggcctttagtattgcatccgctgtttcatcgtctgtgccctccagtatgcctgccgtaatccctatatgtgaaatgtccagtatatattcactgctgaccgactcaaggcttgatgccgccagcattataacctcgcctgtcgcatatctgtctatatctcctatacattcaagtccgctctgcattatctccttaaatccgctgccgctgcgtgggactctgtatacgttttccttgtaatatatttttttcataccctcatcgtctttggtattcttgacgattgacagggtaacgtccggtttcagtgccatcagcctgccgtcagcatcgttaaaggtgagtatctgtcctcccgaaaggaaattcctgtttcgtgcgtagaggtcgtattcctcaaatctgctaaccttgtagtatgaatatccgtagctttcgtaaagctctgcaagctgtgatataacggtttcttctcttcccattgctgcctccttgttttattacgttatcactttatcacatcatcacgctaaagtcaacagataaaataaaaaaagtgaaaatgtacaaaattgaaattcctatttccatatatcgcacgcaaggtgcgataacattcaaggtgctttctataaaacatacggaaatatctgcaaaccgatatttcctatgtatataaaaaaggccgaaaaaacagccttactcaaaatataattttcacttgtatgttatccgccgttacggcattataacctcaattcccgccgcctcgaatttttctttttcttcaggtgcaagccggctgtcacaaagaagtgtatcaatttcttcaacgccgcagactctcatacacgacgttttgccgactttggttgaatctgccgcaaccacaatgcgctctgaaattgacatcatttttctgaatgtgtcaatctgattgagcctgaaatcgcttatgcctttttcaaatgaaatgctgtttaccgccagcagacacacatcggcattgtactgccctatttcttcctcgcactgctcgccgtaaagcgcgtgctctccggcatcgtaaagacctcctgttacaataatattaaatctctccttgtgggaaaaaatcttcacaatatcaagatcattggttataaccgtaagccttttgtaatttgccgcaatatactttgcaatctcaacggtggtgctgccgcttcccatcacaacagtctgaccttcggccagcactctgtctgcaatgcctgcaatttcttcttttttttcggtattgacggtcactctgacttcatagatattgcgggtgttgtttgcgtctttccatacagccccgccccttactctttcgagtatgccgtagccctcgaggacttcaaggtcacgtcttacagtatcgaccgatactttgtttatcttggcaagctcgtttacctttgccatcttatttatttttaaaagttctattatatttcctgattatctctatgccctgcttcctgtattttctgactatgctctcatctatacccgaatcggtaataacatagtctatacgctcaagcgggcatacattaatgcacgaaatcctctcaaacttgctgtgatctgcaattacagcggattttctggcgcttttaatcatcgcatttataatgccgctttcttctatacgaaaatccgtaatgcctttttcaagagatatgccgtttaccgcaattactgacaaatccacattatataaagacatatcgttttcactctgcctgccggttacggtattttctttttcataatatatgccgccggtcagaataacctgaaagtcttctttttcgcgcagtacatcgactacattgagattgttggtaattacagtaagactgctgtaattttccgcaagaaatctggcagcttcaacagtcgtcgtgcctccgttaagcgatacggcatatccgttttgaacaagctcgcccagacattttacgagttcctgtttttcttctctgttgatgatatctctggcttcggaaaaggctctcgtaaggtcgcttttttcccataccgcgccgcctcttacaagcttggcggcttttcttcgctcaagctctgccagatcctttcgtacagtaacctctgaaacctcaagcatttcggccagttctttaaagctgccgcgctcatttgccctcagatattctattaattttaaaagtcgttcttcctgcagcattgcatttctccacaatatattttatcttctgttctgaatattatatcttttttacggccaaaattaaagttctatgagatttatacatacaaacagataatccgaacataaactgcccggattatctgcttgcgtgttattaaattttatctgataaacatctgtacccagtatgtgacgccagatgaatccttgcagaaacctactccgatctgctcataagaagcatttaaaatatttgctctgtgtccggaagaattcatccatccgttcataaccgcagcaggtgttttctgtccttttgctatgttttctcctgctgatttgtaggttatgccaaatgttttcatcatttcaaaagggctgccgtatgtaggagatgtatgtgaaaaatatccgtttttcatcatatcctccgcttttgcctgtgccgcttccgatagtctgctgttttcagtaagagcagacaggcctgctgcatttctttcttcgtttacgagtttaattacttcctgcgcatttgctgacagattgctgctttgtgatggtgtgtctgtgcttcctgtgtttccgttctgattattgtttcctgtattgcatctgttgtttgaacagcctgtcttatctctgatactgacaagtgctctggtgcagtccttactgcatactattgttgatattttgcataattttgtgttttcaccgcagactgatgctccgaatcccggcactgccacaacaaggattatacataccgctgccgctaatgaaatcagtttatgtttcataaaacctcctctcctgctttataaagcttaattaaattgtaatacaatttgccgcagatttcactgcacaatatatgggagagaaaggttacagtttatggacattaaaaaccacagccgttattctgcgctgtggttttcatactatatatcatcgtcatattcaatctctacatctatgtctttttcggtatccttttcaagtcttgcggcttctgcctctgccgactgttttccaaggcttaccgcctgcctgtaccagaaaaccgctatatcgggactgtactccggactgtttttgtcctcataaattctgccaagggcttccgcagcgtcagcgcttccgagacctgcggcttttctgtacatctgcataagctcttcgatatcgccgcctgttttctcaagcagacctgcatatccgattataccgtcaagattgtctgcttccgccgccagcttaaagcagtacaaagcctgctcaatacttccctcgtctttgtatataccgcctattgcaactatagaatcggtattgccgctgtttgctccctgtttgaagtacagcttcgcctttgctgtattctgcgcaactccgataccgttcatatatactctgcccatatggtaaaaggcttccggctctcctgcttttgcggcaagcatatacagcttaaccgcactctgaaagtcctgctccatcaggattccctcttcaatcagatttcccagctctgtaagctttgcagcccgctctacagatatattttcatttattcttaaggttatttccatctgctgcctcctgtatatcattttaccgttaagacgtatttactgtacttctgtatgattctctccgccgccttaatgccgtctaccgcagcagaggtaatgcctcctgcatatcctgcgccctcacctgcgggataaagtcctctgacatccgactgcatactgtcgtcccgcagaattcttacaggtgaagagcttcttgtttccaccgctttcataacagtgtcatcgcagtcaaagcctttgagttttctgcctaaagcaggcatagcctcaagatatgcctctgtcacaaagtcaggcagacattttgcaactttattgaggttttctgaatttcctgccgccgccgacacagcatcctctctgaagcgcccccacgttgtctgcacaggagcatatcccccgccgaattcaaaggcaagcctctcgtatttttcctgaaatctcactcctgcaagaacgtcatctccgtcaaaatcatcggttctgacgtctaccagaagtgcgctgttggcgtattttccgtcacgagccgcataactcataccgtttgtaaccgtcataccctccgacgaggccgccgcaacaacctcaccgcccggacacatgcagaaagtgtatacacctctgccgttttggcatctgtatgccagcttgtagtcggcagcaggaagtctgtccgcaaagcttccgtactgactttcatttatcatactttgcagatgttcaaccctgacccctatggaaaacggtttctgctccataggtatgcctctgccgttcataaccgcaaaggtatcccttgcgctgtgtcccggcgccgctataactgtctgtgtattaattatttcatcgccgttaacctctactcccgcaagtctaccctgcgggtctgttatgaagtccgtcactctgctttcaaagcgtatctcaccgccaagggaaattattttgtttcttatatttacaacaacctccctgagcacatcggttcctatgtgcggctttgccttatacagtatttcaggctgtgctcctgcggcgacaaactcctcaagcacttttttaattctgaaatctttgatgccggttgtaagcttgccgtctgaaaaggtacctgctccgccctctccgaactgcacatttgactccgtatcaagaatgccgtccttccagaacctgtccacatcagctgtacgcctttccatctccttgcctctctcaagaataagagggctgtagcctgcctctgcaagaataagggcggcaaacataccgcagggtccaaacccgattataacgggcctgtgtaaaagttcctctgctccctgctccggcagctcatatttaaactctgacacttctttgagtttcagcttcctgtcacattcaaaatcaactgtatatacaagccgtatgtcctttttattcctggcatctagggattctctgactatcttccactctttaatatttacggaatatttcttttcaagctttgtctttaaaagctcttttggctgaccgggtttcagttttatctgcgtttctctatacattgtcccatcgcctttcctgctgcaagtcccgtagtccacgcattatacagattatagcctccgcacggaccgtcgtagtcaagaacctcgcctgaaaaatacaaaccgggcacaagttttgactccatagtctcagggtccacctcatcaagcgaaacgcctcctgccgtacactgcgcatatttccagcctttagcccctgtcacctgcaaactccagttctgatatatcctgcttatcttcttgagttcctcatctgtaagctcagacggctgtttattaaggtcaattcccgcatcagtcaatactcttttggctataggctttcgaagcagtgacatatatatatcctcagtcttaattccctcaaactctctgagctccttgagcacccatatcatctgctgtcttgccatttccgggttgaaatttatctttaccgtatattctctgaaagctgcctcaaggcctttggacatatccagctttatgagtctgcttaaattcataacacatattcccgaaattccctcggctgtaaactgtatctcacctctctcggaggctattttttctccgtttcgatacagagtcacctctccctcggctctgcatcctttcatttcctcaaagtcaccctcacagtttattgcagtaagcaccggcataagtgtcttgatggtatgtcccagctttttggcaaatatgtagccgtcacctgtggttccaaaagcaggcgccgctttgcctcccgaagctatcaggagttttttgcacacatagacatcatcgtttgacgttatgagcttgaaaccgccgtttttgagccttttgacatctgtaaccgctgtgtttaatatgggtttaatgcctgcaccaagaaacgtggtcttaattgagcttacaaccgatgacgactgctttgtatacggatacagtctgccctcttcctcttcaaccgtaaatatacctatcgttttgaaaaaaagcagcagccgttcaataccctcacaggatgagttggctatattgcatctgccgtttcccgaagctattacctttcgcagtattttgtttcctttttctatgaggcacagattcagcatacgattttgtcttttggcgtttatagccgccagacatcccgatgctcccgcgccgattacacatatatcaaattcctttatttcagacataatttcacctttaaactatcaggaccgtaagaataaacttacggtccgccctgctctatttaattgattttgcgtgaggcatatgaaatccgatttccagcgtggttacagcctggattatgaagaatataccaagcagctctcccacagccatattcagagcgattgaattgaagaaaccgagtaaccccgcaagtatacatacaagtcctgtgccgaaagtccaccagaagtttgatttctttttggttctgtcgatattaagcactattaccagtctgagtatacctgaaaacagcatccacattccgaatacataaggaaccgcaacctctgcggcaagctgcccgctgagcaccagaatacctaaaacaaaggtcactatgctgtctgcgagcatccatatgttattgtcctgtcggttgccgcctcttgaatatatatatgtcatgccctcgacagtaccgtctgctatcataacaagtcctattgcaaatgccagcgccagaaatgatactcccgagttggcaaaggaccatacgcccgtacccatcaaaagaattcccattactattgtaattgctctcatattacatttcctccaaactaattattttattatactatattttcacgcatatttccagcagaagagaaaaatagagagtcgttatttaaaaagttaatatataatggaaaaaacaagtttaactataactgctacaaatactatcattattaattgaatccaaatcgttgctttcggaagttcaaacatgctgaaagctttcctatcgtaggctacaacaagaggtgcatctaacggaaataaatatatgtttggtatacaaagtatacataccataaacagaattctaggatcaagccccagctttattgaaaaaacagatattattggaacaagaattgttgctactgcaggagctgacggaataatcgccataaatataaatgttatagcagcaaccaccatcaacaatactaagattggcatctctgttattctgtcaaaaaacaagcctgccacataatcacagagtcctgtatctatagctacggctgcaagagtaatatgatttcctgcaataaaaaaggcattccaactatttgcaaccgtaaattcctcccattcgagaactgggaatacaggaaaaaaaagcaaagcaaaacagacaatcgcaacaacagtaatattaattgcaggcacccaggaacttaatatccatacaaaaagtgttgttattatcagaccccaatatatatatcctttacagacattttctgtgaattattaatataaccaatatactcattgagcacttcttccgataaatccactttcttattcattccaattgctgtaaggacaccaatttcgaactgggtttaaacagaaagtattaccgaccgaaagacctgaatgcaatatgtaggaaaaaaatttaaaaactttttaagaaacagttctgatacaacattttcaaaaatcacgaaagaggcataaacattgatatttcaatgttaaacgcctcttttttattctgaaactgtcgaactcgggattatacatcatatgtttttaatattcaattcccatttgtttaaggataacatccagttattgcaggatctttgaatgacatagattacaaagcatatatcttatatatcaccccgtaaataatgacttaagactaccggtatcgttcacttttaactacttcagtcacggttttaacttctttcacacaatatacagcatacattcagaccaatataccatctttaatagcttttataaatataaatgtatactgaaagctaaccatataaaaaatagtcctcaaaaatgaaaagatatattgcaaatgatttgatagatgaatcaatttcaatatactagataaaagagatttgaaattttccacaaaaggcagaattttgagtttttccaggctttttatacatactattttgcaacttctttacttataactttgctaatttcaatatatgttttctgaaaatttagacttttatcttacatctaaagaattcattgactgtacacagccaaagtgatatattgaagttggttatatagttcttagttttaacaaattaaaataaaaggagaaaacaaaatgtcaaactatgtagaaagatgtattgagctttgtaagcagaagaaccctggcgaacttgaatttcaccagactgtagaagaagtactttcttcactgactccggttatcgaacagcatccggaatacgaagaagctgcacttcttgaaagattaactgaacctgaaagaggagttactttcagagtagtatgggttgacgatgctggtaaagtacaggttaacaaaggctacagatatcagttcaacagtgcaatcggaccttacaaaggcggtttaagatttgcacctaacgtataccctggaatcatcaagttcttaggatttgaacagatcttcaagaacagcttaactggtcttcctatcggcggcggcaaaggcggttcagactttgaccctaacggtaaatcagacgcagaagtaatgagattctgccaggcattcatgactgaattatacagacacatcggacctaacactgacgttcctgctggtgaccttggtgttggcggaagagaaatcggatacctcttcggacagtacaagagaatcgttgacagatacgaaggcgttcttacaggtaagggaattcctttcggcggacttcttggaagaagcgaagctacaggctttggtatcgtatggtacgcagaagaaatgttaaaggctaacggcgaagaaatgaaagacaaggttgttggtatttcaggattcggtaacgtagcttggggtgctgcttggaaattacagcagttaggcgctaagtgtgtaactatttcaggacctgacggatatatctatgacccagaaggcatcagcactgacgaaaaggttgcattccttcttgaactgagaagctcaggaaagaacatctgcgctccttacgcagaaaaattcccagaagctaaattcgttgcaggcaagaagccttggggcgtatgccaggatttcggtatcaaagttgatatgttcatcccttgcgctatgcagaacgacgtacatatggcagacgcagaaaacatcgtagcatcaggctgcaagttctactgcgaaggcgctaacatgcctacaactaacgaagctctcgtttaccttatggacaagatgacagctgttggacctgctaaggcagctaacgctggcggagttgcttgctcatgcatcgaaatgggacagaacgctggtcacactgtatatcagcacgaagacgtttatgctcagttacaccagattatgaagaacatctacaatgcttgtgcaggcgctggcgaaaagtactatggcgacaagaacgctctggtacagggtgctaacattgcaggtttcgaaaaggttgctgaagctatgatggctcagggtttagtataatctagagactctacataattaagctatatatgatgccccgcattgcggggcatttttaatgttgaatttacacttcatttacgcaaaaaaattatactttgcacttttttggagttatactttgcacttttttgcaatccatagcatcagaaataaaaaggctcgtaattacacctagttcgcttacaggcgacaagaaaaataggcgcctcataaagaagcaccctgtttgttattctgctaacttgtttaacctatctcctgctattctgtataccgtccagtcaattacaggctatgctgcataacgtggcagctctctgcgataactggacattctagtctttgagacatccgataggtacaacaaaaataccatcttcccttttatatgctgcacttccaagtcccacaattatacccataacctttggcagctcaaccgagttattttcaagttttttcctgatttttaacagtttttcagcggcctcatcaatttttcccgaatcaagttttatttcaaatgcgcaccactcaccgttttttaattctatgaccgcatcaatctcattgccgtcataatctctgtaatgataaagcttcgcatcaaagctctctgcataagttcgcaggtctctttcgcataaagcttcaaacatcagtccaaaggtgtttaaatcattaataagtttttcaggagtcaaatcaagaagcgcgcaggccagtgatgggtccgccagatgtcttttttcctgctgttttactctaagcgccgaccttgttttaggcgcatatggtttctgattttcaattataaacattcttttcagaccatcaatataagagtttattgtttccctgcttacacctgtttcatcaaatcccttaatgtctttttccagtgtcgcaattcccgcaaggctgctttcatttcttgccagtgacctgagaagtttctcaactttatgcggattgaactttagttcttcatttttatatatatcttcctcaagaaaagcttttatatattccctgggaacaagatatgaaaattctgatgcatagcctacagttctcggccagccgcctcttacaattatttcagccagtttctttattgaaattgcctgtgacatcaccggctctatattcccgtcacacagttcctgcaaagatacatcgccggtagactctccggactcataaagtgacataggtctcatatgaagttttgctattctccctatcccactatgaagtacacccttattctgcggtgtagatgatcctgtaagtataaatgtaccattatcagaagattgatcaaccttatatcttacagcatcccatatagacggaacctcctgccattcatctataagtcttggagtttctccctccaatatatgttccactgcaatttctgccagacgtctgttctgaaaattattctccggatcacctacaaaataccagctgttgctatgatattcagaagtccacgtcttgccacaccatttaggaccttctatgcacactgcaccaaatatttttaaatatttctcaatagttttatctattattctcggcaaatattcatctcgtttcatatacaccctctcgtttttctatatatcagaattgttttgtttttttaatcatattatactttgcagtttttgtcaacttcactttgcagtttttcagcataatactttgcactttttttgaattatactttgcacttttttgcaatccatagcatctgaaataaaaaggctcgtaattacacctgcttcgctgaagaagcaccctgcttgttattctgctaacttgtttaacgtatctcctgctattctgtataccgtccagtcgctcataggctcagcgcccagcgacatactcggcttgttccggtattaactctctcctatcattttcatcaaaatatttttaaaaaagcatatactgttattatacgcttttatactgctacggtgttgacatctattcaaatgtgtagtacgatgtactacaaagagaggagtctatgttatgagtttttctataagattaacagcagaagaaaaaaagcttgccgacagctacgcaaagcttcatgccatctctttgggggaagccttcaaaagagctttattcgaaaaaattgaagacgaatacgatatcgcccttgctgatgaagcatataacgaatatatcagggacggcaggaaaagcagaccgattgatgagctttggagagagcttgatttatgaaatatacaataagaacaacctcaagatttgacagggagtttaaaaaacttgacagatatactaagcttatgattaaaggctggattgataaacaccttactgactgcgacaacccacgggcctttggaaaaggacttacagcagaccaaaagggtcagttgagataccgtattggtgattacaggctcatctgcaatattgaagataacgaacttataatacttgcactgagtatagggcatcgcagagaggtatataaataacctttcaccagacagcataatgtccctttaattgtaatgtacacacacctctggcagtatggagatgacaatatgaaacaatgcataggctttgttatatatgtactcatacgtattgcagttatctactatcttgtcaaagaaaatgaagatacaagttcataccgaaaactatttgaaaaaaggaaagaagctcagaatgaaccgaagcatacaggcggaaggaggctttggagatatcaagggagacagtgaatttacaagatttctgtgcagaggtaaagaaaatgttatggcggagtacatcctgtttgccatggcgcataatctgggatggcttcacagcaggatacagaatgataagctggatttacatctttatgaacttaaggaagaagcggcataattaaggatcttaaatatggtgccaaacacagagacagttacatgccggctctatttgtgttttttgtgacaggtaacatatgaaggcatcagatattgaaatttcaatatctgccccggcagcaagaaaaaagggcttgtcgccattagattttaacctaatgcgacagcccctatctgttattctgctaacttgtttaacgtatctcctgctattctgtataccgtccagtcgctcataggctcagcgcccagcgacagataaaagtcaatactcggtttgttccagtcaagacaccaccattcaagacggccgcagcctctctcaactgcaatctgcgccagtttcctgagaatagctctgccgtaaccaaagcctctatgttttggcattacataaaggtcctcaaggtgaatccccgctctgcctaaaaacgtggaaaagttatggaaaaacagagcaaagccaacctccttgccatccttgagagcaaatataacctcggctttctgcttatcaaaaatccattctttaagaagtgcttctgttgcaatcacttcgttttccattttttcatattttgcaaggtctttaataaacttgaggataagacctgcatcttttctctctgcatatctgaaatcgagtacatctgacataataaattacctctcaaatctgactatatatgaaccaagcacttgctcgcatttaatctttgcggcgttctccgcagtaaatgcctgcctgtcataatggttcttaacctccgtattgtaggcaggaagtgtcttgcctgtgcttttgccgcctgcatcatctgctgagaagcaccatttgaattcgcagtcacagaattccttgttggcgttaatctgttcaggcaaatgaagctctgtgctctctcctataaagaagcaaccatcattgtccttttcggcaggacagccgccctcaatacctacgcctttatatgaaagatttaagaaaggcgctgaaattgtaactgtgccgttttcgtctgtaaacggtatttcttccctgctgcctgtccagtttgatatatttagccagcctctgctgccgtcgtgcacaacaggggtattaaactcaatatatacctctctgtcatctcttatctctgtattaattctcaaaacaggccgaagtgactcaaagcccccgggcagcatcgcgcgaatacggtcctgctccgcctcataggccataacaaactgctctatcttcattacagtcctcctcatatactgctgtttttcagcatattcgcaaagtatctggttatcctgccggtaattccccagattacatatttatcatatacatatatcggaacctctgtctttgcagacgcccatttgtatccgtccggaaatccaataagctccagcgggaaattctcctgtatctcctgctttgcatagctgtaatactcccttggctcattgcttaggaagaagtcgagaggcaccgtaaaaagctcactgacctcgctttcacttggggtcgcattttctatggtttctctgtctatctgcacagcat

SEQ ID NO: 4272 - DNA, 31503 bp, Unknown
  16S sequences of unknown bacteria
ttataatataaaggtcggaggcgtgtgtcctccggacttgtaaagacaagctataagataaggccataccagccggggaattagcggtgccttgtacctgcaatccgctgcagcaggggtggattcctttgatgagggctgattctgtgtggtctgcacgacgtttttcacgtgttgacggatgggtcttgcgcaatcggacgccgtgaaccatgtcaggtggggaaccaagcagcattaagcggtcactccgatgtgccgcgaggtcgcctgtcccgagcgtggggcgtcgttcacgcacatgggcgcggttcgagtcagaggtgtatggtcttattttatagcttgtccgattttttgcggcggcttgtgtccgccgcggaacatctgtcgcgggtattccggatgcctgactttccgcggcgcgtgaagggggcggtggattgcatcaggctctttacagaaaatggcgtccgcggcgcttttcggacgtgtgcggtcaggaccatgtgacctcaatactcagatatgaggtcgcggaggggaagacttcccacgcttatcttttctgcggaacaaggggaacaggcaagacgacctgcgcgaagattctcgcgagggcggtcaactgcgagcacccggtcgacggggacccgtgcggcgagtgcgcgtcctgccgcagcgccgagtcgggaagctgcatcgatatcgtcgagatggacgccgcgagcaacaacggcgtcgacgacatcagaaaaatacgcgacgacgtagaataccttccggcggagctgaaatataaggtctacatcatagacgaggtccacatgctgtcgcagagcgcgttcaacgcgcttctgaagacgctcgaggagcctccaccgcatgtgatattcattcttgcgacgaccgagctccagaaaataccggcgacgatactgtcgaggtgtcagaggttcgatttcaggcggatttcgagcgagatcatcgcgtcgaggcttgaatatatcgcggagcaggagggcatgacgctcgatcgcgacgcggcgttcctgctggcgcacctcgcagagggcggtatgcgcgacgcgatatctctgcttgagctgtgctcaggagagaaccgtccgatcacctgcgaggtggtcgaggagatcgccgggacaggcgggcgcgattctgtcatgcggcttgtcagggcgatagccgggaaggattacgacgcgatattctccgagatcgggaatattttcatgtcgagccgggatcttgccgtatactggcaggatctgatatcgttttaccgcgatatgctcgtgtgcaggactacgaagagcgcgagggattacctcgatctgtcggacaggcagtacggcgagctttcggaggcggcggcgagattttcggtcgagacgcttatatatcactcgaagatgctcgacggcgcgctcgacgagatacggcgcgcggtgtcgtcgaagcgggtgatcgccgagatgacgctcgtcaggatgtgcgacgagaggttcgcggcgtcgaacgaggcgctcgcgtcgaggatatcggttctcgaggacaggctcaattccggcgcgttcaccgtgagacgcgaagctccggcgcccgtggacacgggcaaagcagctgttattgctgtaccggaaaacgtcaccgaggttatgccgtccgcgaggccgtgggacggtgcgccggcggctgatactggaaacaccggaaacaatgattcttccggaactgcggctgaacctgccgcggagcaggaaaagcctataaagaaggaataccgccagcttccgtactgggcggatttcgtgcagaaatgcacggagcgcgacgggatgctcggcagtttcatgagggagtcggcgaagggctttacggtcagcaccgacgagctcgttcatatacgcacgaataaccggatggctcttaccatcataacgaatatgttcccgacacttctcgaggtgctgaacaccttcgagagcgggcggctcgaccggaactcggtcaaactcgagtacgtccctgaaaagaaggaggacgcggacaggagtcttgatgagctggtaagaaattccggagaaaacaataattgactgaaaggaataaaccaagatgaaagcacgtttacctagaggaatgggcggcggcccgcagaacatgaacgccatgatcaagcaggctcagaagatgcaggctgacatggaggcgctccaggaggacctcgacgcgcgcgagtatgagatcgctgtcggcggcggcgtcgtcggcgtgaagatcaacggcaagaaagagatcctgtcgatcgacataaagcccgagatcgtcgaccccgaggacatcgagacgcttcaggacacccttgtagcggctgtcaaccaggcgatcaagaaggtcgaggagacgaactccgcggagatgcagaagatcaccggcgatatcaacgtcccgggtcttatataatcaggaatggcggaattcatacttccgcttgaaaagctgatcgagcagttcaggaagctgcccggaatcggcaggaagacggcggtgcggctcgctttcgcggtgcttgactacacgccggaggaggcggacgccttcgccgcggcgatacatgacgccaaggagaaggtcaggacctgccggatatgccagaatatttcggacggggagctctgcccggtctgcgccgacgagaagagggacagatcggtcatatgcgtcgttgaggacgcgaaggctgtgatgtcgcttgaaaaggtacgtaattacaacggcgtttaccatgtgctgcacggcgtcatatcgccgtctgccggggtaaagccggagaatctgcggataccggagctcatggcgcggctcggcgacgggacggtgaacgaagtgatcatcgcgacgaacccgaccgttgagggcgaggcgaccgcgatgtatctgacaaggcttataaagccgctcgggataaaggtctcgaggctcgcttacggtattccggtcggcggggagcttgagcttgccgacgaggtgacgctgatgcgcgccattgagggcagacgcagcctctgacgatacgtcagaagaatgacaatatgtcagaagtgtgcgccgggatgcttttatcagtgatggaataggtcaaaagtaaacaaaatttgcatattttcctattcctcttgacaaaacgcaaaaaataatatataataaattagttagcgagcagagttcggaggtgacgataatgctcatcgatctgaaacaattgcttgcgggcaagaccggacgggttgagattgaccacgagtttccgcttgatgacccggaattgccgtttgatacggcggtcgagggagtgaagtactcgggaacggcgcgtgtcaggggagagatcctcgatatgggcgggtgcgtgagtctttcggtgaaggtcagcgtcgattatgacaccgagtgcgcgagatgtctcgcgccgctgcacaggagccttactgttacgctttcgcggacgcttgtcgaggtggggagccttgagaacactccggaggaagacgcggacgactatcttgaatacacggacgggatgctcgatatcgacacgccagccgcggaggagattgtcatgtcgctgccgacgagggagctgtgccgtgaggactgcaagggactttgtccgaagtgcggcaaggacctcaatgagggcgactgcggctgcgtgaaaaaagaaattgacccgaggctcgcgattttgcaaaaactacttgaaaaacagtaaattatgatgtataatataaagtgttatacggttaaggaggtgtcgtgaaatggcagtaccgaagaagaaagtctcgaaggcgagacgtgacaagagacgttcgaacgtctggaagctcgatatgccgggtatggttaagtgcccgaagtgcggtgagtacattctctctcacagagtttgcaaggcttgcggaacctacaatggcaagcaggtcatcaacgttgaaggctgattttgagctgaatatgagaagagccgttttgcggctctttttcatttgctgtccggaaagatgtattaaaaattaacatcgtaggacgaattatttacatggtttgaattaatgcttgacatatcaaccgcaatgtggtacaatagaggacgtagaggcagtgctgatttttggcaccaaattacaaatacaaccacttttcaacttttgattaacagaattcagaaaggattgtaagcaccatgaaaaaacagtttatcgctccgatcgccgcggcgtccgctgccgctcttctcgcctgcggagtttccgctgcacccgctgtcgcaggacgcaagacctgcgaggcttatatcgccgacataacgctcgatggcaagatcgacgacgcgtggaattacgcgccggagatcaaggtggacacggtcaaggagaacgcgtcctcatggttcggcgataatacaaaggtcgcgggaaaggactatgcgaccctgacctgcaaggtgctttgggacgggcacggaactctttatctgctctatgtagttaaagacaacgtgataagcctttccggcgctaactcgtgggatcaggactcgattgagtacttcatccagaccgagaactcgactgacagctccgcgtcaaagatccagaagcgccttatggctgacaacagtgccagcgacatcggcgcggaggaatacggctactcgaagatcgacggcggattcgtctatgagatcgcggtcgacataagtgaggtcggcggcgccggacagtatttcggcatcgacttccagtacaacgacgacgctgagggacagggaacgagaaatatctgcctcggctggtccgactcgactgacaaggcgtcgagcgacccgtctgtctatggtcagtgcctgctttccgacaagaccgtggcttcgataatcgaggaagagaagcagaaggcggcagaggctgaggcggcaggacagggatccgcttccaccgctgacccgatggctctcaccgctctcgcggcggcagcgtctctcgcgggcgttgtcatctctaagcgccgcaagtaatataacagtgctttattaactttcagaaccaagtgaattcatgctcccgtatacggataaactaatgaccgcggacgatgttccgccgcattgatattcgtatacgggagatttttatggattttataaaggttatactgacgtcgcttctgtcgattgtcacgctcttcatactgacgaagctgatgggaaacaggcagatgtcgcagctttcgatgttcgactatataaacggcataacgatcggttcgatcgccgcggagctcgcgaccgatcttgatggggatttctggcagccggtcgtcgcgatggcagtctacgcggtcgtcaccgtgtgcatcactttcatcacgacgaaatcgatcggcgcgaggaggcttctgaccggaagatcggtcattctgttcgagaacggaaagttccggacgaaggatatgctccgcgcgcaggtcgacacgagcgagttcatgacgcagtgcaggataagcggctgtttttcgctgtccgggcttgagtgcgcggtgctcgagccgaacggcaggataagctttctgatgaaatcggacgcgagaccggcggagccgaaggatttttcgatctctccggagaaggcgtcgataagcccgaccgtgatactcgacggcgagacgctgcacgagaatctgaaggcggcgggctacgacgagcgctggctgaagagcgagctcgacagactttcccttgacgagaaggagattatgctcggcgagatagaaaacggttcgctttcggcgttcacaagggacgagaagaagacgaaacgagatatttttcagtgatatcgaaaaaatatattgccaaaccggaatgtatgtgttataatagaagatagaacagcggaaggaacatattccccgacgctgaaaatcttaatcagtgacgatatataaacgaattataacaatatatatccgaggatggtgtaataaaatgtcgaatttcagaaacggagagccgtggctcgacacggacggaaatgtaatacacgcgcacggcgggcatatgcttcatcacgacggctggtggtactggtacggcgagaaccgcacggagaacaactacgtctcctgctacaggacgaaggacttcaaatccttcgagttccgcgggaatataataactacagagacgccgaccgaaggttaccgtgtgcagacggatctctccctggccggtaagaacgcggacgggacgattcataaggtcaatctcgagcgcccgaaggttctctggtgcgagcggacgaagaaatttgttctgtggtgccactatgagaacggcgtcgattatcacgacgcgagatgcgcggtcgcgtcgagcgattacccggatcacggctttgtctatcacgggagcttcaacccgttcggggacatggcgcgcgactgcacgctgttcatggacggcgaggacgcgtatttcgcggcggcgtcgagagataaccgcgacctgcacgtctggaagttgacgaaggacttcatgagcgtctcgaagctcgtgaacaatcttttccagaatgagtcgcgtgaggctccggcgttcttcaagaaggacggcaggtattatctgctgacctcctactgcaccggctgggcgccgaaccagggcaagtggtcgtcgtcggattcgatagacggcgagtgggagataaacgagaaattcggagacgagacgaccttccgttcccagcccgctttcgttctcgaaaaggacgggaagtttatatatttcgcggacagatggggcgggaacggtcattataacgactcgacctacgttgttctcgagataaagttccgtgaggacggctcgccgtatatcgaatactccgacgaggcggcactctgagataagtccgctcatggtgtgaattggaattccgacataattcaggaaaggcatggtcatggatatggaatctgacagaatatcactctccgcgctctgccgcgacatatgcgactgtatggggatcgacgccccgtccgcggcggaaccatccggcgggaggctgaagagcctcgccggggacaggaagtgtgagcgcgtcgtcatgtacaatccggacgcgcaggcggaatggcttgtcaaaaaatacccggagatattcgagcctgtgacatcgcgttgccatcttgcttacaagttcgcgaccgtcatgccgtcggtgactccggtctgcttcgcgacgatgtacacgggcactatgccggaggttcacgggatacggaagtacgagaagcctgtgcttgagaccgacaccatcttcgacgccctcgtgcgcgccgggaagaaggcggcgattgtcgcgaccaagggcagttcgatgtccattatcttcggcgggcgggatatagactactacataatccccgccgacgccgacgcggacgagaaggcggtgaagaagggtattgagctcataaaagaggacaagtacgactttctcgtgatatacaacggaaattatgactcgatgatgcacgtgacatatccggagtcggaatacgccatgcactggctgaggcatcacgctgacgctttcgcgaggatatattccgcagtcagcgagacctcgaaacgaagcggcagaacggcgcttgtcggatacgcgacagatcacggcgtccacacgaacgagaacggccgcggcacacacggcgcggacattccggaggacatcgagatcacgcatttctacgacgttatatagggagcagctgtgatgaacacgacttgtgaagagacagataaaaagccgccggagaacgaaagaaatggcgcgccggcgagggaagcgaagactctgaaatactcgagcggggtcggaagagcgatgcttctgaccgggatatccgcgctggcggtctcgcttcttgtggtcatattctcgggaatcggcgcgtcggcggcgttcaggctcggggtcaggacgagaacctgcgtggttgacatgtcagataacgcgagacttgagtattacgcggcgagaccggtgctgaccggcgtcacatcctgccgctttttcctgaaagatggcgacaggacgagcgtttcggcggcggtcgattttctggcgtttctgaaacagcaggacgtcgcgcttaacgtcgtgcggattgactcgggggacgaggaagcgattgccgcgtatctctccggtgacggcggtccggaaggcatcgacgacgacactcttgaccttgccgacaggctgaagcgcctgaactcgattctcccgccgcggaagcgcgtcgggataagaaccggcacggcgaagatcccgtcggacggggaatatgagataacatcggctgaatatacaggcgtggcggacggcgttctcgacgtcggatgcctgtatccgggaacaaacgggtgtaacccgctgttcgacgtgaagacggataagctgcgcttcggatgtgtttcggatcttgacgctttcagcggatatctttccgccgtctccggaaatttcggcggtaaaaagttcgacggtgtcggcgtaccggaattctatttccttgtgccaccggacgcgtccggcgagtgagcgttttttgaaaggatatatatggcagacaaactgactattattgaggacgagggggcggaacagctcgcgcgcgagggagagttcgagctcgcgataccattttcgctctacctctacaatgacggcgggatacggataaatgtcttcccgtcgctgaaaaaggacgcggaggagttcctctcgctctttccggacgacagaatgttctctcctgaagcgctcggatgggcgcgtgagcgcttcggcggggcgatatcggcggagggttacacgaccgaggacacggacgtttttttctacgattatctcgtgaagggcgccgaccgctcgctgatacttcccgagaccttccgcgtctgcgggagcgaggaggcggagaacctgaccgggtatgatttcggatacatgacgaattacggtaatgtgtgcttcgccgcggaggtcgacggaaagatcgtcgccgccgcctgcacgaactatccggtgctgctcgccgacgatcaggacgaccggcgggtcgagatcggcgtcgagacctctccggaatacaggcgccgcgggtacggtatctcctgcgcggcggcgctggtgaacgagcttgtcgctcagggcttcgaggtgctctacgagtgcgggtcggacaatccggcgtcggttgcgctcgtcgaccgtctcggagggagcgtcttcgcaaagaatttctgcgtcgtcgggagaaaagagaccgacgaatgaaccttaggaaagggataatacggcatggcatttgacgccgggatggtttccgccatcgtaaacgaacttgaaaataagacgctcggcgcgagagtcgagcgtgtgaaccagccggagaaggacgagatagtcctcctcctgcacgccgcgagggagagcggacgcgagaatctgcgcctgtcgctctcctccggcaccaacaatccgcacttcaacctgacaaagacagcgaaggagaaccccgccgcaccgccgatgttctgtatgctcctcaggaagcacctgaccggctcgagaatatccggcataacccagctcggcttcgagagggcggtcgagttcgccttcgacgggtatgacgagatgggcttcccggcgaagaagtaccttgtcaccgagacgatgggcaagtacagcaacctcatcctgcttgattcatcgaaaaaggttgtcagcgcgctgaagctgatcgacctcgcgtcgagctctgtgagacagatactcccgggtttcccgtatgagctgccgccggcgcagaagaagctgaaccccttgacggcggtccgcgaggacttcgacagggcgttcgacgacgcttccggcatgaccgcggacaagttcatgaccgcgaagtatttcggactgtcggctctcacggcgcgcgagatcgcgctgagaggcgcgggaagaagcgacgcgcagataacagactgtgaccgcgaaaagctctggagcgccgtctgctggttctctgacatattcagaaacaggagcttcgagccgtggcttgtgagcgacgccgccgggagaccggtcgagtattcgttcttcgagccgctcgagtacggtcctgacctgaccgtgaaaaagctcgacagcttcggcgagctgcttgacgagtatttcggcaggcgcgacaaggctgagaggatacgtcagcgcacggcggacatcttccgtctgctcacgaacgcggagaaccggctcacgagaaagatcgccggacagaagcaggatctcgaggcgtgcgccgacaaggacaaatacaagaaatggggagacctcataaccgcgaatatctggcggctctcgaggggaatggaatcggcacagctcgaggattattactcggatgactgcgccgtcgtgacagtcccgctcgacaagcgcctgacgccgcagcagaacgcccagaggtactacaagaagtacacgaagtcgaagacggcggaggtcgagctcgcgaagcagataaagctcgcggaggcggagctcgaatatatttacacggtcttcgattcgctgacccacgcggagagcgagaacgatatcctcgagatacgggacgagctttaccgttccggctacgcgtcgaggatgaagaattactcgacgaagaagatgccggcgccaaaaccgcttgagttccgcacgacagacggccgccgtgttctctgcggaaagaacaaccatcagaacgactacctgacaacgaagatcgcgtcgaagcaggattactggttccacgtgaagaatcagccgggctcgcactgtgttctctttaccgacggagacgagccgaccgagagggatttcaccgaggcggcgatgatcgcggcgtactattcgaaggcgtcggaggggcagaacgttccggtcgactacacgctcgtgagaaatgtcagaaagccgggtggctcgaagcccggattcgtcatctatacgacgaactacacggcgtacgtcacgccggatgagcgccatgtgctcgcgatgaaggtctgagcgcggtgccttaagaaaacgctgatttaaggttgttttcgcagaaaaagcccataaatccggggactttttctgcgaacccccgagttgttcagcgaattcttaaaataaaattttataattcagtccataaaacacttgaattttttccccggacgcggtatacttatgttgctgccgtctgcgctgatatgtcagactgacacgtcagcggggaaaatttacagatcaggaggtgggtccgggattaccggatggctatgaattacgatatcgaaaaacttgtttatcttatctggctttctacctgttcaaaccccggaagcgaggacgctttcagactgctcgaccatttcggcggcgcgcgggagatatttgaggcggacagagccgatctctcgaacgttgtcagagccgacagcgcgattatcgcgaagatcacgcggcacgatatcgacaaggcgagggatatcctgagagcctgccgcgagctcgatatcgacatactcccgtatgactctgaggaatacccgaagcgccttaccggcattcgcggcagaccgctcctgctctacgcaagggggcatgtcgacggactgaacgagcggctctgcgtcggagtcgtcggcacacggaatataaccaattacggcggcaacgcgacggtgcagatctgcactgatctctgcaacgccggcgctgtcatcgtgagcggcggcgctctgggagttgacagttacgccaactgcacggcgtacaatatgggctgtgatacggtcgtggttctcggaaacgggctcgcaaatccgtatccatccgaaaatgtggagttgttccgcgggatatcaaagcacggaatggtcataagcgagtatcctccggaagccccgtgcagcaagtatacttttcctgaacgcaaccggataatcagcggaatgtcggacgctgtccttgtcgtcgaggctggactggggtcgggatctctgataacggcgggctgcgcggtgagacaggagagacggctctacgccgttccgggctttatcgacgcgaaatacagcttcggtacgaacaagctgatccacgacggagcctcgatctgccgctgcggtgccgatatacttgaggatttcagggaaagtttcagctatctgagcgaaagcatggtggtgcgcggaaaagagtgggcaatcgtaccgcgcggaaaaaacaggcagatgagaccgcaaggtcaggaaaaagctcacgctggtcaggaaacgagaggcggaacggctcatcttgtgaatgagacgaccgcgccggaggatcgcgcggtgcctgagcgcataaagaaaaagatggagaccgtgcccgctgacttaaacgcttctcctgccgtccgcgcgtcctcaccggcgccgcagctgtccgataacgagaagatcgtctacgacaggataccggcggggacgcaggtgcttccggagacgctctgcggagatgatctcgggatcacggaagtgatgtcgatcctgacaatgcttgaactctacggatgtgtggagacgcttcccggcgggttctgccggaggaaaaacggcggctgaaattctgccgccatcgtgaaacgctgattcagagttgttttcgtgaaaaacctgattatccggtgttttcaaatacaataacacgattcaaggagatttttaatctgatgtcaaacctcgtaataatggagtcacctccgaaggcggtgacggtcaaagggtatctcggttcgggatacaaggtggtggcttccaccggacatatccgcgatcttccgaagagtacgctcgggatcgacattgaggatgatttcaaggcgaaatatataaacatccgcggcaagggtcccctcatcagggaactcaagaaagaggcgaagaacgccgacaaagtctacctcgcgaccgacccggaccgtgagggagaggctatcgcgtggcacctttcgatcgcccttgatatacccgaggacaagatacgccgcgtcacgttcaacgaaataacaaagaaagccgtaaaggctggaataaaggctccgagagacatagacatgggtcttgtcaactctcagcaggcgcgcagaatcctcgacaggatcgtcggctacaagctgagcccgttcctctggaagactgtcaagagcggactttccgccggacgcgtgcagtcggtcgcgacccgaatcatcgtcgagagagagaacgacatccgcgcgttcaagccggaggagtactggacgatcgacgtcatgctcgagaacaagaatcacgggcatatcaaggcgaagttctacggaaacgccgacgggcgcatggagctgcactccgaggaggagacgatgaagattgtctcggcggtcgacggcaaggagttcaccgtcagatcggtcaggaaggcggtcaggacgaagaatccggcgccgcccttcacgacctcgaccatgcagcaggaggcgtcgagaagactcggcttccagtcgcagaagataatgcgcgtcgcgcaggagctgtacgagggcataaacctcggcactcagatgggcggcgtacagggtcttatcacttatatgcgtaccgactcgctgagaatcgccgatgaggcggctgacgcggcaaagcagtatatagtcgagaagtggggagagcagttctacccgccggagcgccgcgtcttcaagacgaaggcgggagcgcaggacgcgcacgaggcgatacgtccgtcgaacctcgcgtatgagccggagaagataaagaagctgctgacgaacgatcagtacaggctctacaagctgatctgggaccgcttcatggcgagccagatggcgtccgcggagctcgacaccgtcaccgccgatatcgaggcgggcggatatatcttccgttcaagcgggtattcggtcaagttccagggcttcatgacgctctacgaggagtcggaggaatacgtcgcgccgaacgtcgcggacaccgacactcccgagaagagcataaagctcccgaagatagagcagggcgacgtgctgaagcacgacgagacgacaccctcacagcatttcaccgagccgcctccgagatacaacgaggcgtcgctcgtcaagttcctcgaggagcgcggaataggtcgtccgtcgactttcgcgactattattacaactataatcacccgcggatatgtcgtccgcgagggcaaatcgctgaagccgaccgagctcggagagcttacgacgaagctgatggtcgattacttcccgaagattgtcgactatgagttcacggcggacatggagaacgagctcgatgagatcgcgaacggtgatatcacgatgtcgcaggtgcttcacggcttctgggacgacttcgagaagacgcttgagcacgccgagaagacggtcgagaagagcgcctacgagctcccggtcgaggagaccgacataatctgcgagaagtgcggcgcgagaatggtcgtcaagaacggcagatacggaaagttcgccgcctgcccgaattatccggcgtgcaggaacacgaagccgctctcaaaggacggaaaggtcgtcgaggacaaggtcgtcgagaccgacatggtctgcgagaagtgcggcagcccgatggttctcagaaccggcagatacggcagcttctacgcctgctcgaagtatccggagtgcaagaacacgaagcagatcgcgaaggagataggagtggcgtgcccgctctgcggcgcgaagatcgtcatgaagaagggcaagagccgttcggtcttttacagctgcgagagatatccggagtgtcagttctcgtcgtgggacgttcctacgaacgagaagtgcccgaagtgcggcggcatgctctacaagaagaagggcaagaacctgctcatctgcaagaacgagaactgcgactacaagcgcgagattgagccggagcccgagaccgagaccacggaggacatcacctgatggaaccgataaacatcatcggcgccgggctcgccgggagcgaggcggcatggcaggcggtgagcctcggggtgccggtgcggctctatgagatgaagccgtcgaagtattcgccggcgcaccacagcccggggtttgccgagcttgtctgctcgaactcgctgaggtcgaatatgctggcgaacgcggtcggcgtgctcaaggaggagatgcgtcttctcggctcgctggtcatcgaggcggcgtacgcgtcggatgttccggcgggaagcgcgctcgcggtcgaccgcgacctcttttccggtttcatcaccgaaaggctcagaaatcatccgctggtagacgtcatcgagggcgaggtcacggagatcccggacgggataaccgtcgtcgcgagcggacctctgacgtccgaggcgctgtcaggggcaatatcccggctgatcgggtgcgattacctgcatttctttgacgccgcggcgcctatcgtttcgttcgattctatcgatatgacaaaggcgttcttcgcgtcgagatacaataagggcgaggcatcctatataaactgtccgttcacgaaagaggagtacgaccgcttctacggggcgctcataaccgccgagacggcagagctcaaggagttcgacaggagcgagcagaacaataagaagccggaggtcttcgagggctgtatgcccgtcgaggtgatggcgaagcgcgggcgcgacacgctgaccttcggtccgatgaagccggtcgggataaccgtcccgtcgaccggcaaggaggccttcgcgatagtgcagctcaggcaggagaacgcgagaaagagcatgtacaacatcgtcggttttcagacccacctgaaattcccggagcagaagcgcgtgttcggcatgataccggggcttgagaacgcggagttcctgcggtacggcgtcatgcaccggaacactttcatgaattcgccgaagctgcttgacaggacatatatgctgcgaagccgtccggggcttttcttcgccggacagatgaccggtgtcgagggctatgtcgagtccgccgcgagcgggcttgtcgccgggctgaacgccgcgagaatggcgctcggcgaggagccgttctgcttttccgccgagagcgtcatcggttcaatggcggcatacgtgagcgacccggcggtgacgaatttccagccgatgaacgcgaacttcggactcgtcacgccgctcggacgcaaggtgaagggcggaaagcgcgcgaggggcgaggctatgggcgagagagcgctcgggtatgtaaaagaagccgccgaaaagctcggaaagaccgcgtcgccggtgcctgagacacatataagcggcgaagaagaacaggaataaaagagggaatacgaaaatgaacataatactcgacgcgatgggcggcgacaacgccccgcttgaaatactgaagggcgccgccgacgccgtccgcgaatacccggatgtcgaactgacgctcgtcggacaggagaagacgatacgcgacctgtgcgccgctgaaaacatcccgcttgagaggataaagataatcgacgcgccggacgtgataacgatggaggactccgcgcagacggtcgtcatgtcaaagaagaactcgtcgatgagcgtcggactcaaaactctcgccgcgggcggcggggacgctttcatctccgctggcaacaccggcgcgctgatgaccggcgcgacgctgcttgtcagatgtgtcaaaggtgtcaagcgcgcggcgatcgcgacgatacttccgatggagaagccggtgcttatgatagactccggctcgaacgtcaatgtcacgccggaatttctcgctcagttcggaattctcggctcggtctacatggagcaggtattcggcgtcgcgaacccgcgcgtcggactgctcaacaacggtacagaggaacacaagggcacgcagacgatgatcgacgcgtacgctctcctctcgaagaccgagggaatcaatttcgtcggaaacatcgagggcaaggcgataccgttcggcgcgtgcgacgtgcttgtgaccgacggtttcaccggaaacatagtgctcaagacgatcgaagggctcagcaagttcatgatgaagaagctcaagggcatcttcatgaagaacgctctcaataagctctccgcgctgatcataaagaaagaattctcgtcgctgaagaaatcctttgattcgagcgagtatggcggagcgccgttcctcgggatatcaaagccggtgttcaaggcgcacggaagctctgacgcccgcgccgtcaagaacgcgataagacaggcgaaggagtatctcgaaaagggcgtgccggacataatcgacgagcgcatcgccgccgacctcgcgaagaaatccgcggactgaccgtcgcgcgaaaccgacgcaatatgatattgattgatgaaaggctggtcttaagtctgaaaataaagtttcagaccaaacagttttgaggctttcacgacatagggtcgtgaattttgaaagacggacaagccgtctttcaaaaccgcctcaaaactgtaagtttgtacgaaaggcatggtcatataaatgcaggataatgaaaaactgccgcgctccgtcgtgagcttcgaggagcgcataggttacaagtataaagatataaagctgcttgagacggctcttacccattcgtccttcgcgaacgagatgaagccgaaggggcagcacgtgaatttcaacgagcgccttgaattcctcggcgactcggtgctgtctataatcgtcagcgattatcttttcaggcgctatccggagcttcctgagggggatctcacgcgcatacgcgctggcgtcgtctgtgagaagacgctcggaaagatcgcgcacagtctcgagctcggtaaatatatgcgtctcggacgcggcgaggagcttggcaacggacgcgagcggatgtcgatactcgcagacgcctttgaggctctgctcgcgtcgatatatctggattctggctctaaagaagcggtggtcgatttcctgatgccgctgatgaagccggagatacgtctcttcgttgagaacggcagcaacaaggattacaagacccttctccagcagatcgtccagcaggagcgcggagagctgctcgagtacgtcatcaccggcgagagcggacctgaccacgacaagtggttcacggttgaagcgagactcaacagcaatgtcataggtcacggtaaaggacgcacgaagcgcgacgcggaacagcaggcggcgaaggaagcccttgttctcttcggcgacgcgcaatgagacatataaacataccgatatttatcccgcatctcggatgccccaacgactgcgtcttctgcaatcagcggaggatatccggaaagcaggagttcgatatccggagcgttgagggcgagctcgagcgcgcggtttcaactatagattaccgaagctgtgaggtcgagatcgccttcttcggagggagcttcaccggaatcgaccgcggagacatggtgtacctgctgtctctcgcgaagagatatatagacgccggaaaggctcaggcggtgcggctctcgacgagaccggactatatcgacggggagatacttgatatcctcgggaaatacggcgtgaccgacattgaactcggtatacagagtatgtcagacagggttctttcggcgtcgagacgcgggcatacggctgagtgctcgaggagggcatgccgtatgataaccgaccggggcttcaatctcgtcggtcagatgatgatcggtctgccggagtcgacgatagacgacgagatacgcacggcgcgggagatatcggagatgtgcggggcggcgaggatatatccgacggtcgtgttccgcgacaccgacctctgcgggatgaccgagagcggaaattatctgccgctgacgctcgaggacgcggtcagacgctccgaggcggctctgaatgtgttcatagagcgcaatattccggtcatacgtctcggactctgcgcggcggacaacctttttgagccgggggcgatcgcgggcggcgcgtatcacagcgcggtcggggagatggtctacgcggagcattattacagggtcatgcgggactatatcgagaagaatcatttgcgggatgatatttccgggaaaaatatcgtgatcgaggtcccgaaaggcgaggtttcgaaggtatccggacagaagcgtgcgaacaagctccgacttcaaaatgaatataatgtaaaaaatgtcaggatcattgaaaacccggaacttttttggtataatataaggatgagggcagattgacgcttgatatgtcggtctgacaaattgcagagggaacggaggaaaagcccatgtatcttaaatctcttgaattattcggcttcaagtcgttccctgaccggacggttctgaacttcgcgggcggagccgattcggtcgtcggcgcgacggtcgtcgtcggaccaaacggaagcggaaagtcgaacatatccgacgctatgcgctgggtgctcggcgaggtgtcctcgaagtcgatccgcggaaaccgcatggaggacgtcatcttcggcggaaccgacgacaggcggcagatgaatttcgccgaggtttcggtgacgttcgacaattcggacaggctcatggagtacgacagcgacgaggttatcgtcacgagacgctatctgcgccgcggtgagagtgaatatttcataaaccgccgacctgtgagactgcgcgatatacatgagctcttcatgaacaccggcgtcggacgagagggttactcgataatcggacaggggcgtatcgcggagatcatatctcagcgcagcgaggatcgccgggcgatattcgaggaagccgccggaatatcgaaataccggtacaaaaaggaagaggctgaagacaagctcgcgtcggtcgacgagaatctgacgaggctcagtgacataatgtccgaactcgagggtcgcgtaggaccgctcgaaaaggaaagcgagcgggcgaagagatatctcgagtattacgaaataaagaagcgcgacgacatagccctctggctgcatgattcggataagctcgcggatgagctcaaagccgcgaacgacaggctgacacttgcgaagacagagcttgacatcgcgtccgaggcgctcgcgaccctcgagaatcagaacgaacgggtttttgaggcgtctcaggaatcaaagtataaatacgaaaagctccagagttcgattgacgccgagtcgaagcgccagcacgagtttgacagctcaataaagctgaccgagaatgatatcgcgcacagaaaagcgcagatctcagagcgcgaggcgtcgagagaaaagctcgcggaaaagcaggcggagctcgaaaaggttctcgaagagaagaagaaaaatcttgagaactcgcgtgagcgggagacagagctcgcggaaaaaatgacaaagctcgaggcggacaccgctgttctccgcgcaaaacgagccgatctcgcgaagaagctcgacgaccagcacgcggagcagaagaagaaagaggaccgccttgtagaattgaagatccgtctgtccgtcctcgacgcgaccgagaagagcgacggcgagaagacggcgtcgatagagagcgatatcgcgaaatattcggagagcatagcgctcctcgaggaccgcatacagaaagccgtgaaggtcatcgcggattacgacgcgaaggcggcggagttccgtgagaagtcgaaggaacacgaagagtcagtcgaggcggaaaagcggaagaaacaggattacatcgacaaggcgaactccgtctatctcgactataccgcgaagaagcaccgcatcgacgctatacgccgtatggaggaactgttcgagggctattcacagagcgtccgctttatcatgagcgaatacgaggcgggcagagtcgatggcacaaagcagattgccgcgtccggagacgatcgtcccggcgggcggatctgggggccggtgtcgagacatataagcgtcaataataaatatgtcctcgcgatagagacggctctcggcgcgaatatacagaatatcatagtagacgacgacgcgaccgccaaggcggctatagcatacctcaagaagaagagcgcgggtcgcgcgacattctatccgataagctcgatgaagccgcgctacagtccgattccggagtccgagtgccaaaagttcgcgggctacatagggacggcggacagcgttctgaaatacgacgcgcgtttcgacgggataatccggaacctgctcgcgtcgacgctcatcttcgataacctcgacaacgcgtcggttatggcgaaggcgacggggtaccgcgcgcgtgtcgtcactctcgacggtcaggtcataaacgccgggggctcgttcacgggcggttcggcgaagcgagactccggaatgctcacgagaaagagcgagaccgagaagcttaagaccgagaccgcggagctcgcgaagacgctcgagagcttcaagaccgcgcagaacgactgcgacgcaagaatcgccgcggatacgaaggaaattaacgtcctgtccgctcagcttggtatgctatcctccctcagcggcgccgagaagacgcagctcgaggttctccgcagccagtcgaacggtgagaagaatatgaaaaaatcgctcgaggaagaccttgagcgcctgaaaaacggctatgacgaacgcgccgagggaatggcaaagctgacctgtgagtcggaaacgctgaaaaaggaaatagcggaaatcgcggatacgcgggatggcgaggcagtcgatctcggtgagcttgacagccgtctcgaggcgtccgaccgcgagcgcgaggggcttttagtctcgcgcgcggaggcggggaaggacatcgagaacgccgggcgcgagctgtccgaggcggagctcagactcgccgagagccgcgccgggataagcgacaacgaggaagccgtgaagcgtctgtccgacgcgaacaaggaagccggcgaaaagctgacgacactgaggtcggagcttgacgcctcggcggaaaaactgaagcagctcggtctcgagagggcggagacgagcgcgaagaacctcgagttcgagtcaaggctctcgaagctccgcgccgagataaagacgcatacggacaaaaaagaggtctgcttcagggagcacacgctcgccgagacgaggcagaaaaaccttgtgaccgaaaaggacaaactcgccgcgagactgtgggaggattacgagctgacatattccggcgcgctcgagtgcggaaagcccgcgaccgaggaggagcgccccgcgatgaccgcggagctcgccgacatgaaggcgaagataaaggcgctcggaagcgtaaatctctcggctatcgacgagtacaccgaagtgaagaagcgctatgacttcatgatctcgcagataaacgaccttgagaaatctaaggagaatttgctcgagataattttcaagctcgaggcggagatgcgcgagaccttcgcgtccgcgttcgccgagatcgaccggaacttcaagatcgttttcagggagctgttcggcggaggcacggcggagcttgtgctgtccgatccggagaacgtgcttgagagcgggattgagatacgcgtcgcgccgcccggaaagatcatcaagagcctcatgctgctgtctggcggtgagcaggcgttcgtcgctatcgcgataatcttcgcgatactgcgcgtgaacccgacgccgttctgtatcttcgatgagatagaggcggcgctcgatgagtcgaacgtgttcagattcgcggattacctgaagcgttattccgaccgcacgcagttcatcgtgataacacaccgccgcggcacgatggagatagccgaccgcatctacggcgtgacgatgcaggagaggggcatatcgaaggtgctcgagctcgacgtcagagccgccgaggagacaatcggtgaaaataagaacgacgaaaaacagtaagatagcacgaaaggtgtagtcataaaaatgggattttttgaaaaactcaaagagggactgacgaagacgaagaacgccatcttcaagcaggtggacaatctcttcaagagcttcgtgaaggtcgacgaggatatgctcgaggagctcgaggagcttctcataatggctgacgtcggcgcggcgtcgagcgaggagataatctcgaggctccgcgaaaagatcaaagaggatcgcataaccgacccggaggaatgccggattgcgctcagagacatactcgtcgatatgataggcgagggcgagccgctgaagctcgacacgaagccgagcgtgatactcgtcatcggagtgaacggcgtcggaaagacgacgtcgatcgcgaaaatcgcgcacaggcttaaggagaacggcaagcatgtgatgctcgccgccgccgatactttcagagccgccgccatcgaccagctccagatctgggctgacagggtcggcgttgagctcataaagcacacggagggctccgaccccgccgcggtcgttttcgacgccgcgagcgccgccaagaagcgtcaggcggacgttctgataatcgacaccgccggaaggcttcacaacaaaaagaacctgatggacgagctggcgaagataaaccgcgttgttgacagggagcttccgggctgctcgcgtgagacgcttctcgttctcgatgcgacgaccgggcagaacgccgtcagtcaggcgaaggaattcaagcacgccgccgacatcaccggacttatcctgacaaagctcgacggaaccgcgaagggcggtatcgtgttctcgataaagaaggagctcgacataccggtcaagttcatcggcgtcggcgaaaaatacgacgatatgcagacgttcgacgcgaagcagttcgtggacgcgctgttcgaggcttgaaaaccatgctgaaatttgttttagcgtcgagaaacaaaaaaaagatacgcgagcttgaaacttttctcgcgggtataccgtctgataaggtgattctttcccttgacgacatcggataccatggcgagatcgtcgaggacgggaagaccttcgctgagaattcgcttatcaaggcgtcggttccggcgaagctcgggtatatcggcgtcgccgacgattccgggcttgaggtcgacgcgctgaacggcgcgccgggcgtatattccgcgagatattccggagagggcgcgactgatgagaagaacaacgcgaagctgctctcggagcttgaagatgttccggacgacaagcgcaccgcgcggttccggacagtcgtcacctgcgcgttcccggacggcacatattttcaggttgacggctgctgcgagggaagaatactgagggctccggaggggagcgacggcttcggctatgacccgctcttctggtacgcgccgtttgaaaagaccttcgcgtcgctgacgccggatgagaagaactcggtcagtcaccgcggaaacgcgatgagaaagttcgccgcggctcttccagaagagctcgcacggcgcggaataaactgattttttggagaaaaatgatatgctgacaagcaaacagcgcgcgtatctacgcgcgatggcggcgcctatggatacgatctttcaggtcggcaagggcggcgtcaacgacaatatgtgtgagcagatctcgaacgcgctcgaggcgagggagctcatcaagctccgcgttctcgacaactgcgacctggacgcgaaagaggcggcggagatcatttcgactgagacgagctctgacgtcgtgcaggtcatcggcacgcgattcgttctttaccgcgagtcggtcgatcacaagaagatcgaactgccgcgatgaacactgtcgaaaggctcggtatatacggcgggaccttctcgccgatacacaacgggcatatacgcgcggcggagaagttcctgacggatatggctcttgacaggctcctcatcatgccggcggctatccctccgcacaaggcggcggacggcgtttccggcgaggaccggctcgagatggcgcgcatagcgttcgagggcgcggacccgaggctcgaggtctgtgacttcgaggtgcgccgcgagggcaggagctacacgataaacacgctcgagcacttcacgtcgcctgaccgtcggatatatatgctggtcggcaccgatatgttcctgacactcccggagtggaggcgcgcggaggatatattcaggctcgccgacatagtgctcatgcgccgcgaaaggctcgatgagacgggcagattaatcgcggaaaagaagctcggatatgagcgtgacttcggcgcgcgggttcatattatcgacgaggaaccactcgagatgtcctcgaccgagctgcgtgaaaagctgcggcgcggcgagccggtcgacaaactgataccggacggcgtcgcgcggtatatacgcgaaaagaaactttacactgagggatgataccggaaatgcttacaaagaaacaagaggaagctcttgcggctctccgggagagagtcgcggaggtcgtgaccggaaagcgcctgacgcacacgtacggcgtcgagcgtgagatcgcgcggctgtccgggatatacgagccggacgaggagtaccgcctgcgcgccgccgctctgctccatgacatcacgaagcagaagaagggtgacgagcagacagcgctctgcgacaaatacggaataaaatacacgaaggaagacaccctgatgccgaagaccttccacgcgagaacggcggtggaggtcataaagcatgacttcccggaatttgccgatgattatatcctcggagccgtgagataccacacgacaggcagaaagggcatgacgaccggagaaaagctgctgtacctagcagattatatcgaggatacacgcacctttgaggactgcgtgaagctccgcgagtatttttacacagggcttgagaagtgcgcggacgcgaaggaccgcgagagtctgctgtcggacacgctcatactgtcgtttgatatgacgatccgcgggcttatcgacgacgggacgccgatccatcaggataccttcgaggcgagaaactaccttatcgaggtaaagaaatttgaacaataaccataaccagcaaagaaacaccacagggcgtcagccgcagagccgccagcctgcccgcccgtccggtcagtccgggagcgggaacagaaaccgcacccagtccggatttccgcgcggcacggcgccggtaaggcgtcatccgcagaaaaagcgaggcataccggcatggaaggtagtgctcgcagtagtggtcgtcctcatccttttggtgatcggactcaccgcgacattcttaaagctctacaagccgtcggtcgataccggcgtcccgtttgacacggacgacggcacgataacgagcgggaacgacacaatcgtgaccgcgccgaccacggacgaaacatcagcggaaccggatatcgatacgtcgagcggtatcgacggatacacgagaaacaccgactcggtgaacttcctcgtgataggtcgcgatgtcggcggatggaacaccgacgtcataatgatcgtcaacttcaatatgaaggaaggcagcctgtctgtgatgcagatgccgcgcgacacctacgtcgactctgacgagggcaacgtgcacgggcgcataaacactacgctcagcaagttctacagcgccgaccgcaagaagaatcccgaccacacgaccgacgagtcgatcaaggcgggaatggacagtttctgccgcttcctcgagaagatactctgcataaagctcgacggatactgctatatgaacttgcagggattccgcgggatagttgacgcgctcggcggcgtttatgtcgacgtgccgtatcagctcgactatgaggacccggaccagaatttgtatattcacataaagcccggaccgcagaccctcaacggaactcaggcggaaggctttgtcaggttcagaagcggatatgttcaggcggacatcggacgcgccgacgcgcagaagatattcctgaccgcgctcttcaagcaggtcaagaacagcatgaacgtctcgacgatagcaaagctcgtcgagcaggtcatgacctacgtcctgaccgacgttccgctcgcggatttaatcatctacgcgaaggagctgctcggagtcgacatgggcaacatctcgatgatgacgatgcacggctcggcgatcgtcaatgagcgcggcgcgtggctgtatgtcatgaaccgtgcctcgacgctcgatatgataaacacctatttcaacgtctactcgaagccgataaccgacggcatcttcgaccggaaccagtcgttcaacgacgaggaggactcgatcgtgaaccagatctactgggcggctccggacgacgatgtggtccttgtcaagccggacgtcaaaaccggcgaggatatcgacgacgacggaataaaaatatatctgaattaattttcccgaaaggaaacggtaaataaatgaataacaatcttgaaaacgtgaatgagaacgccgaagtgcgcgatctttcacatgccgacccgctcgagatcgcgaaggagctcgtgcacgtcctcgacatgaagaaggcgcgcggcataaagctgctgcacgtcaccgaaaagacgataatcgccgattattttctcatctgtcagggcacatccaacacgcagctgaaagcgctctgcggcgaggcggagtacaaactcggactatgcggcgtcgctcctctcaggatcgacggatacggtgagggcagctggattgtcatggacttcggttcagtgatggttcacataatgagccgcgacgaccgcgatttctataagctcgaaaagctctggggcgacgccgaagtcgtcgatatagacgatatactcgtgaaataagcgatgtgctgagccgttatgcggcttgacatttcaacggaagaaaatcaaaaagatcaaatatcaactaagatcaataagatagaaagagcgaaacgacatgaaatacgatttcagagaaattgaaccaaagtggcagaaaaagtgggatgacgagggtgtcttccgcgcgggcgaggatcactcgaagccgaagttctacggtcttgtcgagttcccgtacccgagcggagccggaatgcacgtcggacacatcaaggcgtattccggacttgaggtagtctcccgcaagcgccgtatgcagggctacaacgtcctgttcccgataggcttcgacgcgttcggactcccgactgagaactacgcgatcaagaccggcatccatccccgtaaggtcacggacatgaacatcgcgaagttcacctcgcagctgaagcgtgtcggcttctccttcgactggtcgagagtcatcgacacgaccgaggaggactactataagtggacacagtggattttcagaaagatgttcgacgccgggctcgtcttccgcgcgaagactctcgtcaactactgcccgtcctgtaaggtcgtcctctcgaacgaggattcccagggcggcaagtgcgacatctgccacagcgacatcatccagaagtcgaaggacgtctggtatcttcgcataaccgaatacgcggacaagctgctcgagggattaaaaaaggtagattatctcccgaacataaagctccagcaagagaactggataggccgctctgagggcgctttcgttgacttcacgctgaagggcgccgacgaaaagctccgcatctacacgacgagacccgacaccatgttcggcgtcacattcatggtaatggcgcccgagcatccgatactcgaaaaatacgcgtcctcgataaagaacctctccgaggtcgaggcatacaaggcagagtgcgcgaagaagaccgagttcgagcgcactcagctcgtcaaggacaagaccggcgtaagaatcgacggtatctcagcgattaacccggtgaacggcaaggagatcccgatctatatctccgactacgtaatgatgggctacggtaccggcgcgataatggctgttccggcgcacgaccagcgcgactacgagttcgcgaagaagttcggcatcgatataatcgaggtcatcggcggcggtgacatctcgaaggaagcatacaccggcgatggtccgatggtcaactccgagttcctgaacggcatatccacgaagaaagaagccgtcgcgaagatgctcgggttcctcaaagaaaagggcatcggcgagaagggcgtacagtacaagatgaaggactgggcgttcaaccgccagagatactggggcgagccgataccgatcgtccactgcccgcactgcggaatggtcggcgttccgtatgacgagctcccgctgagacttccgaaggtcgagaactttgagcccggagagggcggagagtccccgcttgcgaagatagattccttcgtcaactgcacctgcccgaagtgcggcggccccgccaagcgcgagaccgacaccatgcctcagtgggcaggctcctcgtggtacttccttagatactgcgacccgcacaacgacaaggcgttcgcgtcgaaggaagccctcaactactggatgccggtcgactggtacaacggcggcatggagcacgtcacgcgccacctgatctactcgagattctggcacagattcctctacgatatcggagaggttccctgcgacgagccttacgcgaagcgcaccgcccagggtcttatcctcggcccggacggcgaaaaaatgtcgaagtccaagggcaacgtcgtcgacccgaacaccgtcgtcgacgaatacggcgcggacgtcctcagagtctatatcctcttcatgggcgactacgcgtccgcggctccgtggagcgagagcagcgtcaagggctgcaagcgcttccttgagagagtcgccggtctcaccgacatcctgcgcgacggcgaccccgatccgaagctcgagtcgagtttccacaagactgtgaagaaagtttccgaagacatcgaagagatgaagtacaacaccgccatagccgcgatgatgaccctcatcaacgagatctacgacaagggctccctgacaaaggatcagctcgacgtcttcacccgcattctgtgcccgttcgctccgcacctcgcggaagagctctggtccttcctcggacacgacactctctgcgccgtcgcgaagtggcctgagtatgacgaatccaagactgtagacgacgtggtcgagatagcggttcaggtctccggcaagctcaaattcaccaaggagatccccgcgggaacctcgaaggaagacgcgataactctcgtcaaagccgacgaccgaatgaaaccgttcctcgaaggcaagaccatcgtcaaggagataagcgtcccaggcaagatcgttaatattgtggtcagataaagtaagcagggaggaggaggacccctttgaaaaggggtcctcctcctccctgcaccctccacctcccctgaaactttataaaaattaaggattacgcacagactgacatgagtgcgtaatccttaattttttgaaaagtttacggaagagagggggtgcagggggagaggaaccgcttttcaaagcggttcctctccccctgcgaaacaaacagttacgaccaagttctgtcgttagcccattctttgttccattcgtcggtgggttcccactgaccggggtattttttgtgcatgtgttcagcgatgagttcttcgttgagggaatcgatgccgagaccgggtttgttcgggacggttacaaagccgtctttgatgactggcttttcgagaccgaagacgaggtcgctccaccaggagacgtcggaggagtggtattctatcgcgaggaggttctggacggaggcaccggcgtggacggctgccatgaagcctatggggctttcagccatgtggattgccattgctacgccgtatttttcgcacatatcgccgagttttttcatttcgagcatgccgccgacggtgagggtgtcggggtggatgacggagactccgccggctttcatgaggggttcgaagttttcgtggaggtagatgtcttcaccggtgcagatcggcacggtggtggcgtgggcaattttcgcgaagtgttcggtgtactgccacggggctacgtcttccatccagctgatgttgtatttttcgatgcggcgggcgaagcggatgc

SEQ ID NO: 4273 - DNA, 16587 bp, Unknown
  16S sequences of unknown bacteria
ggggtgttgcttctataatttattatgccgtctcttctgttcgtctggtccaatccagatgccgtatagtccggcgaacgaagaacaacgccaggattatggaggccacctccgcaatggggaaggccagccacaccaagttcaactgccccaggcgagacagcagaaacgccgcaggtactaaaactacaatctgccgtccgaacgacaccgcaaggctgtacattcccctgcccaacgcctggcagaccgaggacgagacaatggcaattccggcaaacaggaacgacgtgctgataatgcgcagcgcaggcacgccaatactcagcatgtccgctgaacccccgaacaggaaaagcagcttgtccggcaccagctggaaaatcgccaggccgatgatcatgatcacttctgcagtgatatatgccaatcggacagcgcgttccatgcgctccctgtggcgggcgccgtagttgaaagaaacaatgggcaccagaccgttgttcaggccgaagataggcataaaaataaaactttgaagcttaaaataaacaccgaataccgccaccgccgtggaagtaaaggcgatcaggattttattcatgcagaatgtcatcaccgaactgatcgacaccatcagcacagacggaatgccgatcatcaggatctgtgccagatattccttgtggggccgcagaagttttacgcgcagctgcacgtcgctgttgaagcgcagattcatgaagagcgccagaagcgccgccgcacactgccctatcaccgtagcgatggctgcgccggccacgcccagcttcggcgctcccagcaggccaaaaatcaaaataggatccagaataatattgatcaccgcacctgtgctttgggtgatcatcgtcagcatggtacggccggtggactgtaagattcgttccagtgtgatctgtgcaaaaaagccgaacgagcaggcacagcaaatgcgcagatatacctcaccataggaggcaatacgcgccatgcctcccgcctgcgccgagataaagaccccggcccccaataatccgatcaaaaggaaaaccgcatagctgatgcccgccaatagcagcccctgcatggcgtagccgttggccgcctcctgacgccgttcccccaaagagcgggaaatcagtgcatttacgcccacacccaggccggttcctacagcgatcataaaattctgcatcgggaaagccagcgacagggcggacagcgcatcttcattcagctgcgctacaaacacgctgtccactacgttatacagcgcctgcaccagcatcgaaacgatcatcggcccggccatattgaacaacagcctgcccaccggcataacgcccattttgttttcggatagttgtttctccatctgttcccgtcatctccttgcatcttccgaaaattctcgcccgtccactaaagtgaacgggcgaaaacagatgttccattcttttttattatatactgatcccgacaccatgcaagagctttttgcacacaatgacgcttttccccattgtatacaagcccatttctggattccctgcaaattttagccacatttcctattgcggcccgcagcacagcaaacgcgcggcgaaaggggaagcgccccccttcgccgcgcgcacaaaagatgattcagccaacggactgccattcgttgatgcccctagtcaaattcggcaccatttgttttttgcgggacaccacgccaggcaaaaacacgctgttttccccgggcgcagcatcggggaagctatggcccacgatggcgccggcatggaagcctgcataaatcagctcagtggactcggtcagaatgttggtaagcatgtagcacaccagatccagcccttcccgctcacgcacctcatcaagataaggcagcagcaaatctttcgccttctgcgcgctgcggtcggacataaagctgctctgtccgatgccgaaatgcacttcaccgcaagcaaaaggcttaaaatcggtgtaaaaaatgtccttggcactcttgccctccaaggatgctcccgcctcaaacatctcattggcatatttgtcaatatcgattccggccagctctgccagatgctccgccgcattacgatccatcagcgtgcaggtgggcgaacggaacgccagcgtatccgacaaaatcgccgagcacatcagtcctgccatttcccgggggattttcacaccattctcctgatacatctgatggatgatcgtgcaggtgcatcccacaggctggttacggaaatacaccggcgcggcggtctgcagtccgctacccagccggtggtgatcgataatctccaggacttcggcctggggcagcccttccacagcctgagccagctcattgtgatccaccagaatcacctgtttgcggcgcagatccatcatattccggcgggagatcataccgtaataacggccctccgtatccagcaccgggaaataacggtggcgaacattgaccatgactttctgtacatcatccacagcggctttcaggctgaaggaaagcaggtccccctttgtcataaaataggacaccggcgcgctctggcttaccagacgggcggcggtataggaatcgtggggtgtggcaaccaccaccgtgccatgagcgctggccatgcgctggatatgctgaggcacgggattgcttccggtgacgatcatacagcccgcccccagctcgatggccagaatctgcgactcggcgcggttgctgacgatcacggtgtcgcccttttcgatcacgctggccattgtggcggcattgcccgcggccacgcagatcttaccgtcgcacacgctctcacaaatgtcaccgactaccatggctccatccagtgtctgcaccatattttcataggtcgttttggcgtcagccatggtatgggcatcaaaggcgtccatataagccgtggctacatcggtcatggtgatcagaccctgcaagcggttttcctcatccacgataggcaacgtgttggcatcagtgtcacgcatcaggttccatgcatctttcatggacatgctgccgctcacgccgtccacccggcggatgctcaaatcctccacctgagggctgacgtcgccgcacagatccggcgcggcaaagccgaaatagctcagcacaaattttgtttcgctgctgagggcgccggcacggcgcggctcataatgcagcgcagggttgatcttatttttcaaataggcataggcgatggcagagcagatactgtccgtatccggattgcggtggccgacgaccaaaaccgttttctgcccctgcggcttatattctgccataagtttttgttcccctctcccgcccgcagccgaacctgcggtgcgtttataaatctcttctttcgtattttacactgacccggcaaaaagcgcaacggggaaaggaaatcttttacaatcaaattccgcttctgcccgctttttttgtgaaaaaagcgggcagcggctgcgccgctgccctgcttgatgccaatagattcagtttccgctgggcggaaggaagggaagaatcgcgccggccagcgtggaagcaggcatcgtctgcagccagatgtgaccgggaccggtaatgcgggtgttgaacaggccctccccgccaaaaagcatgtttttcacgcccttgaccatctgaacatcgatgctgcaggtttcgtccatcgcagccagatacccggtgtccaccacaatggtctggccagcctgcagatcatattccaccaaagaaccgctgatttccaaaaacgccatgccgctgcccgaaaagcgctgcataataaagccttcaccgccgaaaaatccgctgcccatcttcttctggaaaaagatattcatatcgacgcccgcttccgtggccaaaaaggcggacttctgcgccacaatggcgcgctggggagaaatttcaatgggcagaacccgcccaggcatgctggaagcaaaagagatcatcccttcgccctgacgcgccgtataagtacagcggaacagagactcgccggaaaaagcccggccaaacagttttccaatcccgcctccggtattggtgtccatctccatattcggcgacatccacgccatgccgttgctctcacaatgcatggattcattctgcgccagccggcagaccaccgccgggaaaggggttcctacaatttcgtactgcatcatgttcactccttttctgcggcctgtaaaagggatttgcacttttgggcaaaaaccagtataatagccgtattctataatttattatatcggccggcagcacatttgaaaagatggaattttcttaagattgccggcaggagggatttatggcaaagtcaaaaaagaaaaagaaaaacacccgcatttccgcagaggaaaaagcagccctgcgccaggagcgctcagaattgcgcgccaagcagaatcgcaaagccatactggctctggggggactgattatctgtgctgcgttgctgatcgccatgctggtgggcgccggcagcaccggcaaaaaatacaatatggctaagtttgaacagcttcacaacggtatgagctatgccgaagtggtcgaagtgctgggcgccgacggtgaagtggccaacgaagacggcagcagtcaggaaacacctggctcctacatctggacaaaccgcaacggcagcagtatcaccgccgtattcgatgaaaacgatacgctggtcgctgcttatcaggacggactggataaataaggcgcaaaaaagccccgtacaggcggggcacagcttgctgatctaaaaaacgccccgcctgcggcggggcgtttcagcgttgactgatattccggtcgtcgccatagatcagatcgtccacatcgctcccatcgccaaagcgggcggaataaggttcattgttgttcatatagatctgcctccgttttgagatactcataacagtatatgaaaccgaaggcaaaaaatgtgtcggacgccggggcatggaaaaatcttcctgctccggcgcattcggtgctccccgttcagtccgccctcaccgcatgtcaagaacatacgcctcgacggccgctgccgcaccgtcgtcatcgttagatcctgtaagcacatcggcatgggctttgacaatctcctcgccgttggccatcgccacacccaagcccgctttttcaatcatatccaaatcgttttcgctgtcgcccaccgccatgatcgccgtacggccgatgcccagcagctcccccagcttcagcagagcgctgcccttgcctgcgcttttgtgaatgatctcaatattgccgacgccgccggaaacaaaagacacttccggatattgccgcacgactgccaccgtttcctcccgaaaccgggctttgccgtccggcgttttcagaaaattgatcactactttttccggcgcctcgccccgctgcgccacataggcaggcagatcggggacaatcttgcgcgaggaaatcagatactcctgcatggccgccaccaggtcgagagcacggatacgctgccggccgatctcttccatataaccccagtcgccgataaacgcgccctgcaccacctccagcgtccgggtacggcgaagaatatccaccgccgcatccagcggcatgcaatcggtatacagccgttctcccgtgcacagatcacacactgccgcaccattgctcaccacagcgtagcgaatgcccggaatggccagcagcgcctgcggcagcccgatccggggccgccccgtggccggcaccaccgcgacgcctttccgcgcggctgccgccaggacggcacaggtatgcgctgtcagctcttttttgctgttgaacagtgtcccatccagatccagtcccaccatacggatcgccacctgaagcactctctttcccggaaaaagcatttgctttctccccgttcctgcgttatcatgattatacaggcttttccctgcctgcgcaagataaaggaggccgtgaaccccatgaaacaggaactgcaccacgacggcagcgatgccttatacgaaaccgttctcaaactccaaagcaccgatgaatgccgcgccttttttgaggatatttgctctctccacgagctgcgcaccatcgagcagcgcttccagctgctgtttctgctcacttccggccgcagttactcggagatcggcgagatcaccggcgcttccagcgccacgatcagccgtgccagccgccagattgccaacagtcattgcggcatcgcggagatcatcctgcggcataccaaagcggaagactaagtttcatggtaaatgccattgcaatacccctctgcatattttttgttcttatgcagaggggtattgcatcaaatatatttatcctttcaaacgctgtgtcccgttgagcaccgcttcgcacagaagatctccttcgtaacgcagtttcaatgtaaaaaagtcatctccggcagccatcttctgcagaaagatacggtcgccctcccaggtgggcagcgcaagcacgttctctttcttgacccaaacgagctctccttcatcgcatccggccagcgtaccggtaaaatccgttgcgtgaaaaaggtacatatattccccttcccaggtgtcggacacaaaggtgatcacactgcacaggcgaaaacgcgtcagcgtcagtcccgtctcttcccgcacctcccgcagaagacattcctccggactttcattctcttcaaattttccgcccacaccgatccacttatcatggttgagatcattttcttttttggtgcggtgcagcatcagatagtttccatcccgttcaatatagcacagagttgtatgtttcatctatttccgcctcccgctttattgtaccggagacggcacccggatacaaggggccttttgcccatgttcacagattgttcacataacattcaaaatttcgtaaccactttccagcagcaacctgttaggataagatcaaagcaaaggataccatgcttcataaaaatcattcttttcttttttactctctctaacacaggctgcgttcctgtttcccccatggggcgtagccaaccactttttaccgtaccggtttccccccatctggtacgttttctaaaaaagctgttcggcgtccccgccggacagcttttctcgttttcctccctattttttacaatcgtttgaaaatgtaaattgtaatcccgaagcggcttttttataatagaacaatcccacagataccattattctgttttttaccaaaaggaggcccctgctgtgacaatcggcatcccaaaggcattttattattaccgctacggcgaattgtggcgcacatttttccgcacgctgggctgcgaagtgatactcagcccggacacgaacaaacagtttctcacagagggcagcaaatactccattgacgaggggtgcttgtccatgaagatttatctgggccatgtcaaatggcttctgagccgctgcgactatgtgtttgtaccccgcatcgccaattttggctgggtggacaccggcgtaaaaaagatctgttgtccccgattcgaggcactgcacgatgtagtacgcaacacgttccgcgcccaggccgaccagattctcggctgtcagatcgactatattgatgtgaacaaaagcctcggcgtacacacggaggagcacgcttttctggaactgggccgcgcactgggcgcttcccggtccgaaacggtgcgcgcttaccgccgcgccaaggctgccgacaagcaggttcgcgccgcggccgcacagcaccaggagacgctgcttgccggcagcggtacaaaaattctgctggccggccatggttacgtgctccacgatccttttgtgggcgtaccggcccaacagatgctccggtccctgggcgtaaaaacgatcttttccgatgcgctggaccgtgccgcctgcctgagagcaggcgatcgcctcagtcccacagtgccctgggaggtcaaccgggaaattttcggcgcagtgcaattgtgccgcagccgcgtggacggtgtgatcctgatgagcgcttttccctgcgggccggattccatgaccaacgacatgctggtgcgcctggtcaaggatgtgccgattttaacgattatcctggacaaccagtccggcagcgccggactggaaacgcggctggaaagctttgtggatattctgcgtttccgcagagcctccgcagacaaaaaggaggcatgagcgctatggcaaagcgaagaatcggcttcccgcgcatggataattataatgtagccctcaaatatctggtcgaaacaggctgtggctgcgaatatgtcatggctccgcccatgacgcgcaaaacattggagctgggcagcaaatacagccctgactttgtctgcgccccattcaaatacaccctcggttccatgctggaaatgctgcaaagcgaaggcggtgtggatgccattgtggaaaccggcggcgtatgccgcctgggctattacggcgctctgcaaaaacagatcctgcgggatctgggctacgaggcagacttcatcgacctggcggaaatgggcaaacacaaactgcgcggctattacgccgccgcaaaacggatcaatccggccatctcgatcgccaaagcggcacggacgctgcccgacgcgctgaaagccgttcgttatattgacgagatggaaggccgcgtacgcctcgaccgtggctttgaacggcagcgcggcagcatgaaagcggtgttcgatacgtttttacaggagatatcttctgcaaagaatcgaaaaagcctggatgcagcttaccagaaagcctccgcagcgctgagcgcagtcgccctggacaagcccgaaaccccccttcgcgtggggatcgtgggcgaatattacacggtgatggatgacttcggcaatcacaacgtggaacagattctcggctatatgggccggggtgtggaaatccaccgctggatgaccttcacccaccggaatctggaatatgacgagcaggccgacctccaaactatcgccccctatgtccgctattccatgggacccactacctcagccaccctggctggcgccatccgctacgccgatgccggcttcgacggcattgtgcatgtcaaatccttcggctgtacgccggaggtggatgctatggcggtgctgcagaacatcagcgctgaccgcggcattcccatcctctacctgagctacgattcccaaaccggcgacgcaggcattcagacccgcctcgaagccttttatgatatgatcgatatgaaacggagaaaacagccatgaaacacgcatatctcggcattgatatcggctcaatttccaccaagggtgttatcatcgatgaggacaaccgctttctggccagtgaatacatctggacagaaggcaaccctatcgaagcggtacgccgcctgctgaaactgctggagcagcagttcgacaaggagcactacactgtggtgtccgtaggcaccaccggcagcgcccggcggcttatcggcgcagtggtgggcgcatccatggtgaaaaatgagattacagcccacgctgtgggcactactacgctgcacccgaatgtccgcaccatttttgagatcggcggacaggacagcaaaatcattttgctggaaaacggcgtggtggtggattacgctatgaatacactctgcgccgccggtaccggctcctttctctccagccagtcccaccggctgggcgtagaggtggaagaatttggtcatattgcgcttaaaagcaaaacccctactcccatcgccgcccgctgcaccgtatttgccgaatcggatctggtgcacaaggcccagatgggctacagccgggaggacatcattgccggactctgcaaggctgtagtgaccaactatctcaacaatgtgggcaaaggcaagcgcattcaaagccccattgttttccagggcggcgtgagcaaaaatgtgggcgtagtgcggtttttcaaagaagccaccggcgaggacattctggtggacgacgccggccatttgatgggcgctttcggcgtggcaattctggctcgcagcagcggcgtggaaaagcccttcgatttcagcgtcacagacgatcgcttccagacccgggagatccactgcggcaagtgcgccaaccaatgtgaaatcatctgcgtctaccgcggcgagcacttgatcgatgcctggggaaaccggtgcgaaaagggcgccatgaagttggcataaagccggtgcaaaaaggaacaagggcattccctgcgctgtacgcagggaatgcccttgttttcttttgccgcatacatattttgcagcggcgccgtctccgggaatgtatcggaaaaatctttacctgcaaaccatgatctcgtgccgaagggtatcattccgctcaaacattcttcaaacggaacagtttctttggcgtatcataaaacatcattttaccaatacgttttgctgcttcaacatcaaacagcccctcttccactttgatggccagtgcacggctgatattcatccgcgccatatgctggtggccgctcacgccgtcgataaagcagtaatctccgccaaatgcattaatcttgttcagcggcaccgaatcggcccactccaccagagaattgacacacgccgtcggcgagataatatgcgcccaacacatatcaatatagacattcgggaaaaccttcgccaatgcagacagcgtatgttggtacggatagccaatatggaaaatatcaaaattcacatctttatactgcatgaacaggttggtcagcagcgtaggatcgctgtaggaaatgatattggcattcccttcctgcagccccgtatggatctgaaagggaatgtggcacttattcgcccagcggcagagaaaatgcatcatataatcctggaacttttttcccacacagtagacttcatccgcccagcaatactgcccgcccacatggaaaattgtgttgaagtccgcctcggcctcgctgaatgtcacggtatcaaaaaacaacggccacaatatccagtatgaaatccccgaacagtttgcccaagatgtactgtcgtttatcaacgcgtgattctgtttccggttttctttttgcgccccgcaaaggcatttgcggggcgcacctctttcagcgggcatcccccggcatttccttttctgtgtctcttccagcggaaaaagaacagcaccgaaaaatttttcttcttgccaaacactgtcgaatccgctatagtatcctttggaaactatggcacaaatttgtgcttacttgcgtcttcgtttacaacggtttatgatgattccaacaactagacagggggcaactcaccatgaatccaactgccagaaaatatatcgatctgttccgcgccgtcaaagtcgcatccgctgccacagtggacgctcagggccggccccagagccgcatcatcaatgtaatgctggcgctggacgagggcatggtcatcgtcaccagccggggcaaacccttctggaagcagctcaccgaaagcgggctcgtcgctttgagcgccatgtgtccggaatgccagagcctgaaattcaccggctctgtccgccgaatggaggactcccgcgcatgggtagatgaagtattcctccacaaccccggcatgaatgaggtctatcccggtcagagccgctatgctctggatgctttcctgatttacgaaggcgagggcgaatggtttgacctgctgcaccatccgatttcccgcaaacgttttgcctatggcggcacggagatggaactggtaggattttccattctggaaacctgcaccggctgcggcgcatgtgcttcggtctgcccgcagcagtgcattatgcccggcacaccctatcagatcgcccagatgcactgcctgcagtgcgggctgtgcaccgagcattgcccggctgaggccattgtgcggctgcacgcataacatagactctgtaggataccaacacacaaaggagcggtaggcaatggatttcagctttgcaaaggtgcttcaaatctatctggagcgctggccctggtttctgggcatgattggccagcagcttttcatctccctggtttccatcgccatcgccggtacgctgggtctgctgattggtattttcatcgccgagcatcgccgctttgccgaaccggtcatcgccgtgtgcaatgtgttttataccattcccgccatcgctctgatcgccctgctgattcccattgccggcatcggcgccaaaaacgccgtgatcgccattatcctgtacggcctgatgcccatggtgcgcaatacctacaccgggatcacctccatcagcccggaactgctggacgctgctgtgggcatgggcagcacgccgcgccaaatcctgatgcgcatcaaacttccgctggcttcggccaccatcctggccggcgtgcgcacgctggcggtcatgtccatcgccaccggctccatcgccgcattcattggcggcggcggactgggcgaggctattttccgcggcatcaccatgtacaatgtggaaatgaccttttccggtgcacttcttctcgttttgctggctttggcctgtgactacagcctgagttttttggaaaaacatattaaaaagaaatggagaatgaactgacatgaaacattacaagcgttttctcgccctgtctgctgcggcagcgatggctgtatccctggccgcctgcggcagcggcggcagcaccaacccctcctcggccgaagatggcagcgtgaacaccgatcccattcaaatcgccaccaaacccatgaccgagcagtacatcctcggcgaaatgctcaagcagatcatcgaagccaagacggattatacctgcgaggtgactgaaggcatcgccggcggcaccaacaacatcatgcccgccatggaaagcggcgagtttgatctgtatcccgaatatacctccagcggctatgtactggtgcttggtcacgacgccaccggcgtagacgacaacgccatgtgggaacagatcctgcaggaatatcacgacaactacaacatgacctgggtcggcaaatacggcttcaataacactttctgcctggccgtgcggggcgacgtcgccagagaatacaatctgaaaacctcttcggacttgactgccgtggccgatcagctggtcttcggcggcaaccccgattatattgagcgcgccgacggctatccccttctctgcgaaacgtacggctacaacttcaaggatacccgcggcatcgacatcggcgtgaaatacgccgtgctggaaaacggcgatatcgatgtgaccaacggctttaccaccgacgctcagctgagcgctcaggatgtagtggttctggaggacgataagcaccttcaggtaaactatttctgctccactgtggttcgagaggatactctggaagcgtatcccggcctggaagatgctctgatgctgatggatggtatcctgagcgacaccgatatgtcccgcctgaactatctggtagaggtcgaagaacaggacgagagcgatgtggcccgcgattatctggtggaaaagggcatccttgaggcataatccccccgcagagcacttctcaggaaaggagtccgaacgtatggaagaatgtattcgttttgaaggcgtgtgcaaatcttatggcaagcacacggtgctgcaggacttcaacctgactgtctacagcggagaatttttgactatgatcggccgcagcggctgcgggaaaaccacggccctgcgcctgatcaacggccttttgacgccggacgccggacgcgttctggtagacggcaaagacgtagcccaaacggatctgatcgagctgcgccgcggcatcggctatgccatccagagcgtgggactgttcccccatatgacggtggaaaagaacatcatctacgttccctccctgtccggcaagcaaagcagggagactcgcgcaaagcgcgtgagcgaattgctggaaacggtgggattgaatccatccatggccgaccgctatcccaacgagctttccggcgggcagcagcagcgcgtgggcatcgcccgcgctctggcggccaacccgcgcattctgctgatggacgaacctttcggcgcggtggatgaaatcacccggcgcagcctgcaaaaggaaatcctgcgcctgcagcgggatctgggtatcacagtggtatttgtgacccatgacatcaaggaggccctgcatttgggcagccgcgtgctggttatggaagccgggcgtatttcccagctgggtacgccggaacagatcaaaaccacccccgcagacgcatttgtgcgcgagttgatttttggacaggaggaatgacgccatgcccgcacccaaaaccgcactgccggtctgtcccgtggaagtcacactggcactgatcagcgaccgctggaaagtgttgattctgcgcgatttgatgcaggatacccggcgcttcggtgaactcaaacgcagtgtggggcatatcagccaaaaagtgctcacaaccaatctgcgctccatggaacaaagcgggctgatcaaccggcatgtatacgccgaggttccgccccgggtggaatacagcctgaccgatttgggccgcagcctgaaacctgtgctggacgccatgcgcacctggggcgaagagtaccgcagtatgctctcctgatcgatgattaaaaaagccttcggcttcctgcaggaagccgaaggcttttttcttatttcttttcagcgcggtcagtctttccccgcaaaaagcagtaccactgaaccataccgaccgccagtccgccgaccatgttgcccagcgtcaccggcaggagattacctatcagaaagcggccccaggtgaggcagcttccatcgatcccttccaacacaccggcatacgccggaagatcctttgccagcagggccacgggaacatagtacatattggccacactgtgctcaaatcccgacactacaaaaagcatgacaggcagataaatccccaaaaccttgccgggcaccgaccgggaagaaagcgccagccaaacggcaacacacaccagaatattacagacgacgccgcgcagaaaggcgtccgaaacgctcaggctgcatttggccacagccgtgctcattgcagaagcagccagcgccccggaaaaggacgcgagctgatggctgtacaccgccgcagcggcggccaaaacagcgccgacaaaattgcccagatacaccacgatccagctgcgcagcacctgtcgggctgttacagcccggctgagccacggaatggccagcaggcaattgcccgtgaacagctccgctccggtcaaggtcaccatcacaagccccgccggaaagacgcaggcactgaccagccgcgccgccgcaggcggtacagacgcggcagctgtggacgcgcccacaccggccaggccaataaaaaagcctgccattacggcaaggcaggccattcgtcccacaggcaacagtactttttcccggcccacagcaagaaaccgtgcagcggtctcagcgggtgtattcatattcgatcgatctccttttttactgtgcagcatgatttctttgtttctttgctgtcttcttcccgcagcagcgcttcatattccccgcgggtgttgacatttttcaccatgctgtcgttccatcccaggtcggcaaactcgatatatcgggtgggcacacaatcaaacagcgcacggggccggcgtacccctgccgaacgcatctgttccagcaccggcagcgcatctttgtgataaatgctgcaaagcggctccaaccacgcgtcccggcaaggcaccagacagcacacgcccggccggatctgcccggccagcgtctgcagtgccagagctgtcaggcattgcagatcgatggcagtcaccagcacgtaaggatttcgggccgcgcgcagcagctgataaatcccttccaccggaccgaaatccgggagctgatcttccaccacccgacagggcgcgtccgcccacgctctccgatcctccacagaaagcagcacttcgtcaaattcccgcagttcccggagcaaatgagcaagaaaggtctctccgccgtgccagagccgtgccttgtcctctcccatgcgtttgctcttcccgccggccaaaatccccgctgagatccgccgctccatggtcctgcctcctctgctctttcgcatctgcttgtccctttcccgcgctgctccattttgagaacagcgctttcccgccgggatagcgccaggtaatacaggaaccgaaaggggggatcctgtcccccctcccgactcattcatatagcgggaagtgcttgaccagcgcagccacgcggcgctgaatctcctcttttttgccctcgaaatcctgcaggcagtcggcaatgcactcggcgatctcctccatttcgcc

SEQ ID NO: 4274 - DNA, 24060 bp, Unknown
  16S sequences of unknown bacteria
caatcgttccgatatttacatgcggtttcgtacgttcaaattttcccttcgccatttttggaaatctcctttgcttacattaaattgattggttattgtattgatcgaagcttatttgttcagtaccttttccagcacgaacttcggtgcttcttcataatgagagaactgcatggtgaatacgccacgtccctgcgtagtgctgcgcaggtctgtcgcatagccaaacatttcgcttagcggcaccattgcacggatcacctggccgttaccgcgggcttccatgccctcgatacgtccgcggcgtgccgtcaagttccccattacatcgcccatgtattcttccggaatcacaacctcgatcttcatcacaggttccagcaaaaccggaccggctttggccataccttccttaaaggccatagagcctgcaatcttaaaggccatttcagaagagtcaacttcatggtaagaaccgtcaacaagcgttgcgcggaagtccattacttcgtagccagccaggacgccgctctgagacgcttcgcggatgccctgctctaccgccggaatatattccttcggcacgctaccgcctacagtcgcattgacaaattcaaacccagaacccggttccaacggttcaaactccactacgcaatggccgtattgaccacgaccaccggactgacgggcatatttgctgtcctgcttaaccttcttggtgatggcttcgcggtaagccacctgcgggttaccgatgttggcttccaccttaaattcgcgcaacagacggtccacaatgatatccaaatgcagctcgcccatacctgcgatgatggtctgccccgtttcctgatcggtataggcgcggaacgtcgggtcttcttccgccaacttggccaacgccatagacatcttctcctggccagccttggtcttcggttcaatagcgacctgaataaccggttccgggaattccatggactccagaacgatctggttgtgctcatcacacagcgtatcgcccgtagaggtatccttcaaccctacaatggccgcgatgtcacctgcatatacctggtcgatctcctcgcggtggtttgcatgcatctgcatgatacgacccacgcgctcgcgtttaccctttgtggaattgtacacatagctaccggatttcagcgtaccggaatatacacgcacatatgccaatttgccaacaaacgggtcagatacaattttgaaagccagcgccgcaaacggtccattgtcatccgcttcgcgctccagctctttttccttatcatccggatcagttccctttgcagggggaatgtccaacggcgacggcataaagtcgatgatggcatccaaaagcgcctgtacgcctttgttacgatagctggtgccgcagcataccggcaccaattcgcctgcgatggtagatttacggatcgcagcgatgatctcttcgcgagagagctcttctccgccaaggtatttatccagcagttcctcggaggtttccgcaaccgcttcgatcatagccgtacgatattcttccgccttatccgccatgtctgccgggatctctttcacagtcggatgtccttcgtcgtcataataaaccgcattgttttcaatcaggtctacaatgccgacaaaatcagcttcagcgccgatgggcagctgaatgggaacagggtttgcgcccaggcgatccttcatcatctggattacgttatagaaatccgcacccaggatgtccatcttattgatgtatgccatacgcggaacgccataggtctccgcctggcgccataccgtctcgctctgcggttccacgccgcccttggcacagaatacagccaccgtaccatccaaaacacggagagaacgctctacctcaacggtaaagtccacgtggccgggagtgtcaatgatattgatacgtttgcccttccaaaagcaagtcgttgcggcggattggatggtaatgccgcgctcctgctcttgaaccataaagtccatagtggcggcgccttcatgcacttcgccaattttatgcgttttaccagtatagaagagaatgcgttcggttgtcgtcgttttaccggcatcgatatgtgccataatgccgatgttacgagtgttttctagagaatattgtctagccacgcgttctccctccttccataggaattattgacagatagccacaattcccccagtgtgggggaataggcaatccaggacataatcttagtattgttcttaccagcgataatgcgcaaacgctttgtttgcttccgccatacggtgcatatcctcacggcgctttaccgttgcgcccgtgccattggctgcatccatgatttctgcgctcaagcgctccctcatggtcttttcgcctctctgacgagagaacagcaccagccagcgaatcgccagcgtctggcgccgctctgcacgaatctcgatcggaacctggtacgtcgcaccgccaacacggcgagccttcacttccagctggggtttgatattttccatgcattccgtgaacacttccatcggatcacggcctgttttttctttaatcatatccagcgcatcatatacacatttctgtgctacgccgcgtttcccgtccagcattacctggttgatcagctttgtgatcaccgtgctgttgtaaatgggatcggccaacacttcgcgcttggggatatttccacgtcttgccatgggtttacctcctcgtatttatgccgcattgctgcggccgctattcactgttttgccaaacggcggtacgttacgactttttgccgcgttttgcgccatacaacgaacgggactgtttgcggtttgcaacgcccgccgtatccaacgcgccgcgaacgatgtggtaacgaacgcccggcaggtcctttaccctgccgcccctgatcaaaacagcggagtgctcctgcaggttatggccgatgccagggatatagcatgtaccttccatgccattggtcaagcgtacacgcgcaattttacgcaacgcagagttcggttttttcggcgtcatggtacgaacagcggtgcaaacgccacggcgctgcggacactgtttcaagatcggagcattggatttatactccaccttttttctgcctttacgtaccaactgattgattgtcggcattgagatcctccttccccataggggtgataagtagctataaatccctagcaacccagaagggattttacgcgggtttcaatatgcccaccacggcagcgcctacgttgattccgcattgcttgcccaactctttcatagaggctgtccattcaaacggaacccccgcctgctctaacgcggcagtcaatttatcttgcagcgctttgtcggcatcctgggccagcatcgcccgggccaatgtgcgctgttccaaggcgcgcatgacctgtcttgtgccgataacgcatgcttgtgtgtctagtatttgctgcattttcataaaactccctaaaaatgcccctagacggacactcgaatattttagcaaaactaaattagcgtgtcaacgctcttttcttgcggtttctcttgtttttcttggggtcgccgtgcaccatctgggagaatgttacgcgggtatccacaagatcctctggcatctccgcatagatggttgccttgagccaattcatccctcttacataccaatccttatccttaagcggcgcaagggccggtagatcaaatacctgtaccctcgtctgctgcccgattttgttcaagattgcctttacgctcacgtagtagatcccgaagctcgccaaacagcatcctgcaaataccgtcaaggggataaagccagtatggtctggcgattgcggcacgctgatattgatgatcgccgtggcagcaaacgccagaatcacacatacgaccatcatcagagagcgcagccatttggtcttgcggatattctgcttgcatgcttggcaggtcggaatctcaatggcaatttcaccgccgttgatcttttctccgctgcctgccagatcctttcttacatccatgcacttgttggtgatttttgcataggtttgggtcgttgccttgcgcgctttcttgcggcacaaggcacaatccccttcctcattgcccacctcaatggggtatgcatccagcagcccttcgttcaaatagtgatcgataacgatctgctttcgctcctcatctgtcatggatttgtactcacaggcgttgcagcgctgcacctcctgcttggtatatttgcagagtatggatgcttttagatcgcatccgtggtcttccagttcacgaaccagtgccatacatggtgcctcccttgttttttagagggacaaatcgttcatgtcaacatcgataaatccatcgggcgttgtatcgacaaacagcggcgtttcatcttcgctggtatacaggatatcctcggaataatcgcgggtattctccttctttacctctaaatcgcgataccgcttgagccctgttccggccgggatgagcttgccaatgatgacattttccttcaagcccagcagcggatccgtcttgcctttgatggccgcctctgtcagtacgcgggtcgtttcttggaacgaagctgctgacaagaagctgtctgttgccaaggaagcctttgtgatccccagcagcacatatttggcgctggcggtctgtccgccctcttgaatgacgcgttcattttccgactcaaagcggtgtacatccactatttcgcccggcagcagatccgtatcgcccgcctgctcgatctttaccttgcgcagcatctggcgcacaatcacttcgatatgcttatcgttgatctctacgccctgcaagcggtacaccgcctgcacctcacgcgccagatagttctgtacgcccttgatgcccttgatcttcaaaatatcgtgcggatttaccgggccctccgtcaattcctgcccagcctccagaatatctccttctctgaccttcatgcgggaaccaaacggaatcaagtaggtctcgctttctccatcgtcattggtaaccgtgacttcgcgtttctttttgttttcctgaatgctgaccttcccggaaatctcagtaatgactgccaagcctttgggcttacgcgcttcaaacaattcctctacgcgcggcagaccttgtgtaatatcctctgcgcttgcaacgccgcctgtatggaaggtacgcatcgtcagctgtgtaccaggttcgccgatggactgcgccgcgatgatgcctaccgcctcgccgatattcaccggctggccatttgccaggttcgctccgtagcacttgctgcaaacgccatgctttgcacggcaggtcaacacactgcggacctgcacttcctcaaaaccggcttctacaatggcattcgccatatcctgcgtaatcatctgattgctttccaccagcacttcgcccgtttccggatgcaccagtgtttctacactggtacgccctaccaagcgatccaccaacggctcgatgatctcgttgccgtttttgatatcgctgaccgtgatgccgcggatcggctcccctgcctcagcaaagcaatcctcttcgcggacaatgacatcctgcgaaacgtctaccaggcgccgggttagatagccagagtctgccgtacgcagcgccgtatctgccaaccccttgcgggcgccatggctggagataaagaattccagtaccgtcaagccgtcacggaagtttgcacgaattggcagctcgatgatcttaccagacggatccgccatcaaaccgcgcatgccggccagctggcgaatctggtttgtcgaaccacgggcaccggaggtcgccatcatgtagatggggttaaattcatccagcccattcatcagagcatctgtaacctcttttgtggtgcggtcccaaacggcaatgacctctttttcgcgttcggcattgctcagtaggcctcgattgtataggctctgtatctgggaaaccttctcatctgccttggccagcagcgctggtttctcctccggcaccgtcatatccgaaacgctaaccgtgatagcgccctttgtggaatacataaatccgagacgcttgatctcatccagcatcgcagccgttttggtcgtatcataccgttggaagcagcgctcgatgattttggacagctgctttttatcgacggtaaactcaatttccaaatcaaggcaatgctcttcatcagtgcggtctacataccccagatcctgcggaatgctctggttgaggatgatacggcccaccgtagtatcgatggttttagagatgcgtttaccattaaactcgcccgtgcggcgcaccttgaccttggcctgcaatgccacataccccagctgataggccatcacagcctcgttttcatccgcaaataccgagccttctcccttggcacccggctggataatcgtcagatagtacattcccataaccatatcctgcgtcggggaaacaaccggcttaccatcctgaggttttagcatgttgttcaccgaaagcatcaggaacctggcctccgcctgcgcctcaacggacaggggaatatgcacggccatctggtcgccgtcaaagtcggcgttgtatgccgtacacaccaacggatggattttcagcgcgcggccttccaccaaaatcggctcaaatgcctggatgcccagtctatgcagcgtaggggcgcggttcagcagcaccggatgctctttgatgatatcttccagtacatcccaaacccggctatccgaacgttccaccagctttttggcctggcgcacattgtggctatggttttcctgtaccagttttttcaatacaaatggcttaaacaattccagcgccatttcctttggcaggccgcattgatacattttcagctccggccctaccacgataacgcttcgaccggaatagtctacacgtttgcccaaaaggttttgacggaaacgaccctgtttaccgcgcagcaaatcggataaggatttaagcgcgcggttccccggccccgtaaccgggcggcccctgcggccgttatcaatcaaagcgtctaccgcctcttgcagcatgcgcttttcgttgcgcactatgatatcgggcgctttcagctccaacaggcgttttaagcggttgttccgattgatgactcttctataaaggtcgttcaaatcgctggtagcaaaccggccgccgtccagctgtaccatcgggcgcagctccggggggataaccgggatcacatccaggatgatccattccggcttgttattggattttctaaatgcttccacgacttccaagcgcttgatagcacgcagccgtttttgcccggaaaaatcgttaacttcctttttcagctgttcgcttgtagcttccaaatccactgcctttaacagctcttttacgctttctgcacccatgccaacacggaatgcgtcacggccgtacttttcctctgcctcgcgcagttctctatcgttgatgacctgcttataggtcaaattcgtgttgcccggatccaataccacataggcggcaaagtacagcaccctttccagtgagcgcggcgacatatccagcagcagacccatgcggctggggatgcctttgaaataccagatatggctgaccggggctgccagcgtaatatgccccatgcgttcgcggcgcactttggcgcgggtgatctctacgccgcacttgtcgcacaccatgcctttatagcgtacgcgcttgtattttccgcaatggcattcccagtcctttgtaggtccaaaaatgcgttcgcagaacaggccgtccttttcaggcttcaacgtccggtaattgatggtttccggctttctcacttctccgtgggaccaggtcaatatctgttccggagaagccaagccgatctgtatgctgtcgaagttgttgagttctaccatgaagcgccaacctccaaatctatcttaacagtacaagcgtgcttattcttcatcatccaggtctgcaaaggcgtcgtcatccaatcccagcagatcgtcgtccaatacgatctcatgcaccccggcaatatcgaacgcatcgccgccatgggcatcctgaatatccgtctcgtcgcccagatcgccgtccacgctctggtctgctgcctgcacgtagtccgcgctttgcagcagaatatttctgcgttcctgctcgtggcgatccatcagctccatctcttcctccgccgaatcacggatcttgatctcctcatggttttcgttgagcaccttaatatccagcgccaagctctgcaattctttaatcaaaaccttaaaggattccggtatgccaggctccggcgtgttttcgcccttgatgatggcctcgtacgtctttacgcggcccaccacatcgtcgctctttaccgtcaggatctcttgcagggtatgggctgcgccgtacgcttccagcgcccaaacctccatttccccaaaacgctggccgccgaactgagccttgccgcccagcggctgctgggtaaccaaggaatacgggccggtagagcgggcatggattttctcgtctaccaagtgatgcagctttaagatatacatgtatcctaccgtcaccgggttttcaaacggttcgccgctgcggccgtcgcgcagctggatctttccgtccgcagggtagccggctttcaccagcagctcctggatctcctcttcggtcgcaccgtcaaatacagaggtggcaacctcaaagcccagcgccttggccgccaagcccaagtgtgtctccaagacctggccgatattcatacggctcggcacgcccagcggattcagcacgatttccaacggcgtaccatccggcataaacggcatatcctcttccggcaaaatacgggagataacgcccttgtttccatgtcggcccgccattttatcgcccacgctgatcttacgcttctgcgcaatgtatacacgtaccagttcgttgacgccggccggcagctcatctttattttcacgcgtaaagatcttcacgtctacaacaatgccgccttcaccatgcggcacacgcagcgaggtatcgcgcacctcgcgcgccttttcgccaaagatggctctaagcaggcgttcctctgccgtcagctcggtttcacccttgggcgtcaccttgccgaccagaatatcgccggagtgtacctccgcacccacgcggataatgccctcatcatccaaatccttcaggccctccggccctacgttcgggatgtcgcgggtaatctcttccggccccagtttggtgtcgcgtgcttcgcattccagctcctcgatgtgaatagaggtaaacacatcctctttcaccatcttttcgctgatcagcatagcgtcttcatagttatagccctcccacggcataaagccgatgaggatatttcgtcctagcgcgatttcaccctggctggtggacgggccgtccgccagtgcctggtccttgttcacgcgctgccccgccgtaatcagcggacgctgattgatacaggtgttttggttggagcgcttatatttaatcagcttaaagcgatcggtcacgccgtcgtcgccttcaatgacgatttcatcggccgtcaccttcttggccacgccgtcgcgcttgctcaaaaccaccatgccagagtcatgtgcggctttgtattccatccctgttcctaccaccggtacctgcggattgagcagcggcaccgcctggcgctgcatgttagagcccatcaatgcgcggttggcatcgtcgttttccaaaaacggaatcatcgccgtggccacggatactagctgtttgggggaaacatccatcaaatcgatctgttcccgcgggaattcattgatctccttgcggaagcggctggttacgcggtcatgcgtaaagcggccgttttcgtccaccgattcgttggcttgagccacaatgtagttgtcttcctcgtccgccgtgatgtataccacttcgtccgttaccacaccttcgccatgaataaccttgcggtacggtgtttcgataaagccgtattcgttcacgcgcgcatacgtggccaaagagccgatcaagccgatgttcgggccttccggcgtttcaatcgggcacatgcgtccgtaatgcgaatgatgcacgtcgcgcacctcaaagctggcgcgctcacggttcagaccgccaggacccagcgcagacagacggcgcttatgcgtcagctctgccagtaggttggtctgatccataaactggcttagctggctgcttccgaaaaactccttgatggccgcagacaccggacggatattgataagattgctcggcgttgccacatccatatcctggatgctcatgcgctcgcgcaccactctctctaggcgggacagccccacacggatctggttttgcaacagttcgccaacgcagcgcaggcggcggttgcccagatggtctatatcgtcagtacgccctacgccatgatacagacagatcatatagtttaacgacgccatgatatcatccgggtggatgtgctttggcatcaggtcatgcacacggtttgccatttcacggcgcagttcaccctcctcccagctctccttgctgttgaggatccccataaaggtcgggaaatgcgctttttccgtaatgccgatttcctttaagtcaaagtctacaaagggcgccaggtctacaaagttattgccgaaaatcttcagcgtcccttcctctacgaccacttccgcctcattaatgccggatgcctgtaggcgttctgcctcggcacggtctatctgctggcccgcaacagccatgacctctccagtatacggattgatgacgtctgctgccagcgtctgcccggccaaacgatccacaagacctagttttttattgattttatagcggcccacacgcgccaagtcataacgacgcggatcaaacaataaagaattaaacagggaacgggcgctctcctccgtcggcggttcacccggacgcaggcgcttatagatctcgatcacgccttccgggtccgtcttggcgctgtccttacggatggtatcgatgataagcttctcttccccgaactttgccaggatctcctcatccgtcccacagccaagcgcgcgcatcagcacggtagcgggcagcttgcgcgtacggtctacgcgtacccacatcacgtcgttggcgtccgtttcgtactccagccaggcgccacggttcggaatgatggtggatgagaaaagctgtttgcccatcttgtccgtttccatattgtaataggcaccgggagaacgcaccaactggctcacgattacgcgttctgcgccgttgatgatgaaagtgccggtttccgtcatcaaggggaaatcgcccatgaagacttcctgctctttcacttcgcctgtctcacggttaatcaggcgcaccgtcacccgcaacggcgctgcatagttgacgtcgcgttccttacactcttctacagaatatttcgggttgttatccagcgtataatccacaaactccagcactaggttatcgccataacccgtgatgggggaaatatccgcaaatacctctttgagtccttcttccacaaatttgcggtaagattctttttggatctcaattaggttgggcatttccaggacctcgtcgatgcgtgaaaagctcattttctttctgccgcccagaagaatttcatgaaccatggatgcttcactcccaatcctttttatacttttctatccatacatacacggaaaaagattcgctcttgattttgtatacaaagcactgtacaatagcggagaaagaaggaattttttgatttcctttttccatggtaaatccgtgtatcgcgggaatacttgtgcaatttacgactatatcacaacttgtcttattcgtcaatggcgtcgctgccaattgacgtttttttgtcatttttcgcgggaatgcgaaaagccatgtaccctccgcgggcacatggctttttacgtttattgaattttaattggccttggcaaacaccatacgccccgctgccgtttgcagcacggaggtaacatacaccgaggtggtgctccctatgtgcgatgcgccgctgtccactacgaccatcgtgccatcttccaggtacgctacgccctgtcccggctccttgccttctctgacgatctgcaaaagcatatcctcgccaggcataactgccggcttcaacgagctggccaactcgttgatattcagtaccttcacacccttcaccgtcgccactttgttcaggttgaaatcgttggttacgatgtttcccttcatctctttggcaagcaggatgagctgttcgtctacttctgtattttcatattccttttcaatgaccaccacacggttggaatcctgctgcatttgctgcaagatatccaagccccttcggcctctctgccttctcaacgcatcagcagaatccgcaatatgccgcagctcttgcagcacaaaggaaggaacgatgatcttgccttccaaaaatcctgcatttgctacagccagcacacgtccatctatgatcacggaagtatccagaatctttggcgcaggcggcttttgcctttccgccttttttctgctgcggcccgtcaccgtgccacgcggcgcgggctcctcctcggtttcttcatgttcttccgcgcccttggcctccgtaattttttccacgatgcccagttcagattttctccgcaccgcgaccgccacgcccaaatagccaagcagcacatagacgattacggaaagcagcattgaaagccagggaataggaatgcgattaataagagtagaaagtaatagtgctaatatcagcccgacgatcagccccagtataccggagagaacatcctgcatgggcacctgtgtcagctttgcttctatgcgtttcatgccgcctgcaatgccgcgcatcatcttcggatagaaaataaagcccagcagcatgccaagcacgccgacgccgatatatacccctgctatgaccgatgaagaaaccacggtatacacatccaccagcttgatccagctcaataagctggccaccagcgtcaggataccgatacataaggctcccagtccaatagaaaatcccaaacgaagcagttttttcatgcgcattcacctcctctctacatggaattctatctcaaacagcaccgcttctatacagcctgttcgatgcgtgctaacacgtcttgttcttccatatccagagagaggatcaattcgctggctaaaatctgtttggcggagctcagcatctttttttccccggtagaaagccccttctccttgtctcgatggctcagggcacgcactacttctgccgtatcaaagatactgcctgtgcgcatcttttccaaattttcccggtacctgcggttccagttatcgcattcctccccgcagggctgagacaaaaattccagaactttcatcccttcttctttgccgatgatggcgcgtaggccaatatctttcccttcaacaggcaccatcaccttcatgccgcctaaggcgaacctgagcacataatagcgctggagctggcccaaaatctctttttcttcgatcagctcaacaatcccggccccatgcatcggatatgccacccggtcgccaatttcaaacacagcctttcccccctttttatcaaatggtgtatttttaatgatacggcataaaccatcccttgtcaattttcctctgccgtatccatccccttacgttttggctctaggccaaggaaaagtgcctctgctacgctaccaaccccagcaaagcgcacccccgccttgattccagaggcttttaaggcttcttttggcaccaaaagcgtggtaaagcccatttttgcacactctgacgcccgccgctccagctgggtaaccatgcgcacctcacctgttaaccccacttctcctatggccgccaccccttctttgagcggctgccccgtggccgcagatgcaatggccatcaccatcgccaggtcgttggcaggctccgcaattttcatgccccctactacgtttgtgtatacatcgcggttgtagagcggcacgcctgcacgccgctccataatcgcaatcatcaacagcattcggttgtagtctacccctgtggccatacgccgcggctgtccaaaggatgtagtggccgccagcgactgtatttcgcacaaaaccggcctgctcccctccatcgagcaggtaatcgcactgcccgccacgcctttggtatgctggcttagcagcacctccgaagggtttttcatctcctccatgccgtgttctgtcatggcaaatacgccaatttcattggtagagccaaaccggtttttcaccgcccgcaaaatgcgcagcgtagattgccgctctccctcaaaatacaacacggtatccaccatatgctccaatacacgcgggccggcaatggccccctccttggtcacatgccccaccaaaatcaccgtagcgcccgttgtttttgcaattctgagcgcagaagctgtacattcccgaatttgggaaacactgcccatcgcgcttgccatccccggctgtgtcatcgtttgaatggaatcgatgatgacaagctgcgcctggctttcctccatggcttggcataccgcttccatatccgtttccgccaacaccaatagatcctcagatagcgtgcctagccgcagcgcccgcagcttgatctgccgggccgattcctcccctgaaacatagagcacttttttaccttgcctagcaattctctcgcaggcctggagcagcagcgtggatttcccaacgccgggttctcctcctaccagcacgaccgcaccttcaatgaggccaccgcctaaaacacgatccagctcttcgatcccggtctgtaaatgccctgccggcgtcacatccacctgcgccaacggcacaggctttgccgccggcttccatggttttgttttcccgcccgcggatttgaccacaggctgctcttccatggtattccattctccacagccagggcaacgtcccacccatttgggtgattcatgcccgcagtttgtgcagtaaaaaatcgtttttgtttttgccatcgtctttcagtccaccaccgcgaatttcaaaatatcgcgttccctgtttttatctgtaatgtcaaaccacgtcactccatggctggatacatccgccagcatcgcatattcggtggatttggaaagctgtgccaactctcccgttgccaggaaatagacataaatgcgtccattctggcagtacgctacaaagttatccgcaatcccatatcccgatacattctccgccagttttttcggcattgcgccgttttgcgatagatacagattggcgtcggcgctggcaaaattatcgctccaaatgatggcagagccatttgtcatcggcttaaacgcatacatccccggctcataggttgtcaccgttccggcgttttctcccagggacaacgtcttaattacattatactgttcgctgtctggctgatccgggtgcggctctacccagacaatatcagtgctgcatacgcccggcggcgaaacgcccatcggggaatcctcgtatgtcgccaacgtcgtgacttctttggtcgtcagatccatcatataaagcttatcctgcgtttcgcccgtacgctccacccagaccacatactgccctgttaaaaatacgtctggacagtcgtatggaatatccttgagcttttcagtctgttgtgtgctgcggttatataaatacatgatggcacgccccggtatcacgccgccgtctgccatagcggtatcctttttcgtatcaatgtatacgatataatccgcgcttacatccagcgccagaatatcgccttctgcttcaatgccctctatccttgtaggcgtcactgagtttgccgtatcctgcttggccacataaatttctttcatcaagggattgtagtagttgtcctgtccggaagaaaagtacacctcatcccccaacaggatcggcctagccacatacttaaacttattggtcagcagcacctctcgtattttatctgataaatctccgatctccgtctgctgcgtgggcagcggcacttccgtaatctttggcccaaaccaagattggatcagcggcatggccacttgggataccagcagccagcaaagcacgacgatggcccctacaatcccgatcattaagaatggataaactgccgatccgcgccagcggtccaacaggttttcccctcttctgcgcctccgtcttgccatttagtcaatcctttccaataagcataccgcctgggccgctatgccctccttgcgtcccgtaaagcccatatgctcggtcgtagttgccttgatattcacctgcgcaggctctatgcccagcgcctgggcaatatgatgcgtcatatgctcggtatgcgggccaattttgggttcttgggcgatgaccaccgcatccacatttcctacggcatatcccgactggcgcaccttttccgcacaacattgcaatagcatgatgctgcttgctccaaagtagatagggtcggtatctggaaaatgctgcccaatgtcccccaatcccgctgcgcccaacagtgcatcgctgatggcgtggcaaagcacgtcggcgtctgaatggcccatcaatcccttttcatacgggatcaacacaccgcccaaaatcaaagtgcggttctctgcaaacgcatgtgcatccaggcccagcccggtcttgattctcggctggctcataatacggcgcggaacatcatatccgcattctcctttgtcgcatgttcagtcaccatcaatacctcatatgtatatgtcttttctcccaactgaatggtcagcacatcgcctacctctaccttatccgagggcttggccacctttccgttgatttgtatccttcccgcctggcacgcctgctgcgccacagttctccgcttgatgatccgtgatactttcaaatatttatcaattcgcatcttcaacctccagatgatgttattatatcatatttttccgtccttccctataaaagacaaagggcggtcttactggcacaaaaaaagagccgaatatcctcggctcttttttggtatgtttttatttgatagcgtctttcaaggctttgcccgctttgaaagccggcaccttggtagccgggaaatccatcggctgtttggtcaacggattgatacccttgcgcgcagcgcgttcacgcacttcgaagttgccaaagccaaccagctgtaccttttcgcccgctttcagggtttctaccactgcatccaatacagcatttaccgctttttctgcgtctttcttggccaaaccgctcttttcggctacacaaccgattaattcagttttgttcatattcgtgccctcctagtgatagttgcgccaagcgcaaatttttctcgtttttatgtcttgaccattttccaacaaacggtctagaatgtcaagctttttcttgcttttccaggcgctttgtctcttcccacagcccatccagcgtttccagtgtttggctgcttagcgttattcccgatcgtacggccgcctgttccatcgcacgaaaacggcgtataaacttctcacaagcggccatcagcgccgtttccgcatgtacgccgcaaagccgcaccacatttaccgcggcaaacagcaaatcacccgcttcttcctctgtacgcaccgggccctcttgcagcgcctccagcagctcggccagttcctcttttaccttgccggccgccggctctggcgcctgccagtcaaagccgatgctcttggccttcttttggatcttctgcgcacgcatcagggcaggcagcccatctcctacgccctttaacagagaatcttcctgtgtatgccctttttccgtttttttgatctcttcccagtttttcaacacctcgcctgtcccgctgaccgttacgctgccaaaaacgtgcggatgacggcggatcagcttttcacagattccgctacatatgtccacaggcgtaaactccatctgctcctgcgcaatttccgcattcatcgccacctgcagcaacacatcgcccagctcctcgcataggtgctccatgtcgccttcatccaccgctgcaatcgcttcacaagcctcctccagcatggcggatttcaaggaaaaatgtgtctgctctgcatcccaggggcatccgcctggcgcacgcagtatgccggcgattttctgcaaatctgcatatacatagcgcttgcgcttttcaaagggcagcggcggcactaccaagcagctggtcgcatcaaaatggggctgtcgatccatctcatacagggggcaccagtgatgatgcatctgttcggcatccgcccataccagagctacccgccagtcctccggatacagctccatcaggtcaaccttgcattggcttgcctttagtgtctgatccaaatcacagatcacctggcactttccacaatccaatcttaaaacatccagcgcttcatagtgcgtttgtaccccttgttcacagggtgcgcccgctgcggccattgcagcggcagccgtactcagtcccggcagaatccccacttctatgccaagctccttagccctattccaaaccgtctgtacagcgctttgtccttgactagcttctcccgtaacggcaaatacaatacgtctttcccggcctgcctccacaattttttccgctacagcccggttgagtgcatcaaaatcctgcgccttttgatattcttcatccaacgaaataaaatctatgcccgcttgctttacaatctcgatactgggatgcaaggccgtctgcacatagcaggcctccgccttttccagcgccagcacagtctggcctgtgatatatcctttcggccccggccccagcccaacaatgagtatccccatcagatatccctccaaattctcttttcgcgcagccaagaatccagcttgatgccgcccggcagcattctaagatcctccgtcgtaacaatatggaaccctaccaccagcgcaaaatacacgacaatgccaactgccgttgcgcacaaaaacaagatccacccatttacactgtgcagcgccatccatacgatccccaccgctgcggccatccctaaggttgccagcatcggctttaccaaaatttccatcaaggaaaactgcgctcttagctcatgcaaaatacgatatagatccatcagcgcacagaccgcatagcacgccaccgtgccgatggcggcccctacaacattgaggcttgggattttcagcaacacaagcgacaccacaatcttggccaaaagcccagccgccaaattccttaccgggatgttctgcaagcccaggccctgcaaaatgcctgtacaagtttgtgtcgccatcaaacaaaatagcccgatggccattacccgcatcagcatagccgataccgccgcatggtcgccttctgccagcgtacccggaaaaatcaactgtagcaaaagcggccccagcaacatcagccccgccatacatggcagccccagcagcgtagtcaactttaatccgatcccggtatttatcgtgcattccttaaatcgtctcagttttaggctcgcagaaatgcttggcaccaagctcatgtgcagcgctgtcgaaatgctcaccggcacgtagacaatcgggctcacatagcctgtcatcaatccaaacctactctccgccatcgcttgggaaaatccactggatttcaataaattgatgaccataaaattatccaccagcgataccagactcatcgcggcggccgccagggtaatgggcaaagccaaatgcaacagatctttgcgaattttctttttttccggatatacgcgtacatgcgggcttgtcctcacttcatgcatcagcgcatttttcccgcgtccataacggatcatcaaatacaccagcgagcacagctccgccgcaggaatggccgccagcgcccctaccgacgccagcagtgtgctgctatggatcagccagtaggccaaccccagccccaacaccgtttttacgatttcctccaccagctgcgaaacagccgtgggtgccatctcctgcaggccctggaaatagcctcgataggccgcaatgccgctcataaagaagaccgccggtgataacgataggatcgtcatccacgcctctgagacgccctgcatccgcacaatccagaacgaccccgcagccagcagtacagagccgcccagaccggccagcaaaagcgcccgaaaacaggtcacaaaaaaataatgtgcggtccgatagtctccaagagcagcaaattctgaaacccgcttgctgatggctgccgggatgccagaggtagccaccactgttaaaagcacatagatcggataggccagctggtagtaggcaatgcccattgttccaatgcaaccggccagcataatgcgaaatagagagccaatggcgctgcatagcagccccgcactgccaagctttgccgcgccgtgcgcaaacccttttttcatgccgatggccctcctctctgctcgtttctctttcatgtatgtgctttattatagcatcttccgtcaaaaaaccccagaaaaaaagccgctttctcagcggcctttttcacggattcattgttccagctggcgtcccaaaaacccagctgttgtctgcgctaccttaagctccgtttctccaaacttgcagtcctcctgccttgacagcagtactacagcgcccgtagcctccccttcgctgatcacaggcacaacgatctgagcgacggtctggctggcgttgtcctgctcggtaattggcatgggatttcctccgcttcgccggtcggcaagaataggctttctctgctccatggcctgttccatctcacggctgactgcgtggtccagatattctttcttctgcaccccggcggttgcaatgacgctgtcacggtcacaaatcatcgcaatatgccccaaggacttattcagcgcctccacatattccttagcaaaggcgcccagttctcccatcggggaatatttttttagaatgatctctccatttcggtctgtgaatatctctaaaggatctccttcacggatgcgcagcgtccgccggatctcctttggcaccacgactcttcccaattcgtcgattctgcgtacgatccctgtcgctttcattcatgttcctcctgccttatgcaaacttctacctctgttgccgatattttctgctaattggcaggtttttatcaggaaagtttttttatgtaaaaaacatttttttccaaatgcctcattgcgtatcgcgccgcgcttgcaaccgcccatcaataccagtacaataaaacaaataaaaaagacatttgtatgtcgttaggagcaagacataatgcagctatccagtttgcaaaacggaagcgatatacgcggagtcgccatgggcccgcaggccaatttaacggccaaggaggtagacacgctcagccgtgccttcgccctttggctggctgagcgcacccagcactcagtcctccgcgtagccgttgggatggacgctcggctttctggccccgctttgaaagaggcctgtattaccgcgctagcggattgcggcctttttgtgctcgattgtgggatggccagcacacccgctatgtttatgacaaccgtatccgatcaaacacattgcgatggcgccgtgatgctgactgctagccacctgcccagcgatcgcaacggaatgaagtttttcacttgtcagggtggtttggaatccggtgaaattacagcgcttcttcgcctatctgaaggggatttgccccgcggccgggcgggccaggtgcagacatttgacttcatttctatctatgctgagggactgcgtcaaaaaattcaacaggaaaccggccagacccagccgctcaaagggctgaaaatccttgtggacgccggcaacggggccggtggcttttatgctgaaaaggtgttgcagcccttgggggcggatattcaaggcagccagtttttggagccagacgggcattttccacatcatattcccaatcccgaaaatgccgaggccatgcaaagccttgtagacgctgtgatccggcacaatgccgattttggtttgatttttgataccgatgtagaccgtgtaggcgccgtagacaaaggcggcgttgtgctgaataaaaaccgactgatcgcggtcatctccgctgttttgctccgtgaaacgccgggagctgccatcgtgacggattccattacctccacagggctggcagagttcatcaaggcgcacggtggaatacatcgccgctttaagcgcggctacaaaaacgtcatcaatgaggcgatccgcttaaaccatgccggccaatatacgccgcttgccatcgaaaccagcgggcacgccgccttaaaggaaaattattttttggacgacggtgcatatcttgccacgcgtcttgtcatcgaagtggctcgcctgcaccagaaagggctttgcatcgcggaccttcttgccgatctttcagagcccgcggagagctgtgaattccgcttggccatccgcacagatgcgtttcgtgatttcggccagtcgctcatccaggcgctctttgcctatgccgatacgcagccctcttttcagctcgctccggaaaaccatgaaggcatccgtgtccagttttcccccgaggaaggagacggctggtttctcctccgcctttccctccacgagccgctcattgccatcaacatcgaaagtgaacgggcaggcggggttcacaccatcgcgcagcagctaatgaagtttctctccgcctatcaaggggaattggagctatctcccctggcatcgtatcttacgtaacgcattcttgttaacaaaagccaggcagtaaaaactgcctggctttttcattcttatttattcttcgttatttgacaaaggccacgcggctctcatacacctttgcgtccaactccttggcccattgctccatttttttcgtccaaacctcttccttggctacctcatcctctttggaagctaccacttccttacctccctggtcgtacggcagctccccagccgcggcatccatctgcaggcggatgatatgcaccccaaacgtggtggctgtttgcgttagatctcccttatttgtcagcgtgcgggccgcggccacaaaatcctcatcatatgtggtatcatccggtgcaatgacatagccgatctttgccgttaccgtatctccctgcatacccgggtctgtattgtattgttcgatgagcgcatcaaagtcctctccgtcttttgccttttgcattgcctcatctaccttagcctgtacattggcctgggccgtctgaatcgcattgttcagttctgtttccttggcttccagctgcggctttttggtatccagatccttttgggcctgggcgatgctctcatcataggcatccagcttttcctggctggcgtccatttcctgctttttggtttctgccgtagcggtatcgttctccgaaaccgccttatcgtatgcctccttggcagcgtcataagtggattgttcactttccttgctttcctgattggtatccaggctttcctgcgcggtatccacttcttcttgcagcgtcgttttttcctcggacagcgtttctaccttggtcttgtctgccggcagatactcaattaggatctgtttgaccagcagatagttctctggcttatacagcaggtagtcgccagaagattcattggtgatcgcagtcataaaatcgcttggcgttttctcataggtttccttttgctctgccaggtcttctttat

SEQ ID NO: 4275 - DNA, 4582 bp, Unknown
  16S sequences of unknown bacteria
ccccccccccgaattttaacatattgtttacatttaacggatgaaaaatcctccggacaggcaagcccatccggaggatttatgttcaaataaactcagagcgtattttcaaggaacgcgatgatcttgtcggcgagtataacgtgtccggcgtcgttcgggtggagtccgtccgggacgaacttctcttttatcaccggaacgagaggctgaagcccgctcgtcgcatagaggtcgagcacaggaaggctgtagtactccgtgacctcacggatgatatcgacataagtcttgaggttgccgatatccatcggcttgttgtcgccgcgcaggctcgcctcgttgcatctgtgaagaggagtgatgaaaactatagccgcgtccggatatctctcgataaggcggttgcagagcacgtgcatcgcgccgtagaaggtcccgtccgtcctgtcggtcggagtgccgagcggagcgtcgccgtgaccaaagtcgttcgtgccgccgaaaacgacgacaatgtccgcgtccggatccatcttgcacactctcgagcagtagtcattgtcgtcaaaatccggtatcgtgcggttgaactgtctcgcgattctcgtaccgccgatgccgtaattgcggcagatcgcgccggtcttcgccgctatgagattcgagaatcgcttgtcctcgccgctcgttccgctgccatgtgtaatgctgtcgccgaggaaatttatctttttccctgaaagattcatgatcgtatcctttcaaaaaccattgaagttaccgcgccggtgtatgacccggcacatcagtttctattatagcctacaatctgccatttgtcaagtggttttccaacattcatcatagtaacataaaaaagtgccgccatgataaggcatgacgacactgtgggatcacttatttcatcagttcaagcgtcttgtttatcgattcctcgatcttgctcctgttcgagtcaacgagcgacgcgacgttgttcttcttcgtgctgacgagcatggtgttgaccttcgcggacagatcttcggtccagccgtagccctcaccgatgtcgaagccgcggctctcgctgatgattccgagcatctcaatcgagtcatcgttacgaagtcccttctgagcgaccttcacgttgtagtatataggaagaatgtcgcggttgctgaggtacgcgaaggtgtcgagaatcgcgccggtgcggtcgggctgagcgtttgtcaccggtatgctcatcgtcaggcagacgtgcgtgcggtggctgtaatatctgtcctgtgcctcgtcgtatttcggtatcggaactataccgaaggtcgcgttcatatcacggtacttggagcttgcctttatctcggctatagtgaagagtgagcggccgttcttgaatatcatctcgtagtgactgttgccggagccgttcatgaagagaaactcgccctcagtgccgattatcgagaacgctttgtcgatgacattgtaaaagtgttcggcgttcgcgaggagcttcggctgaccgctcgcgtcgacagttatgtagttctcgccgcttccggttatgaacccgttgacgcagtcctcataggacgcgagcccgtatatcgcgtttccgttctcgtcccatttgaagctcgtgtctccgttcagattcgcggcggcggaggtgtattccttaagccggtcgattgtccattttccctgtctgacaagatcgtaaggcttgtcaagcccgaggtcgtcgagcatatcctcgttgaaatagcagcagagagttccgtcaaagccaacaagcgagaagtcgttcgacgcgaagtacagcttctttttgtcgccgatcagggatttttcggtaacggtctgatcccaccacggcttatcgagctgtattccggtgttgtcaagcaggttcgttaggtacccgtcggcaatgaaggacgcgatgcggtcgcagcgaatataagcggtgtcatatgtgtcgtctccggcgagaatggatgagcggtatttctcatagttcttatcgatgtcgtcctcgacgatttcaagctttatgttgtatttttcctcgacgaagcggttgcgctcatacacggcgtcgtcgagtgattcgccggtctgcgtctcgaaatccatgtaggcgtagaagccccatgtcgtcgtggcgttgaggacggtgaagttgtccccgccgcagtcgatatctgcgaaaacatactcaggcgcggttgttccggtgttcgtgtcagcggcgctggtactgttgcccgctgatgtgtcgtcattggttccgctcccggtcccaccgcaggatgttgccgccatcagcgcgagcagcaggagcgatatgatacgattcttcttcattccggttcagatctccttatcgattaaagaatatggtcttctgaatatatgatatcacagaattgaccgtatgtcaacaccctcaaaaaaagatatttatattttatcccggtgtgatgattttttggaataagacccggaaactgaaaaccccgcggcacaggataacctgataccgcgggtttttcagaagcatattacatcttgcgggtaattatttcgacttgcgctttcttgccgcttcagattttttcttgcgtttgacgctcggcttttcgtaatgctctctcttacggagctccgaaagaactccggatcttgcgcactgtttcttgaatctgcgaagagcgctgtcgagcgattcattctctttgactctgacctctgccatttaactacaatccctccctccgcaagtggaaaagagacttattatctccagaatattatactataaaattcacccaatgtcaagagcaaaccgaaaatttgcagaaatatttttattttcttcttacttccactccggacgacggcagacacagtcacataatactgattccgccgtcattccgctccggtctcatcactttataatattcgtgcggatgacgccgtcaatcgcggcgatcttctcgacgaccgccgccgggacgtcgccggtgatctcaacgatcgtgtacgcgtaatccttcttcgagcggttcgccatgttctcgatattgatgttctcagcggagatcgccgacgtgatctgcgagagcagattcgggatgtttctgtggagcacacagatgcggcagtcgccgttatgcggcatcgagacgtccgggaaattgacgctgtgcatgatattgccgttctcaaggtactcacggagctccttcgccgccatcaccgcgcagttgtcctcgctctcctcggtcgacgcgccgaggtgcgggatagctatgacgccctccattcccgccgttctcgcgttcgggaagtcggtgacatagcgtctgaccttgccggacttcagcgccgcctcgatatcgtcgtcgttgaccagcgcgtcgcgcgcgaagttcaggatgataacgccgtccttcatcatcgcgatcgtgtccttgttgatcatgtacttcgtagcgaccttcggatcggggttgtcaatcagcggggtgtggacagagatgatatctgcgttcttgaatatctcctcgcgggtatcgaccttcttgaccgaacgtgagatgttccacgccgcgtcgaccgaaatgtacgggtcgcagccgagaacattcatgccgaggtgaacggccgccgtggcaagcggtccgccgatcgcgccgagaccgattatgccgagcgtcttgcccttgatctcggtgcccgcgaacttcgacttttccttctcgatgagctttgcgacgttcgggtcgtcctttaccgtctttacccagtttatgccaccgacaatgtcacggcaggcgaggagcattccgcatatggcgagctccttgacgccgttcgcgttcgctcccggggtgttgaaaacgacgatgccctgctcagcgcacctgtcgagagggatattgttgacgccggcgccggctctggcgattgccttgagttccggaccgaactccatgtcgtgcatgaccgcagagcggaccattatcgcgtccggcttctcgcagacgtcggatacggtatagctttcgtcaaaaatatcggtgccgcacttcgcgatcttattgaggagctttatgttcttcatcttgtgtaagtattcctttcccacttatcgttgcccggaacgtttcccggtatgtgtaccggcgccggccgcggctctcgcgcgccacggcggcgcctgtgatgattttctttatgccttggggttctcggccgcgaactgcttcatgaacgccacgagcttttctacgccctcgtagggcattgcgttgtatatcgacgctctcatgccgccgaccgaacggtgacccttcaggttgaagagaccagccttctcggcttccttcgggaacttcttgtcaagctcctcgactccggtgacgaaggtgacgttcatcatcgagcggaactccttctttaccggcgcgatgtaataatcctgagaatcgaggtaatcatagaggagagccgccttcttctggttcatctctttcagcttctcaagcccgccgag

SEQ ID NO: 4276 - DNA, 1623 bp, Unknown
  16S sequences of unknown bacteria
gatctggatgatttcgacctggaggatgaagaagaatatctgaccgaggacgaggaaacggaggaaaagaatgagtaaactgattattgcggaaaaaccgagtgtggcaaaatctatcgcgtcggccctgggtgcttcatccagggtcgatggcttttatgaaggcaacggccttctcgtatcctggtgcgtggggcacctggtatccccaatggatgcgggcggctatgacgagcgtttcaagaaatggcgttatgatgatcttcccattctgccggagccgttccgctatgtgctggcaccgggcaaggaggacgcttttgaaaatctccgtgccctgatggatcgccccgatgtggataccatcgtcaatgcctgtgatgccgggcgtgaaggcgagctgatcttccgtctggtgtatgaaatggctggctgccgcaagccaattcttcgtctctggatttcttcgatggaggacagagctatccgggagggtttttccgaactgcgccccggtgcggaatatgaagccctgtatcaatctgccctttgccgccagaaagcggattggctggtggggatcaacgccacgcggcttttctccgttctctatcaccgcaccttgaatgtagggcgcgtccagacgccgacccttgccatgcttgccgagcgtgacgcaaaaatcacactgttccacaaagagaaatatcatctgctgcgcctgatgctggacggagccgaagcggtgtcggaaaagttcaccgattcggcggaggcggaacaggcagcggctatgtgcaagggtgcggccgtcacctgtacctctgtcaagaaggaacagaagaaagaacagccgccgaaactctatgatctcaccaccttgcagcgggaggcaaaccgcctgtacggatacacggcgaagcagacccttgactacgcgcaaagcctttacgaaaagaagctgctgacctatccccgcacggacagccggtatctgacctccgacatggcggaaacggcctcctgtgtgatccacctggcggcaaagctgccgccctttgatggctgttccaacttcttcccgctggtggagaccatgatctccgacaagaacgtatctgaccaccacgccattatccccacgatggagattgaaaaagtggatatcaaagctctgcccctgggcgagcgcaatttgttcctgctggtctgctgcaagctgctgtgtgcgtcggcggagccgtatgtgtatgaggcggtcacggcaattttcgactgcggtggccattccttcactgcaaagggtaagcacatcctctccgaaggctggcgggagatcgaccgcattttccgcgcctccctgaaagaaaagcctgcggacggggacggcggtgcgctgccggacttcaccgaaggacaagtttttgacggcgcggaggtttccgtcaccgagcatttcacccagccgccgaagccctataccgatgttatatgctgtgaaagggggacaagaaatcgcccgtagaaaggagaattgacccatgaaaacaaagcaaacaggaagcgggaaaatcacagccctttatgagaggttgagccgcgacgacgaactgacaggcgaca

SEQ ID NO: 4277 - DNA, 6611 bp, Unknown
  16S sequences of unknown bacteria
tgtgctctttgtctggagctgtctgttcctgctttggaacacgctgttcctccatgatgatccaatgctgaatccgatctattatctgtttgagacagccaggaaccatctctggtatctctatgacctgatcggcttgtatatcgctttcccattcatccaggccatggtgcatcacatggaccgccgcatggagaatatgttcctcgtcttgtggctgatcctggctggtggaggaaggctgctcacgcggatgatgggactgatcggtacgccggtcaacatggaatacatggtgccgatcttgcaggcgacctactggctcggctatttcatcggcggctatctgctgtataaacacaaggatgagctcaaagagaaactgtctgttccgctgctgagcgcagtattcatcggctcgatcctgatgatcactctgctggtctgtgcagattcctttgcggcgcacgattttcaggatgcgtttctgacctatggggagctgttcatgatgctcagctcgacctcggccttcctgctcaatccccgcttcaaggcaaagcagcaccggctgttcgactggttcggcccgctgacgttcggcgtctatctgatccatccgatatttatcgacatcgccaaggaattcattcgcttcccatgggcgagcgcgctgtatatcccgctgctgctgatcgtgatcctgatcgtcagctcgctgatcgtctgggtcttgtctaagctgcctgggctaaaaaagatcgtttcatgaaaaaaacggatgtgtcttcatcagaagaggcatccgttttttggcgtctactccatcttgtcaaactttttgcggcgctctgtggactggatgaacagccgtttcatctctgcagtatcttccgccgcgagcgtatcgcggaaatgctgcagctcggctgcaaaagcatcgatctcagaaagcaggatgtccttgttgagcaggaacagctctgtccacatcgtttcgttgatcttagcgatccgcgtcagatcgcggaaagagtcgccggtgtattccaccagatgggcattgtcatgcgtgttcatgagcgagacggcgatgacgtgtgtcagctgggagagaaagccgatcatctcatcatgctcctgcatgctgaggacggcgatatgatggaagtgcaggatctcggccagctgccgcgatgtgcgcaccgcttcctcgctgttgcgttctgtcggaacgatgatgtaattggcgtcgcggaacatctcagtattggcgtattcgatgccgctcgtctcccggccggccatcgggtgtgcggcgatgaactccacatcgtccctcagcatctgctggacacggtcagcgacattgaccttgaccccgctgacatcactcagcaaggtgccggggcggaaagcgtgctgatgcgcgctgatccagtcgatcatgatgtgcggatacaggccgaagatcacgatgtctgcctgggggagcagggcttccggatcgatcgtcccttcatcgatcagcccgtgcgccagcgcatgatcgatggtctcttgccttctggccacgccgtatacggtatagccggcttctttcagccccatggcgtagcttccgccaagcaggcccagtccgacgatcaaaaatcttgtctctttggtgatcatctgcattccacctttccatgaatggccgtaacatcgtcgaagaatgaaggataagatttacggatggcctgcgcgccttcgatcgtgcagacgctgctgctgcacagcgccatcacgcacagcgccatcacgacgcgatggtcgttgtggccggataatgtctcttcgcaggcatagggcgtgttttgtccctcgatccagacgttgtcttcatccgaggtgatgcgcacgccgaatttgcgcagctcttcttccatggctgcgatgcggtcgctctctttgatgcgcagcctgccggcatgagagatgtgtgtcgtgccttctgccatggccgcaagcacgaacaggatcggaccgaggtcgggacagtcattcaggtcgaccggcgcggccttcagcgaaccgcgatgaatgaggaagccgtcatccagcggctgcagggaagcgccgaaatcgtggaggatcgacaggatctggcgggctccctgcgcgcttgatccgctgacgccgtgaatggccagatctccttgcacggcagccaggacggcgaagaaggccagctgggaataatcgccttccacccggacatcgcaggggacatagcgctggcggcccgggatgcgcaaggtcagcgcatcctcatagaccgcgcggatgccgaacttcttcagcatttccagggtgaggtcgatataagaacgggattcgaagggaggacggatctggatgatcgaatcctcttccagcaaaggcagcgtaaatagcaggccggtaatgaactgcgaagagatgctgccgtctacttcatagcggcctggagcaagcgcgccggagatgacgatgccttgctcatcatgggtgaactgcagcccctgtctggcaaacagctcttcatagacatcctgcggacgctgcatcaggcggcctttgccgatgaagcggaccgtctgatcgcacagggagaaaagcgggatgaagaagcgcagcgtggatccggattcctggcagtcgatcacctggctgttcagctgatcgaacccgcggatcccgcggatgctcacgcagtccgcaccggtatcgatctgtgcgccgagctgccgcatgccgtctatggtggcgcggatgtcatcgctgaaatcgatgttggtgagatgagatacgccgtcagccagcgctgcgcagatgatggcgcgatgcgccatgctcttgcttggggggatatggacactgccgctgcagtgtgatggataaactgtcgcaatcatgatctttcctccgttttggtccgcaaggggtccttgcgcatagacaggtttccctgccgttcacagcatagatcgagcagccccagcgcgcagacgctgtcgacgacgacgcgcgcgcggtggatgatggcaggatcatggcgtcctttgatctgcagctcgacgggccgtgcgctgagataatctaccgtctgctggggacggaagatggaagcggtcggcttgatgacgctctggatcaagatcggcatcccgttggaaatgccgccgttgacgccgccgttgtgattggtcgcggtgcggatacggccctctttgctgcagaagggatcgttggcttcactgccatacaggtccgcaaatccaaatccaaggccgaactgcacgcctttgacggccggcacgctgaagagcagatggctcagcacgctttcgatcgagtcgaagaatggctcgccgatcccggcaggcagtccgcagacggcagtctcgaggatgccgccgacgctgtctccgcgctctgccgccgcggtgatgagcgcatgcatgtcttgtgcccgctcttcatccagcaccgggaactcgaggccgttcagcttgttgatctgagcactcagctgctcttcttcctgggcgaagggctcatcgctcacctgatggcacttcaggatatgggtgccgatcaggatgcctttgctttcgaggatctgctgggcgatggctccggcggcgaccagcggagcggtgatccggccgctgaaatgcccgccgccccggaaatcctgatagccgaggtatttttcataagcggtataatccgcatgtgagggacgcagccggtaacgcgtctgttcataatcctggctgcgggtattggtgttgtcgatcaaaatggtcagcggcgtgccggtcgtatatccttcaaaccagccgctgacgatgcggaattcatccgcctcatgccgctgtgtggatatccgccccttggccttgcgctgttccatccgtttttggatatatccaaggtcgatggccagaccaggcgccagcccgtcgatgaccacgccgatggtctctccatggctttctccgaacaatgtgatctgaatgttctttccaaagctgtttttcatgctctcaccctttcagtctctgtttcacttccgcaaaagacatttcctcaagctcagcctggccgagcgtgcggaccttgacgacagtgatgctgtcatgcgcggccttcttatcggaacgaagcttttcatataccgcttctttgtcatacggtgcatccgtaggcagcccgagccgcttcaggatacggatggtgcgcgctttcagctcatcatcctcgatgaaataaagcatgcccatggccacacattcgccatgcaggaattcctccatatggtaatagccttcgatcgcgtgtccgatcgtatggccgaaattgaggatcttgcgcaggccgctctccttttcgtcctgctcgacgaccgcttttttcatgcagagagagcggtagatgatctcttccagatgggcgtcgatatcctgctgctcaaacatggcgaacagctgcggatcatagatcaatccggccttcaatgcttcggccaggccgttgatgtaatggcggcggggcagcgtggcaagcacatcgagatcgatcagcactttgcgcggctgccagaaagcgccgacgttgtttttcaccccgcctgcgttgatggccgtctttcccccgatgctggaatcgatctgagaaagcgtggtggtggggatgttgacgaaatcgatcccgcgcatataacaggcagcggcaaatccggcgagatcgccgaccactccgccgcccagggcgatgacgagatcctttcgcacaaaatggtgctccttcatgcacaggagcagctcctcccataccggaaagctcttggcctcttcgcccgatctgacgatctttaccacgcagtccggacattgggcacgcacgagctccacccatttggcaggcacgccggaatcgctgaccagcaatatgcgccggccgacgtcgatctcctcagcgatccggttgagcactccgcgttccaatacgatgtcatagccgcgttctttcaagtcgacatgcagtttcatcttcaaatatcccccttctaaacaaaaaagcatcaactgttcagtggatgcctcggtatcattcatcataaagcaaaaagaaccatcgctcacatggctttatgatgcgtattcatcatcaaaataaaacttggcaggatttctcatcgtcatcactccattgccaatatcataatatagtgaaagaaatattgcaactgttttcacgaaaatgaaacaatttgttatctgttttcatccggtcgatcatcggaagaaggcgtgcttgggccgatagactgccaggcgttgttcagcgcctgaatgcgggtccggatcatcttgtccgcgatctttgcgtgatcaaagaaatcgaagccatgaaaggtgccgcgcacttgttccagttggacgtccgctcctgcctgacgcagcctttcggcatacatgacgccctcatcgcgcagacagtcaaactcctcggtttcgatatacgcgtctggcaatgcggaaagatcatctgcctgcatgggcgcggcataaggcggcgaacaatccgggcagtctctgagatagatcttccacatccgatcattcagcctggcgttccagaacggagaatccttgaaggcgtgcatggatggggaagacatccgaagatcagtgaccggatagatcagcagctggaagcagatcgggatacgggcatggtcccttgcccactgtgcgcagagcgctgccaggcatccgccggcactgtcgccgccgactgcgatcctatgcggatcgatgttcagctgcgcatgatgtgtccagacatagtccagcgctgtgtagcaatcctgaaacgggatcggataagggtgccggtcactggtgcggtaatggacaaagacgacggtgcatgatgcctccttggcataacgcatcacgatcctgtggatatatggcgcatcttcaaagcagaagccgccgccgtgaatgtagagcagacagggagatggcccatgatgcggccgttcataaacggtcagccggatatctgacacatggatgacgcgtcgctgaagcccttcgccgggctctggaaatgtcatccttcggatcatctggttgccagcggaggcgctgcgcacagagagcatccttccgggcaggacgaataaattcatcggcattaggctgtgatggatgggataacggagaacgcggtatccgctccagcataaagcgagcgcggccgctgcagcatacatcttcttgcgcatgtcatcacctcttctctgtcttcattttacgacaaaagctgtttcagaaaaagaaggtgggaccttttaagacaagagagtcaagcttttctatatagcgaattgtgaaaagtgtccggaaaagcgaaaaagaacccgaatgctcaggttctttttcatcctttcggatatctctgtacggttattatagacttatttgatattgatgtcaagtattccattttcccaatgtcgccgttaagcgattttgtcacctctcgttaagggaaaatgtcaccatctt

SEQ ID NO: 4278 - DNA, 9898 bp, Unknown
  16S sequences of unknown bacteria
ctgcatgttctcaacttacacggtttatattacactctctttttcgcgtattttttagcataatttgttgctttcgtcacatcgatatctccgatatagcgaaccgttttcgtacttgcggcacggcttaccggctgattgtaggaaggagatatggaatcgattttttgcagtgaagcttcgcggtcctctttatatggcgcagtgaccagcttcgttaccatttctctcatttctttattttgatcttcgttttcatagagatcgaagaacccataaacggtattgatctcttcatcagaaaagtactgatcaccttgtgtaagaatcgcatgataatattcatggtaattctcatcattcaacacatcccagccgtggtcacgctgaatctgttttaattcatcaccatatttgtttttaaaattagccatcgccgcttctggcgattgaaatgtcaccagcagatcaacggtctgtgaaccaacctgaactgaaccattggctttaacgattccccagtcattgtgttcattgatgaagcgtaccgtttcttccacagtttcactttcaccatgtccatcagttgttgtgaccatgtttgcggcatggacaggaagagcagacagaagcattgcggatgcaattccggaacaaagcatgtttctcagctttttcataaaatatcctctactttctttttctgatgcagagtgtttgtacaacagatatctcttttccctgatggatcatgcgcatgaatcaagagcgtttgcgtcagcgggcctgacttttctctgcatcttcatgataaaagagaataacttttgcgtcaatcatatcagcataacagtaatgtaatgtaggaaacaataatgtcacattaacttttttgcatataaaaagctgaccagaatgatctgatcagccatatatctcagatgccggcttgctcccgatactcctctctgaagtatttcaggatgttttccagcgtttcgttcaacagctcattttcttccagatccagcttgtctaaggctttgtcgaccatctccgcatgaaaatcttcatggatcttcaagatcggtacggacttttctgtgatccgcaggcggttgatccgcttatctctgtcgtctttgtaacgctccacatagcctttgttgatgagcttggtgacattggtcgtaagcgttccctgtgtcaccatcagacgggctgcgatatgcgacatgctgttgtcgctcgccttctttatgttttcgagaatatgcacatcattcatggacagctcgataccgcgctttttcagattgcgttcctcgatatagaggatgtaattgaacaagccgaccagcagttcattcgtcgtatgccgcaggtttcccataacatcgctcctttcttcgtgacattatagcatgacttagtaaaaaaacaagaaacttgtccaaaatcacatgacgtttgctgcaatgcacaaagaggagaagtactggtcctctcctctgaaaatgcagttatcgtgcagatgcctcacggatcatcttcgtgatctggatgatgatcgtcgggatcacggccaatccgacgatcgtcagcagctgctgagcgttgagcactgtcacggagaacagcgtgtgcagctgcggcacgagcaggatgatggccagcaatgccgcaccggcaaagaatgccgcgatagagtagcggttgctcgtcaatccgatatgcttcagcgagtattcgctgcggcagttgaagccatggaacagacgggaaagacagagcacggcaaacgccatggtctgtgccgtcgcatcgttgacgcccatgccgagcacgaacgcgatgatcgtcacgatcgcgatcaggatgccctgcatgcccagcgtacggatcgttgacgcgttcaggatgccagctgaaggatcacgcggcttgtctttgagcacatcgccggaagaacgctccataccgatggccaatgccggcagggaatccgtgatcaggttgatgaacagcagatgcaccggcaaaaacggcagcggccatgcagccagagtagcgaccagcaccgtgatgatgccggacaggtttccgctgagcagatagacgatggcattgcggatattggcatagatgtttcgtccggtcgcgaccgccttgatgatcgtcgcgaaattatcatcggtcaggatcatcgtagcggcatccttgctgacttccgttccggtgatgcccattgcgatgccgatgtcggcctgcttcagcgccggcgcatcattgacaccgtctccggtcatcgcgaccagtttgcccttacgctgccaagcatcgacgatgcggatcttatgctctggtgcgacacgcgcgtagacacgcactttttccagatgtgcatccagttcttcatcgctcatcgcattgagctccatgccatccaggcactcatcgccgtcatgatagatgccgatagaacgggcaatgctgcaggcggtgactttgtggtcgccggtgatcataaccgggatcatgccggcgcgctggcagtccgcgacagcctgcgcgctctccttgcgcggcggatccatcaatgaggcgatacccacgaaagtcatatggtcttcatcttccagcgtaacttcccgcttgtccatgatgcgataagccaggccaagcacgcgcaggccattttccgcaaagcgctcattctgcgcgagcacggcctcacggtctgccgtcgtgatggcacgcgggccctgggccgtctcgatctgttcacagcgccgcagcagctcgtcacaggcgcccttgacaaacatgatcagcctgccatcgatctcatgcagcgtcgccatcatcttgcgctgagaatcaaaggggttctcagcaatgcgcggatagcgggcacgcagctccagctcatctttgccatagtgatgcgccagatcgacaaacgcgagctcggtcggatcaccgatgcgctgtccattggctgtctgagaatcgttgcacagcacatagccaagctgcatcagctggtgcgccgcatcatccggcagttcctccgcctgtgattctttgccgcagcagaagaactgctgcacgctcatgcggttctgggtcagcgtaccggtcttatcagaacagatgaccgatacacagcccaggctttctacagaattgatgttcttgatgatggcatgttccttggccatctgagaagtgcccatggccagcacgatcgtgacgatgctggagagcgcctccggtattgccgcaacggcaagcgcgaccgcaaacatcagtgcgtccagcaccatgttgccctgcatcacgctgaggccgaagacgaccacgcagatgacgatgatgcccaggctcagcttgcggccgaaatcatccagcgtgcgctgcagcggggtcttgcgctccttggtctgattcatcatcgtggcgatcttaccgatctcggtgttcatgccggtcgcagtgaccacggccgtaccgcgcccatacgtcaccaggccgctggagaagaccatatctttctgatcgccgagcccgcattctccgctgacgctttccacctgcttttccacgctttccgcttcaccggtcagcgcgctctcattgacctgcagggaatacgattccacgatgcgggcgtccgcaccgaccacatctcctgcttccagcagcaggatatcgccgacgaccagatctgtgctggggatctcctgcttcatgccgccgcggatgacacgggcgctcggcgtagacagctgtttcagggcatccagcgatttctgtgccttgacggtctgcaccgtgcccaaaatagaattcatcgtgatgaccgccaggatgacgatcgtgctctccagttcaccggagatcatgctgatgatggctgctacgatcaggatcaggacaagcagatccttgaactgcgaaagaaagatcatgaagggatgaggcggtttgctctcctccagcgcgttggccccgtccctggctaaacgctgggcggcttcatcggaatctaatccttgcaatgaagtgtgcagttcgtccatcacttcggcggtttctttttgataaacgtgtttttccatacatatcatcctctcatcatttccataagtcccggtgataaaaaaacgagacctatagaaaaaacactttctataagtctcgtcacttatgaatccggccagaatcaagattcgggtatgttgaaccagattcgcactgaacacgtgctgactactcccttatcgccgttattctaacagcttttccctggtttgtaaatggacattcttacaaatctgaggcattttcagcatctgccttctgctcgttctgcgcgctgcggatgtcgaggatgcgcagcctggtacgccaatacatattcagatagatgacgaataccagcaggcagactgcggccagcgcgatgcagataccgatcatccatgcaaatccgcgcacggcgatctgcatgccgatggcgatgacgctaaacacggtgcaaagcgccgcgatcgacaagatgccctgccagtttcgcgtcagatgctcaaacagctccaggcgggatgcagcattctcctcatactccagcatgtcgccttccttcatctcatagcggaagaaatgccagctgccccgggcgttcacctccgtatggaagatatcctcccatccggcagcttcccagcgccgcttttccgcttcatccggttccaccggataaaaatccagcagatagaaataattgtgcggttctcctttgacaaaatcaaagctgaacccgtcattcttcacgaaatgatatccgcgcaaagacatgctgcgcagatactctgcttctttctcatagtcagagatatagaacagcttataggtcctcagtccctgttccgtttccttttccttgatattctgcactttttcgcccactttattccgggcgctgctcatcttttctgccgtcttttgtttcagcgcttcccgcttttctgcggaaaacagccgctgacctgctttgcgaacctgatccaggcccttgacgaatacggcgctgatcttttctgtcagcttcggctgtgccccctcatctgcctgtgcagaaggagccttcaccttctttctgatcacgttgatcgccgctttgacctgtctgccgtccgtctttttctttcctgtgtcttctttgtctgatgcgctgtgctgcttctcattctcttccaaaggctgttctgtcatgatttcatctttcgcattgtctgatttgctcatatggcatacctcctgtttttcatggcggatcggcattccggcgatcagaataatctattttatcatatcaccgcgggcagattcctgtcaaattttccctgtttgcacaggcaggcggtcttgttcagcagatgcagaagaggacagagcgatcctgatcacatatccctttactataggatgatcccttcattccccggctgatgcacgaagcgccctgctgagcagagcgccttgtcgatcagattcatgaaatgcatgccgcagctttacttccccagatggtcgatctgccgctgcaggccgtcgaggaacgcgcaggcttccagcccgtccatctgcacatgatggaactgaaaagagatctgaagcaggaagcgtgatccttcctgccggtacctgccccagatcagaaaaggattatgatagatgccgctgtacatgttgacgacgccatccagctcatggcggatcagggcagaggtccccacgatcatgtgatcagcgatctcatggtcttttccggaaatgcgcaccatctcgctcagcgtttgataagacgcgttgaatgtgtccagatcttcatcaaaggggatatcgcatgagctgatgccgccttgctgattggcgatgatggcattcacgccgatgcgctcatatgccaacatcttcgtctctgccggcagaagataaaactgctcacaacgcgatgccgccgcgccgatacaatagcacagcagcatgttcagctgatagccctgctgcttcaggttcatcagattcgtgatatccacggtccgaaagatcgtcaccatcggcatcggcgcacgatgatacagcgtccagctttgtgcgcgcggggtctgcagcggatcgacttctctcattcctgatcctcctttcccgcatgcatctgcaggatccgcccatcgatctgctcctgaaacgcctgatcatgctccacgatgagcatggtcggcgcatatctcctgagcagcgactcgatctgcatgcgtgattcgatatcgataaagttcagcggttcatcccagatatacagatgcgcctgctggcacaggctgcccgcgatcaggacctttttcttctggccatctgaataacctgacatttcttgttcaaagtctgcgcgcgcaaagcccatcttccgcagcagcgccttgaacaggctttcgtcgatgcccagctgctttgcgtatgcgcccggcaggccgcagagaaaggaagcgtcctgcgggacgcaggaaatgaccaatccggacgccagctccaccgtgccggtgtgcgcgatctgctcgcccatgatcaccttcagcaggctgctcttgccgcagccgttccgcccgctcagacacacgcgttctccctgccggatctttgcgctgaggggcacacagaccatgcgtccctcatagcatggcgcgacatcgttcagccgcaccagcacatcgctgtgatggctgagcgggctgatcttcagctcatccatccgctctacatggcgaagcagggaacgcttttcggcaatggccgcttcacagcgcgcctcgatggctttcgagcgcttcatcatcttggcggctttatggccgacataccctttgtctgccgcaccgcgcttgctcgcttccacctgatcggaccagcctgatgtccgccgggcagcttcacgcagcctgcggatgtcctttttcagctgttcgttctggacttcctcatcattttggcgacgctgcacattttccagccaggccgaataactgccgcggcagatctctatgccatcacgccccagcgccatgatatgatccgtgcaggcatccagcacctgccggtcatgacagacgaggatgaacccgcgtttgcgtttcagatatgccgccaccagcgatcgggagcgggcatccagatgattgatcggctcgtcgatcagctgaaagctgtcctcatcaagaaacagcgctgccagctgcaccttggtctgctccccctgtgagagcgtatcaaagggacgatcgagcacttcctcatcaagcgcaagccaagacagctcccgcagcatctcccactcctgcgcaaacggagcaatcgtctgcaggacctctctggtcaggcatgacccatcctggatctcgcaggggaaatagctgaatctaacggaagcatggatatttcccgaataggcgtatctgcccgccagcagctgaagcagcgtcgtcttccctctgccattccttccgaccaaggccagcttccattctgtaacgatcacaaatccgacatcctcaaagaccggctgtgcgccggcataggaaaatgtcagatgatctgcacggatcatcgacatgttcatcacctcctgtatgcggacgcatcaggaaatgatgcgcccatcaaataaatctgacgatattctcttgtttttctttctgcagagcatcctgtgcggcatagccgatcacacaggactccaggcattcgtagcgctccagtccccacatccgcttatgctcttttccctgcagcgtcttaaaatactgcacagacgcggtatgaatccagcatgagcccagttccagctctgtcgccgccagaagcatgttttccacggctgcggccgcatcctgcagcggtgtggctgcctgttccatgtccgcaaagacaaagatgatggcatcggccccataatacggcgatttctccagcttcaagacatgcatgcagtaatttaggaacacttgtttttcctgctcatcctgaagcacgacgaaacgcagcgcctgtttgttccttccggtcggtgccaatacgccgcagcgcacgatctgttccagtttttctttttccacggcacgctcgctgtacgcacgggtactgcggcgcttttcaatgcattcgatgactctcatacgccctcctctgtccgcggtttcataccgctttcatatcactttcattttatcatcttttttcatgcattgacatcctttttgcgcgccataaaaaaacaccgggagatccctaagctcccggtattcagatcatagatattaagctgccagcgctgccttagctgcatcgcagatcgcagtgaaccctgcggcatcatggatggccatctcagaaagcatcttgcggttgacggcgattcctgccagcttcagcccatgcatcagcttggagtaagaaagaccgttcattctcgctgcggcgttgatacgtgcgatccacagcttgcgcatatttcctttcagctttctgcggtcattgtatgcatacttgaatgaatgcatgacctgctcatgcgctgtcttatataaaatgtgctttgatccaaaatatcctttagccagcttcaggacacgttttcttctgttgcgtgatactgttccaccttttactcttgccatgttctattcctcctatatattcgatatctgaaatgattacttcactaacatctctttgatccgcttgaagtctgtagcgtgtaccgtagccggcttcgccagatgacggcgctgcttcttcgtctttccatggaaacggtgagaagtatatgcatgacttctcttcagttttccagaaccggtgatcttcactcgttttgcaagtcctctgtgggatttcatctttggcataatttctacctcctaattttttattttttcttcggtgccattaccgttgacattgtgttgccttccagaagcggcttcttctcgacagtcgcaatatcagcgcattcttcaataaagctatccataatctttctgccgacctccagacgggtcatcatccgcccgcggaagcgcatgtcgatctttaccttcatgccgtcttccagccagctgcgcgcatgacgcagtttcgtctcaaagtcatgcttgtcgatgaccggagaaagacgaagcggtttcacttccgtcacatgctgttttttcttcgcttccttggctttcttctgctgctcgaaacgatactttccataatcgagcaccttgcacaccggcggctgcgccttcggtgcgacgcaaagcagatcaagcccctgattgaatgcgatatccagagcctcacgacgcattttaattcccagctgttcgccatcagaattgatgaccagcatttccttaaaacggatcttctcgtttaccaggtcgtcgttcacattgttaggaataacttttctgttaataaaagacacctccattacctgattgccgaaagaaaagtgggcatgacatacccacttctttccacatcagatatctgtatcctgcatggcattgacccacatcctatggacatcgggtgagaaggggcgcttctgactttccacttgcttttctgctccgttatattaccatatacgcttttttttgtaaaggctcatccatcattttcatgcgctttttgcccggatcaacaaaaaagccagggagatccctgaccgtgcagccttcagtctctcctgagttttgaacgtcgcatataacataaagttccgaatctgctttatttaggcagatttttttatctccttttgtcaattattttgcatttc

SEQ ID NO: 4279 - DNA, 32759 bp, Unknown
  16S sequences of unknown bacteria
cgccggggcggcgggcgctgcggcggccgcggcctgcgcgggcgcggcggtcaccgtgcggggcgcgttctcgatgcgcagatgcgtctcgccctcgctgtattccagggccgagaggttgttcttgctgaccagctcggccaaagccttgatgtcgttgatcttcatgtttgaaccctcgcttgcgttacagtttggccgggcgcagggcgacggcgccgttgtgcccgccaaagcccagggaggtcgacaccgcgatggtcaggttcgccctgcgcgcggtgagcggcgtgtagtccagatcgcactcggggtccggctccgtaaggccgatcgtcggggggacgacgccctcctccacagccttggccgaagcgatcagctccaccgcgcccgcggcgcccagcatgtggcccgtcatggacttggtggaggagatgatggcgcggcgcgccgcctcctcgcccagggcgcgcttgatggccagggtttcggacttgtcgttgaggggcgtgcccgtgccgtgggcgttgatgtagaggcagtcctcgtccgagagggcggcctcgcgcagcgcgagctccatggcgcgcgcgccgccgctgccgtccggccggggggccgtgacgtggtaggcgtcgcaggtgttgccatagccgcagatctccgcgtagatgtgcgccccgcgcttcaccgcgcgctcatactcctccaggaccaggatgcccgcgccctcgcccatgacaaagcccgcgcggcgcgcgtcaaagggcagggaggcctttaaggggtcctgctccagcgacagcgccatgcaggtggtaaagcccgcgacggcaaggggcgtgatcgtcgcctccgtgccgccggcgacgatggcgtcggcatagccgtgcgcgatggcgcggtaggcctcgcccacggcgtgggtggaggtggcgcaggcggtgacggtgggcaggcacgggccctgcgcgttgtactggatggcgatggtgcccgcggccatgttggagatcatcatggggatgaagagcgcggagacgcggctggggccgcgctcgttgaggcggttgctctgctcgacaaaggtggacatgccgccgatgccgctgccgacgtagacgcccaggcgctccggctcgaccgtgcccacgatcccgctctcctccaccgcctgcttggcggcggcgacggcgtactgggtgaacttgtccatgcggcgctgggtgggcacgtccatgccgaagtccgcggggttgaagtccttgacctccgccgcgagcttggccttaaagccctccgtgtcaaagcgcgtgatgggccccacgccgcacacgccggcaaggaggccgtcccaaaaggccttgagggaattgccgacgggcgagatcacgcccatgccggtgatgacgactcgtttcattctgaaaactcctcctgtgcgggcgcgccgggggaacgcccggagccccctccccggcggcagagcgcgccgcccgttttgcggggagaagaagcccgcgcccgctcgaaaaatcgcatgtggggcggcgctacatggccatgccgccgtccacgggaatgaccgtgcccgtaagataccccgccccgtccgagcagaggaaggcgacgacctcggccacgtcctgcgcggagcccaggcgcttgagcggaatctgcgcggtgagcgcatccttggccgcttccggcagaacgcgggtcatgtccgtatcgatgaagccgggggcgacggcgttgaccgtgatgccgcgcggcgcgagctcccgggcgatggacttggtcaggccgatcagcccggccttggaggcggcgtagttcgcctgccccgcgttgcccatcaggcccacgacggaagagatgttgacgatgcgtccggcccgttggcgcagaaaaccggaatatgtatggcgaatgaaatgaaatgcgcctttcaggttgacgtccagcaccgcgtcaaagtcctcttccttcatctgggcggcgagcttgtcgcgcgtgatgcccgcgttgttgacaagcgcgtagatgggccccatctcggccgccacgcgcttgcacagcgcgccgacagccgcctcgtccgccacgtcgcaggcgtagcagttcgcctgcgcgccggcctcccgcacgccctgcgccgtctcctcggccgccgcggtgttgcccgcgtagacgatggcgacgttcatgccctcccgggccagccgaagggcgatggcccggccgatgccgcgcgaagcgccggtcaccagggcggtctttccgttcatcatgtgtttacctcccgagcgcggatagcgtctgcgaaagcgttgcagcgtcctcgacgcggcagacggcgacgtccttgtcgatcttggaaatgagccccgagagcgtcttgcccgcgccgcactcgacgaaggtgtccacgccctgctcgatcatcgcgcgcacggtctgctcccagcggacggggttttccacctggcgcgccaggagcgaagcggcgtcctgcgcgctgtagggctcggccgtgcagttggcgtacacggggacgatgggcgcggcaaagcgcagatcccgcatgtagtccgcaaggcccagggctgcctcgtgcatgtaggggctgtggaacgcgccgctgacgttcaggcgcatggcgcggcccttgagggcggcgacgcgctcgctcagggcggcgatctggccctcctcgcccgagaccacggtctggccggggcagttgtaattgacggggtagaccttgtcaaagtccccgcagagcttctccacctgctcggcgctcaggcggagcaccgcggccatggcggtcttctccccggcgctgcaggcgtccatgcgctcggcgcggcagcagaccaggcgcgccgcctccttcaggggcagcatctcggcaaaggccaccgcggcaagctcccccagggagaagcccgcgacggcgtccggccgcacgcccttttcgaccagggccttggcgcaggccaggtccatggcaaagaggcagggctgcgtgttccgggtgcgcgagagcgtctccttgtcgcccgcaaagcactgctccagggttccggggcgctccgcctccaccgcgtcgaagatgtagcgggcggcggcgctcgtctcgtagagctccttgcccatgccggggtactgcgcgccctggcccgcgaacacaaacgctatcttacccattgcgcagctcccttcaagagttcttcggcctgggcgaacatctcgcggatgatctcggccgcgggctgctccttgttgacgaggccggcgatctggccgcacatgaaggagccgttctgctcgtcgccctcgcgggcggccttgcgcatcgcgccgacgcccatcttctcaaactcctcggccgtaaagtccgcggagtactccaggtcctgcatcctgcgcgtgacgggggacttgagcccgcgcacggggtggcccaggcgccggccggtgacgatggtgtcgatgtccttggccttgagcacgcgctgcttgtagttttcgtggatggtgcactcggtcgccacgaggaagcgggtgcccacctgcacgccctttgcgcccagcatgagcgccgccgcgacgccgcgcccgtcgccgatgccgccggcggccagcaccgggatcttcaccgcgtccaccacctggggcgtgagcgccatagtggtcaggtccccgacgtggccgccggactcgccgccctcggccacgaccgcacaggcacccatgcgctcgcacatgcgggcgatggccaccgagggcacgaccggcacgaccttgaggccgttttccacccaggtcttgatgtacttggaaggaaggcccgcgccggtgacgacgacgggcaccttctcctccaccacaacctgcgccacctcgtcggcgtagggcgacatcagcatgacgttgacgccgtaaggcttgttcgtgatttcgcggatcttgcggatctgctcgcggagctgctccccgttggagttcatgcccgcgatgatgccaaggccgccggcgttggacaccgcgcccgccagggacgcgtccgacacccaggccatgccgccctgaaagatcgggtattcaatgcccagaagatcgcagatttcggtatgaatcatggttgttccttgcctttttttctggatttttccgcgcttaggcctgcgcgtcgatgaggttgacgatgtcctggacggtcttgaggtccgggctcatctcgatggtgccgccgaaggtgtcctcaaaggacatgatcagctcgaccgtgtccagggagtcgatgcccagctcctggaaggtggactcgggcttgatggtggacacgtcgatgtccttgtactcggcgatgatcttggctaccttttcgaacgtcatgggaaattcctccttgcaaaagatgtgtggatggatttttttatgtaaacgccgccgtgcggcgccgacatcagatgcgcagcagcgccgcgccatgggtgagccccgcgccaaaggcggacagcgcgacgagctgcccctcccggagcctgccgtcgcggcgcatttcgtccagcagcagcgggatgcaggccgaggaggtgttgcccagccgctcgatgttgccggggaacttctccttcggctgcttcagccgcgtctgggccgcgttgaggatgcgctggttcgcctggtgcagcaggaaccagtccaccgcctccaggggaacgtccgccttctcgcagaccgcgcgcaggtcccgcacgcaggcggagacggcgaagcgatagacctcctggccgttcatcctgaggtatccccccgcgccctcccggtgcgtgaaggggcagttgcccgccggggtcggcatgttgaggaagtcctcgttgggctgggtcgcgatgcaggtcgcaatgcagccgctcggctcgctgttttgcagcacgaccgcccctgcgccgtccccgaagagcacgcaggtggcgcggtccgtccagtccgcaaggtaggacggcttttccgcggccacgatcaggacgttgcgcaccttgcccgcgcgcaggtacgcgtccgcaaggtcgagggcctgaaggaagcccgtgcaggcgccgttcatgtccagcgtctgcccggagaagcccagcgcccccgcgatgaagcacgcgggcccgggcgtaaagtagtcggaagcgacgttgctgcagatgagcaggtccagctcctccagggcaagccctgcgtcctccagggcgcgccgggccgcgagcgttccaatgtcattcaccgattccctgtcgagcacgcgccgctcgcggatgcccgtgtgcgagacgatccactcgtcgctcgtgtccaggaactttgtcaggtcctcgtttgtgacgatctgctccggcagcgcgcttcccgttccgatgatcttcatagtttccgatctccctattgtttttcgctcatttcgctctgctttcgctccagataccggttgagcttggagaggatgcgcaccagctcctccacctccgcctcgctcatctcccgcgtgatggaccgcaccatgttctcgtggaaatagcggtgcgcggcgtccatcttgcggccccgcgccgtcagcgccacgcgggtcacgcggccgtcgttttcgtccttgttcttgacgacgtagcccttcttttccaggcgcttgaccgcgaccgtcaccgtgggcagggtgatctccattgcctgggcaatgcggctgatgctgcacgacccgccctgcccgcggcccacgcactccaatatgtgcagctctgcgatggacaggtcgttttgttgggaggtcagcatgcagctttcgacctttgccacgttctgataggtgtttaccagcaggtcgttcagctctgcgtccgcgcgtcttaacatgcctgtttcctccgtccagagcggtaattagttagtcaagctaagtatatcatcctaccgcaatttgtcaatacgcgcaaagggggaagtttgcgtaaaaaaagccgggagggcgggccgccatggccccgccctcccgcaagccccttttaggggaggaagttcttccaggcctcttccttctgctgcggatgcgagacgaagaggaagcggtccggttcctcagcaaactgcgtgtagatgggcacgcccggctcgatgccgagctggggatagccctgcggcgccttgcagatgaagggggccggggcgtaggcgtcgttgtgcagccagcgcaggccgcccgcctcgtccagcagggggaaccaggccaggccgccgtgggcgcgcacgccgcggtagtcgaacccaaagtcgcgcacgcaccacgcgccgaaggtcagcggccgctccgggtctgcggagatggtcgcatgcgcccagcccggcggcacgacgaccacctggcccggctccgcctccacggcgaagcagcggccgggatcgtcgccgtcgcgctcctgcatgaggatcacggcgcgcccggaccagatctcgtagacctcgggcgtggaggcgttgcaggaagggctgaccgcgtgcacatgcccctgggagcgcacgggctcctcgcccaggcgcccgcgggcatacgtcaccacgccgaagagcaggttccgcgcgagcatcgcctcgcggtcgctctcgcgcccgacgtccatggcgatggcgtagaccgggtccggtccggagcaggcgggatcgcgcaggctcttgcggatggcgtccaggctccggttctcgacctcgggcccgaagacgcccgggccgtaggcaaagcccatcgggttttccgtgggccgaatgtcaaatccgggctgcatctctcctctaccccctcacataggccttcatggtggcgcatcgctcgccgggaacggccgggcggatgacgtattcccccaccgccgccggcacgatgaacgtctcggcgtagtgcacgcggaagggttcgaacgcgccattcgggctctcgacgacggcctcgctgccctcgacgaggttgagcatgttcacgccgccgttcgtgttgtgcaaatcgggccttgtgaaccagtgccgccgcgtctcgaggaactcgcgctcgtgcaggccggtgcgctcctcgacccagccgtcgccgcgggcgacctcctggacctggccgacgagctcgcgcagaacgaagtccgtgtcgcggtcgaactggatgttctttctgccgtgctccaggtggatgggccggggcttgccgtccagccccacgcggttccagtcccagagcttaaaggtaaagatgtagggcgtggcgctgatctccaggaccatggtgtcgcgcccggagcagtgcacggttcccgcggggatgaggaagtggtcgtgcttgtgggcggggatgcggttgacgtagcgctccgcgtcgaactcgcccgtctcctgcgcacgctcgagcgcgccgagcatctcctgcgggtcgacgccgttcttcacccccaggtacacggccgtgtccgcgccgggctttacatccaggatgtagtagctctcgtcctgggtgtagtgcatgccgaaggtctgctggatgtactcggtcagggggtgcacctgcagggagaggttctggccgtccaccgtgtccaggaagtcgaaccggatggggaagtccaggccaaagcgcgcgtgcacgcggtcgcccaggagcgcgcgcggcgcaaagagcaccaggtcctgcgccggcacctccatgacggtgctcccactctggagcagcaggctgttctcctccggcacgccgtcaaagctccaagcgtagttcttcttggcggggtccaagccgcagaccttcttcatccactgcccgccccagacgccggggtcgaagtacggcgccacgcggaaggggcgctgcgccacgagcgccagcgccgcgcggaagtcctcgccccgcatcatcacgggcttgtcgcgcttgttcgtctccaggaggtagtcgacctcgggcatcacggcgcgcttgtggcggtcgctgacgcgccagtcgatgaagtagccgcgcttgaccttgcgcagcgtctcctcgccctcgttgtgcgcgcagtagttgccgatctcgcccgagcggtagcgcagctggatctcccagcgggccaggtccgcgtagacgagcacgtcgcccttggcgatgagcgaggcgcccacgccgtacaggagcgtgatcccctcggcctcctgcgcgcggcggcggagcacggcgatcttcttttcgtcaaagaactcgatcaggttgtggcaggagagcacgccgaagacgcggtcgtccgtgatgttgcgggcgagcatggcctcgatctcctcgtcggagtggttcgcctcgtgcgcgtccagcacgcgggcgaagaacagctcctccatcaggcccgcgacgatctcgtcaaagcgcgttcccgggtagccgtccacgacgagcagggcgcgctgctttcccgcaagggcgcgcgccagctccccggcgatcgcgccatagcccgcgagcatggaatacggcaccgggaccgtggggaatttttcataggtgcacatcggcaaaaggcctccttatcccagcttcggctcgccgtcgacttcccgcaggcgcttggcaaagcccgtgcgcgcaatgctcgcgtagtcgtggccgcagtccgcaccccagcagcagcccacagcgaggacttcctcgcccgtgttggccaggcggtgcgcgacggagcgcggaatgtagtggagcgtgccgcgctccatcttctccgcccagcagtttcccgcttcgtccatcaggatgagcgcgccgcggccggaaatgcagaagtaatactccgccgtgtcgcgcttggcgtggaagtgcccctttgtcataaaatattcgtcgcccaccttgccggggtagacaaagctcgtcccgaacagcaggccgccgggcgtgccctccgcctccttgtcgtgcatctgcacgcggtagacgattgtatcctgcggcagggccgcgcgggccgcctcatccgcaaagagccccgcaaggtcggcgattctccgctcggaggtcgtcacttccccggcgagacttcccgttgcaaggtcgatggtggtttgcatttgagcccctcctcttcttttttccgccttctagtgtactcccggtccgggctttgcgtcaagcgcgcaaaactcccccttgcatcccgccaaaaacgcgctataatagagatactgaatcaatcttcagggtagggtgcaattcccaatcggcggtgaaagcccgcgcgtgcgcaagcactgatcaggttccattcctgagccgacggtaacagtccggatgaaagaagatatgatgaagtgcaacgcaggaggaacatcaaaaaaccgaatatgcgcgccttcaaatcccctcatatcttaaaagaggtctttcatgtcccagaaggtcacccctctccacggcaactccccccgcgccgactccaagttctccgtccgcaagctgacgatgaccgccatgcttggggccgtggccacggtgctgatgtacatcagcgtttccgtgccgctcatgcccagcttcatcaagctcgacctgtcggagctgccggcgctgatcgcatcgtttgcgctcgggccgctcagcggcgtggcggtttgcctcatcaagaacctgatcaacctcttcttctccacgacggggggcgtgggcgagctttcaaacttcctcctcggcgcgacgttcgtctttgtcgcgggcatgttctaccgctacatgggcgggcgcaagggcgcgctgatcggctccctctgcggcgcggccgccatggcggtcttctcggtcttctccaactacttcgtggtctacccggtctacacggccttcatgcccatggagaccatcctctccatgtaccaggccatcaacccgaacgtcgaaacgctctgggatgcgctgatctggttcaacatgcccttcaccttcctcaagggcatgctctccgtggtcatcacgttcctcatctacaagaagctctcccccctgctcaaggggacgaagaagctcgcaaagtgagcgtgcgcaagcgcgctcccgcatttgctgcgggggcgcgctttttttgcgctctacagttccaggcgcaggccggcgtgcagggaaaagacgcgcccggggagggccgcctgcagccgcgcaagggccgcgtcgcccgtgcagtgccccgtgtaaaagcgcgcgccctccagttcgccgaagcagcggaagacctcccgcagcgtctcctccggctcgcagacgcccgtgcgcgggttggagaggtggaacccgccgaccaccgcgtcgatccggccccccgccagctcctgcgcgcggcgcacgatgttgacaatcccccgatgcgcgcagccggtgacgagcacggccttgccctcggcgcgcaggagcaggttctgctcgtcgcagaagggatcgggtgcccagatgccgccctcctcccgaaagaggacgccgttcgcgcgcggcaggggcgcctccctcccctcgtccgcaaagagcagcgcgcccggcaggatctgcgcgttgtccgtgagcaggcgcaggcgcgggttcgcgcgcagcgacgcgtccaggccgatctgcgccacctctcccgagggacgcagcgatccgcgcgcgccgaaggcctcggcccggacgtagacgggcgcgtgcgcattgtgcgcgaggaacgcccgcaggccgccgccgtggtcgtagtgcccgtgcgagagcgcggccgcttccaccccggccacgtctgcgcccaggcgcgccgcgttcttgagaaagagcgagcttgcgcccatgtcgaagagcaggctgtgttcttgccaagtcagaagcagactcaggccgtgctcactttgaaacggctccttcacatggttttcagataggcacaatatattcatcatttcctccttttatttcttttgtgttgctaatatttcctattgtgttgaatttttgatggatatatttcaaaactttcggtgtctcatcaccgattcgaaacacaaaacccgcaactgcgctttgagaaacctcgtctgagggataaaaggaggtttgaccaacatgaaaaaagcaaaatccctgctggccatctggctggcgctcatcctcacattgaccctgttccccaccgcgctggcggacgatcagacgcacacggtcacctacgatccttccacccctgaccatattacgtacacatcttctcccgccacaaccaccgcaaatcagaacctcgtatttgaatttacggtcgaggaagggtatacgtacgatgtcggcatcaccatcggtgacgcatcctacaacggcggaacagatgtgcagggagccaccgcctccgaacgcatctacaccattccctcggcggacctcaccgacgatgtggtgatttccctctccgcgacccagtccactgacgacagtggcgacgatggcagcgcggcaaccgcctacacgatcaccttcgccgacggcgtagacgatgcggagattgaagttccggaaccgcagaccgtcgacgccgatacgccctacaccctcaccgcccccacccgttcgggctatgtctttctgggctggtccgacggaacgactacgtatgaggccggcacggtgctgaccgttgacgatctgaccagcgacatcaccttgaccgcgcagtgggcgcagagcgtcgcgatctccttcgactccggcaccagctccaacaccagcggcatccccagcgacacgagcggcgccgccggatcgagctacacgctgcccacgagcgaaccccgccgcaattccggcagctacgaattcaccggctgggagtattccgaggacggcggcgtctatgacgccggcgagaccgtgaccctcccggacggcggcacgaccgccgtcaccttcaccgcgcagtgggcctaccgcacctatccggattacgacgacgattcctcctcgtcctcctcttcggatgacgagtacaccatccgcgccaccgcctccgacggcggctacgtcagccccagcggcaccacctacgtggacgagggcgacgacctgaccatcaccttcgccccctacaccggctacgtcatcgacggcgtgtacatcgacggcgtcctggacaacagccacgacggctcctacaccttccgcgacgtggatgaggaccacaccctctacgtccgctacatcgcggatagcggttccggctcctccggcagctccggcgattcggacacctcgcccaagaccggcgacgccagcgcgccgctgcgcatgggcctcggcttcggctccctggcgctgatcgccttgctggttgcccgcaggatgcgccgcgcgtaaccgcctttccacgcaagcgcaccaaaaacgcagcacgaaatgatcttgaacggccctgcccgagcggcggggccgttttttgcgcggagtcggtgccctgcgcggccttgttcgcctgttcattgcgctttcatttcctgtctgttacaatttggatacatttcggccggaaatatttcagcaaatggcagaatttgttacagcaatcttttgaaaatgtggaaacctcttcacgaaacaattcgtctaaatgggtagaaggaggtatcgaccatgaagaaagcaagaaccctgctggccatctggctggcgctcatcctcacgctgaccctgttcccgaccgctttagctgagcccactactgatgtagctgagccttttactgcaacgtacacagcaagcgagggcattacgttcaacagtaatcccactactgtcgagccgaacacttcgcttaaagttacgttcactgtcgcagacggctacgaactcaaagacgtcacaattgctatgggtgaaacctctaactacaatggggcacaactctctcaaagtgagcagacgtatacctataccattccgtctgttactggtaacgtaactttcaccgtaacggcagaaaagaccgcgacggaccccgtcgttccgccagtgcccaataacacagagtttgagattacgctttcggccggaactggcgaatttcctaatggcaagaatgaactaatcttgacgacgtccactgactctgtagtaattcctaacgattccaattatattcccacacttgccgatcattacttccttggttggtacgacgctactgcgcagaagaattatatgcctgggggcaccatcgagaatataacggtcgacatgacgttatccgctcgctttctccacggcgttacagtagtgtttgaggctggagatggggtggatccttctactgtcacaaaccttccgacaactcaatccaatcttaaacccgaaggcaccattacccttgggacgcccagcagagcaggctatcgctttgatggctggagcgatggagctgccaaatataatggtggtgcagaatacaccattcccaacaaccttggacaggatgacaattatactgtcaccctgaaagcgacctggacggaggcccccaagatcgccatcaattacgaccgtggcaatgctcccgccaacgcgagcatgcctaccggtacttctgtggagaaggccgtcaacggcgccacttctttcacgctcgacaaaaagaccccttcccgcaacgacaacagcatggtctttgactactacacggcgaacgtggatcttggcgatcccgatggaaagtacgctccgggtcagaccgtgtccatcccggagggcacgacttccgttaccctcaccgcgcactggtacaagaagtactacgcggacgatggtgacgacgataagccctccaagccttccaagccctcctacgacgagtaccgcatccgcgcgacctgctcggacggcggctgggtcagcccggcgggcagctcctatgtgcgcgagggccgcaacctgaccgtcaccttcgccccctacaagggctacgccatcgacggcgtctacatcgacggcgtcctggacaaccgctatgacggctcctacaccttccgcgacgtggacgagaaccacaccatctacgtccgctacgtccgcgacagcggctcctccggcggttcctccggcggcggctcgcactgggacgacgacacctcgcccaagaccggcgacgcctctgcgccgctgagcatgggtctgggcgtcggctccctggcgctgatcgccttcctggtcgcccgcaagatgcgccgcgcgtaaatttcccccaacgacacctttgcaacaacacctaagaggatgagcaagcggtcccgcccatgcggcggggccgcttctttgccctttcggcgcgggcgcgcctatccctcggcgaaaaagtcggtgtccacgcgcttgacggcgtagaccgcctcggtcgagacgcccaggtcgtactccatgagcagggcggccagctgcgcgccgtccaccagcacggccttgaccgtgtgctgccgcgcggcgtaatccttggcctcctgggtgaactgcgcggtcgtgatgaacaggccctttgccgcgccctggccggccagcgcgccgacgaacttctgcacctcgggccggcccacggaggtgccgcgatcccacttcttggcctggatgtagatgaggctgaagccgagcttgtcctcgcggatgatgccgtcgatgccctcgtcgcccgtgcggccggtgacgatgcccgcgccctccacggcccccccatagcccatcttgagcagaagctgcacgaccagattctcaaagaaggctgccgactgcgcgcagacctcgtccaggagctcgtcggcgaccgcgctgcggatgaggcggtaggcgtcctccagcgcgtcgcgcggcgtgcttccctcctgcaaagcgggaccctcgcctggcgtggctcccgcgccctgcggctccacgccggtgaaggcgcggaagctctcgtagcgctcgaggaaggcgttgtccaccgactcgcccgcccggagcacgcgcccgccctccgcggacagggcgtagacgccgcggcggcgatgctccaggagccccgccttgtgcaggtaggtcacggcccagcccacgcggcccgcccacaccacctttccgctggggagcagctcctgcaggtcctgggcggacaggccgcggacagcggcgagccctgcgcgcagctgcgcccggctctgttcgccatgctcccccagccagcggagcacgtccccatacagttcatcgtacttgggcagcgccatggcaatccccctcccgatttgttcggtccgcgctcatccctgttcctcctgcaggacgagcgcgtgctcgcagagctctccctcgtgaaagtgcggctgttccagctccgcgggcgggtcgtaggagacccaatagcccgggaccaggtggacgtacccgcagacggggcacttgtaggaataggtttccatgggcgttcctcctgtcttttctagcgtcggacggcctcggggcagcggtcggcgaggcgccgccaggcggcctccaccgcctccgggatgtccacgtgcgcgatgaagccgcggccgcgcgggccgtagccgttctcgtcgtcgcgcaggcgcgggatctcgcccagggccagcgagagcaggcgttcccggctgccgtagaggggcgcgctctccggcgtcggccggaagggcggcgcgcagaagatccgcgcgcccggaaagaccgccgcaaaggaggccgcgctccggcgctgcatggtggggtcctggatgagcgcgagggtgcgcgggcgcagccccagccggtccagcagggcgcgcgtcctgaccgcgttgtccccgcagttcgtggattcgccctccacgagcaggcgggaaaagccgccgtccgcgcgcaggatctgcgcaaagatcgcggcctccggccggccttcgaccgcgatgccctcgtagcggggatcgcgccggatcgcctcgcgcaggagcgccgtggagtgcccgaccccgccgctgaccacggtgtgccagaactgccgctcccggttgaggcgcacggcgtactccgccgcgcagggcagggcgctgcccagaaggaccagcacctccgcgcagtcaaacgcgtcctcgggcgcgaggaagtcgagcagaacctgcagatccgaatctgcgcacatgcgtattccgcctccctttctgttccgcgtacttctcccctactgtacaggattccgcgcgcaaaagcaagaaaaaaagagcaccttccaggtggaaggcgctcttcatgcgcggatttacgcgtcgatgcggaaggtctgctcgccgtaggcgccgggagcgatcgagtacttcgggaagaccaccacgacgctgccgtcctcgtcgaggtagaaggacgtgttctcgtccacggtggtaaagccgccctggtcctcggagaagtaggagacgtccgtgttctccgccatctgctcctggatggaggaattgcagatgttcacccaatcctcgcccagcacgtcctccagcgtcagtaccttgcccgtggcaaggtcgaggttgtagtagacgatctccttgccggccgagatgtcgctctccgcggcgcgcagcacgaaggagacgcggtcctcggtctcgctgaggatctcgtagtccacgtcgacctggatgttcttctgctcgaactcttcctccgtgccgccggtggccaggaacgcctcgcggtactccgcaatgcgctggttcgcctcctcgatgtactgatccacgatcttgttgatctgctcattcacatccgcggcaaactgagtgtcgtctgcaaccatgggctgctcgacgttgacggtatgatccggctgctcctccgtaaaagagcgcaccgtgagcacgcgggcgatgtcgcccacgaccgggatctcgtccactgcctgtgcaaaggcagggctaacattgacgctgacgccaaagaccacgaccaccgccgcggcggcgccggccactctcagccacttcatttgattttccactcctctagccttccgcatgcggcgtttggtctgctccacgagtttttcggacgggtggtttctgtgatactgtctgcggtattcctcttccatcatgctcccccttcccattccttacggagctgtgcgcgggcgcgcgacagtctggagcgcacgctcgcctctttttcccccgtgatcgcgccgatctcgcgagaggtcagcccctcgccgtagaacaggtgcagtgcggcgcgatccttctccggcagccgggccagcgcgtcgcgcagggccagggcctcgaaatcgtccgcctggccgtgctcgggcaggcgttccacgggcacgacgtgccgcctccaggcggacgcgccgagctttttgcagcagttcagggttacgcgcagcagccatgccttgcggtgttcttcggaggcaaaggtcggattgcgtcgcacaagccgcagaaaaacctcttgaaagacatcgtcggcgctgtccctgcggccggtctgcgcacaggccaagcggtaaaccatgtcggcgtaccgctcgacgacctcgtcgatgctctcatcagttcgaagcgacaggctctccatttttcccctgcctcctttcacttacacataccccgcacagggggaaaacgctgcaaagatttttaggaaattttttcttcttccgcgcggcggaccgccatgccgtcccaggggatctcgccgtctgcgcgggccgtgcgctgcatgtgcgcccggatctcttcctcctcctccgcgctgcacagggggatctcgtcgcccgcgcggtagatcacccggtcgttctccggcgcgccgacgcggatctccgtcacctcgtccccaagctcgatgtacgcgccctcgtcgagggagacctcgacgtccgcgcggtagagcttcccctcgtggaggtagtattgaggggtgatgaccgtgtgcggctcgccgcgcttggggatgcgggaggtgcagaacgtgatgcggattccgccgtccccctccccaagggtagatctttggccgacataggtcccgctttcaaagacccgggccacccagccgtccgccgtgcggaccagccggacgtcgtactcgtccagcggcacgggcgtcgaatcgaccacccagagctgccaataggcggcggccgccagcacagcggccaggatcgtcacggccagccccaggaggaatccccgggaggtgaggcgcttgcagtaccggcgcacgcccttccactgggcgcggttttccgtcgcctcctcgggcgaaggggtctgccggtcctccgcctgcatgagcgccagggcctcgcggcagccctcgcagttccggacgtgttcctcgacaaagctgcggctctccgggctgcagacgttatccagcatcagcggcatgatgtcctgcgcgacggcgcagatggtctctctcggttcagtcctctccgtcatgttccctctcctttccgactcgttcccggagcctgaccttggcccggtagtaggtcacgcgcgcccagttttcgctccggccaaagagcgcgccgatctcgctgtagcgcagctcgcccaaggtccgcagggtgaagacctccttgtacggctccgccaggtcgtgcagcgcccgatggatgcgcaggaccccgtcccggtcgtcggggtcgacgtccagggccgcctcggccggcggggccgggcgccgggccctgcggcactcgctcaagtaggcgttgcgggcgatgctgcacagccaggtcttcagctcgcagcggccgttgaactgctcgcccttgcggaaggcgcggtcgaacgtgtcctgcgtgagctcctcggcaagatgcgcgtcccggcacagggaaggcaaaaaccggtagacatgtgcgaaattttcgcggtacaccgcttcaaagtccacctcgtttcccctcctctcacacattggacgcgcagaaggcggtttcattacagaaaagagagaaaaaacgccgcgggaactcttcccacggcatttcctgcgctcaggcgttgaaccaattctcccacaggtcctggatgcgcgcgcagacggcgtccaggtcctctgcgatgggggttccccgctcgtagaccacgcggccgtcgaccagggtcatctccacgtcgcgcgagttgccgccgtagacgatgtggtggacgaggtccgtcatcgggtgataatagggctggtccaggtccacgaggcagaggtccgccttgaaccccggctcgacgctgcccacgtcctcgtacccgagcgcgagcgcgcccccgcgcgtggccaggtagagcgcctcctccgccggcaggaccgtggcgtccagcaggcggcccttgtgcagcagggcgcagatgcgcatctcctcccagaggtccaggctgttgttgctcgccgcgccgtcggtggcgagcgccacgcgcacgcccttgcggagcatctccggcacgcgggcgatgcccgagccgagcttcaggttggagcagggattgtgcaggaccgccgcgcccttttccgcgacgatcccgatgtcctcgtcgctcagccacacgccgtgcgcgagcagcgcgcgcgtgccgtcaaagaaccccacgcggtcgagcgcgcccacgggcgtgcacccgtgccggccgatgcacgcctcgtgctccgcgcgcgtctccgagacgtggatgtgcagcgggcagtccaggcggcgcgccgcatccgcgcacttctccaggaaggggagcgtggccgtgtactcggcgtgcgggccgaggcccacgcgcacccggccccccagcgcgccgttgtactcgcggtggaaggcgacggcgtcggccagctgctcgtccgcgttgtccgcctggccaaacaggcccatggcgagcgtggcgcgcaggggcaccttctccagcgcggggaggaggcagcggttttgggtgtacatgtcgttgacggtggtgacgcccgcgcgcgccatctcgcacagcgccaggaccgcgccgtcggtcacggactgcggcgtctccttggcctccatgggaaagacgcgggtgttcagccaggtgtgcagctccatgtcgtccgcgccgccgcggaagagcaccatcggcaggtgggtgtgcccgttgaccaggcccggcatgaggagctttttgcccctgccgtccacgacgcgcgccccggcggggagcgcgtccagccctgcacccacataggcgatgcggtcgccgtccacgaccacggtcccgttctgcagcacgtcccgcgccgcgttttccgtcacgacccagacgttttgaaagacggtcttcatctttctcctcctcccgcggcggccttagccgacgtggacctcaaactcgcagtagggatcgccgttggcgcagcacttggtctccacgacctcgaccggccgccccaggggccgggcaaagcagccggccgcggtgcccgcctcgtaggcgcagatcttcatgccgatgttgggcaggccgtagcagtccgcgcactcgtagtggcggtagatgccgaagtcctcccgcgccacgacgatctcctcgcgcgcatagccgtggcgcgcggcgatgggctggttgctgttcaggatctcgggcagggtcttgcccatgagcatgggcgcgatgaacacgtcgccgatgacgcgcgcgacctcgtactccagcttgagcagctccgggaagagcaggaaggagagcgtctgccgctcgcgcatgtacatgacctgcatctcgttgcccagcgtcgggcggaaggggacgccgtcgtcatagagcttgtacatgttgagcatggagtccaccagcgcctcctggcggcggacgtaggcgctcatctcctcggaggtctcccggtcgatgtggatcttctcgcgcaggatcttgcggacctcctcgatcttgggggaaagcaggatgctgttggattccatggtcattgttctcccttcgcgtagtagtgtttgccctcggaggccggggcgcggcggctggacccgcgcgcaaagatcagcacgaccagcgtcgcgacatagggcagcatctggacgagctgcgggggaatgctgccggtctgcaggcggtactgcaggctctgcgcaaggccgaagagcagcgagccgagccacgcgcccaccgggtgccacccgccgaagatgaccaccgccagggcgatgaagccgcggccggagaccatgtcccggctgaacatgtggatgtcgccgatggacatgtacgcgccgccgatggccgccagcacgccgcagaggatgacgcagatgtactgcgtgcggtagacgttgatgcccatggagcccgcggcctcggggttttcgccgatgacgcgcgcgcgcaggccgaagaccgtgcggtagagcaggaaccagacgcccacgacgctgacggccagcaggatcagcaggggcgagacctcgcccaggatgtccttgaggaccgggatctggttgatgacgggcaggctgatgttggagaaggaggcgacctcggcgctcttgcccttggtgtcccagatcatctgcaggagcacgaccgtaaggcccgaggccagcacgttgatgccgacgcccgccagcacgtgctcgcacttaaaccggatcgtcagcacgccgtgcagcagcccgcacagcgccccggccagcatggccgtcagcagccccagccagacgttgttcgtaaagtacgaccccaccacgccgaagaaggcgccgatgagcatggttccctccaggcccatgttgatgatgccgctgcgctcggagagcgttccgccaagggccgcaaaggcgatggggatggatacgcggatcgaccccgcgatcagggacgtgacgacggagaggatgtcttccattttgctcaagcctccttcttctggcggcgcttcttgaggaacatgcgcacaatgccgggcgtggatacgaagaggatgaccagcgcctgcaggacctggatgaattcgccggggatgctggtcatgcggttcatgctggtggagccggcgcgcagcgcgccgaagatcagcgcggagaccaccgtgccaaggggcgtgtactgccccatgaccgcgatggccacgccgtcaaagccgtagccgctcgtcatgttcgtgatgaagtagccgtgcacgcccagcacctccaccgcgccgcccatgccggccagcgcgccggagaggaacatcgtcagaaggttcatgcgcgcgatgttgatgcccccggcctccgccgcgtaggggttggccgagatcgcgcggatctggtatccggccgtcgtgcgggagaggaaccaccacatcaggaccgcaaaggccagcgccacaaagatgccgcccgtaaggcgcgtatagggcacaaggggcgtcagcgtcgcggaggggaggatggtctccgtgcgcacgagcatgccctcggccttgaactggtagttcgccaggtattccgccaggtactgcgccacatagttgagcatgatggtcaaaatgacctcgctgacgcgcagcttgttcttgaggaatccggcgatcgccgcccagacgccgccgccgatcatgccggccaggaagcagagcggaatgtggaggaaccagggcaggccctgcacatacgcgccgaccagcgccgccgggaatgcgccggcgatgatctgtccctcgatgccgatgttgaacatgccgccccgcgcggcaaacgccatcgccaggcccgcaaagatcaggggtgtggccgtgcccagggtctgggcgaggttgctgacgtttccaaacgcgcccgtgaacatcgccgaatacccttcgatcggcgaatagcccgcgatgagcatcacgatgcccgccacgatcagcgacagcaccagcgctgcgcccgagaggaagacgctgttctggctcagccgctcggcgaggccggcctttttcttggtcccgctgactgtcatcgggttacgcctccttttcttccgccgcggcgtggcccgtcatcagggcgcccagcgtcttttcgtcgtagtccttggccggccgcttgtccacgatgcggcccgcgtagagcaccgcgatctcgtccgagagcttggtgagctcctccagatccgcggagatgagcaggatcgccttgcccgcgtcgcgcatcttcaggatctgggcgtgaatgtactcgatggcgccgatgtccacgccgcgcgtgggctgcgccgcgatgatgaccttggggtcctgcgcaaagacgcggccgatgatgaccttctgctggttgccgcccgagagcgacccaacggtgtcgcggatggagtccatgcgcacgtcgtactgctcggcgaccttctgggcgaaggcgtcccgctccttgagccggatgaggccgtggttgctgaattcccgcttccggtggtagccgaggacgatattttcggcgatggtgaagctgccgacaaagccgcgcttgccgcggtcctcggggatgtggcccacgcccgcctccagcatggcgcgcggggtgatgcgcgcggcgtgcagcgccttcccctccagctcgatgctgccgctgtggagccgctgcaggcccgtgagcgcgtcgatgagctcggtctggccgttgccctccacgcccgcgatgcccaggatctccccggcgcggatctccaggctcacgccgtcgagcgcgttccgcttctccttgacgaccgtggcgtcgcgcagggccatgacgaccttgtgctcgccgggcacctcgttcttctccgcctggaaggagacgatgcgccccaccatgagctctgcgagcttgctctcgtccacgtccctggtggagacggaggtgatgacctggcccttgcgcaggatggtcaccgtgtcggccaaggccagggtctccttgagcttgtgggtgatgatgaggatggtcttgccgctctccttgagccggcgcagcaccttgaacaggtccgtgacctcctgcggcgtgagcacggccgtgggctcgtccaggatgaggatctccgccttgcggtagagggccttgaggatctccacgcgctgcttggtgccgacggagaggttctccaccttttcccgcgcgtcgacgtacaggccgtattccttggccagggcctccacgtccgacacggcctttttgaagtcaaagcagccgttcttcttcggctcgtagccgaggaccacgttctcggcgaccgtcatgggctcaatgagcatgaagtgctggtgcaccatggcgatgcccagctcgatggccttgagcgggttttcgatcttgacgggtttgccctgcacgctgatctcgccgctggtgggcgcgtacatgccatagaggatgttcatcagtgtggacttgcccgcgccgttttcgccgagcagcgaatggatttcgccgcgctggaccagcaggtcgacgttgctgttcgccagcacgttcttaaactgcttggtgatgccgcgcatttcaacagcgtacattgcctctccccatttctctcgcatttggcggtgtttcccccgcgctttggcgccgcccgaagcgcgtcaacggcaaatacggcaacagcagcagaggtcctctgccgccattgccgtgtgtcgccgttccgggtttacttgttgcagtaggtttcgatgaaggacgcaacgtcgtccagcgtggagggcacggtcagcttgccgtcgatgatctcctgcttgaccgcctcaacgctgtcgatgacctcctgcggcaccgccacgttggagccctcgcaggtgtaggtcacgccgttctccgcaaggcccacggagtgggagccgggctccagcgtgcccgccttgccggacaggatgccgtcgcggatgatgtagttcagcgtgcggatgccggaggcaaagacgtggtccggatcgatcaggcactggttggtgtccgagccgatggccagcaggtccttctccgcggccgcggcgaagacgccaaggccggagccgcccgccgcctggtagacgatgtcgcagccgctgtcgtacagggccagggccagctccttgccggtggaggtgtcgttccaggcgccgacgtacttgcgctccacggtggtgccgttgccggcataggccgcgcccgcctcatagcccgcgacgaacatgttgatggaggggatgtccatgccgcccacgacgccgatcttgccggtctcgctcgtctgcgcggccaggtagccgagcaggaaggccttctcctgatcgcggaaggtgaaggacgcgacgttgggcaggtcgccgcagtcgccgtccacgaacatgaactgctgctccgggaacaggccggacaccttggtcaccgcctccacgccgtcaaagccggagccgatgatcaggtcgtactcgccggtgcgggccagctccatgtagtggccctcgaactccgcgacctccgtgggctcgatcacctgcacggtgatgctggggtcctcggccatggccagctggcagccgtcgtacatgctgtcgttaaaggattcgtcgcccaggccgccgacgcccaggacgatggcgaccttgtatgcctcgccctcggcgggcgcggcggattcctcccccgcgggggactccgtgccggcagactccgcgggcgcctgcgtcgcatcggtgccggcggtgttctccgcggcgggctcgcccgcgcagcccaccagggccagcgccagaacgagggacagaatgagcgcaaagatcttcttcatgacttgcttctcctccgttgctgttttgccgccaggatgcggcatttcgcttttcgcgtatcgaaagacgccggttagttggcgttcattcgcttctgcacgcggctgggcacgtcgagcaggttctcgccgcagcggcagccgatcttctccgggtcgatggcggcaagcgcgcgcaccatgatccggctgaacttgggcgcgcactcggcatagatgtcgaagatggggcgcttccagtcggggtcgatgccctcggcgcagttggagacgatgtagatcgccgcatagtgcgcgccgatggcgcgggccagggccgcctccggcatcatggtgtggccgcagatgtcgcagtgctggtcgtacaggcggcggatctcggccttggtctcaaagcggggcgcctcgtccaccgcgtagacgccgcggccgaagacgcgcggatactccttgagcgcctcgttgtacaggatggccgccaggtccgggcagacgatgtcgcgcatgcgcacgatcttgtccgtgaacttggaaaggtaggacacgcgcttggtctggtcgatcaggtcgtcggggatgatgacgtcgccggggtcgagcagcgggttgatgccgccgccgctgccgtcggcgaggatccacttgacgcccgcgcgctgcagcacccagaacacgcgctccgagggggtgtccaggtagggagacaggccgaaccacccgtggaagggcatgtccagcacgacgtgcttcttgtgatcggcggtgatgtccgccgagatctcaaacagcttcatcggcacggtggtgccaaagggcgtctcaaactccatgtccgcatcgaggatcttgacgccctctatgccgacattctccggaaaatcgtcgccccaggtgccggagccgccgatgtgcgcatattccgcctgcggaatttcttttctgatcatatgcagcctctccctgtctgttttttcctgtcggatgtcgtccctttgtataggacgagactagtatagtcaaaccttcattttccgtcaatcaacttcacaggttgttaacggtcgaaaattcgaatattaacattcatccctgtccagaaactgcccaaaaatccgcaggaaatcccaggaagcgcggcggatcgtccggaaaaacgcaaagcggcctctccccttcgggggagaagccgcttgaccgggagaaattagattctggctgcgatttcccgtgcgacgacgacgcccgtgacggatgcctgcatgaggccgcgggtgatgcccgcgccgtcgccgatggcgaagaagttgcggaccttggtctcgaacttctcgtccacggtgaccttggaggagtagaacttgacctccacgccgtagaggagggtgttcttgctgtagaggccgggcgccaggttgtcaaaggcgcgcatggcctcgatgatgctggtcagatgccggtgcggcaggacgaaggagaggtcgcccggcacggcggtgggcagcgtggggatggtggtggacttcttcaggcgggaggcgtcggtcctgcggcccttgagcaggtcgcccaggcgctggaccatgatgccgccgccggtgagcatgttgcccagctgcgcgatgtacttgccgtactcggtgggctggtcaaagggctcggtgaacttggtcgacacgagcatggcgaagttcgtgttctccgtgtggcgggagtcgtccgcgtaggagtggccgttgaccacggcgatgtgcccgtcgtagtgctcctcggaaaccaggccgccggggttcatgcagaaggtgcgcaccttgttctcaaacgtgtcggagtagtagacgagcttggcctcgtacaggtgcttggtcaggtggtccatcacggcgttggggacctcgacgcgcacgccgatatccacctcgttgttctgcgtgtggatgcccgccgcgtgggccacgcgcgtcagccacgaggcgcccgcgcgcccgggcgcggccacgacaaagcgcgcgccgatgcgctccaccttgccgtcgcgcgtcttgaggaccgcgccgacgacctggtcgtcctcgaccacgacgtcctcgcaggtcgtgtattcctggaaggtgaagttctcgctttcgcagagcttgcggtacatggcgcgcagcacctcgaaggagtactccgtgcccatgtggcggaccgggcagggaacgagctggatgttgtacttgctggcctcgtacttgaactcctccaccttgggatcgttgcgtccatgcacgatgtccggcgcgccgaaggccaggtactgctcgtcgcagtaatggatcagctcgcggacctgctggcgcggcaggtaatcgggcaggttgccgcccacctcctcggaaagggagagcttgccgtccgagaacgcgcccgcgccggcccagccctgcatgatggcgcagggcgtgcagcccacgcactttcccgtccggcgcgccgggcagttgcgccggtcgatactgctgcccgcgtccacgatgaggacgcgcgcgttcggagagcccttctgcagctccagggcggtaaagatgcccgccgggcctgcacccacgacaacgacgtcaaattcgcgcattggattcactccaaatcctgatgaaattggtccgtgcagacgcctccgcacatacctatttattataccatgtttttgcgcggcgcggcaaggcttttccgaaaaaaaggcccgcgccgctctttttccgggaagaaaagcgggcgcgggccggttctcattgcagcggggggaggtcgtccatctcggtgcgggcctggttgagcagcttatgccgcagcgcatagagctcgtaggacaggtccaccttgtagacgtgggggttcaggcggcggcggtactgctcccagagcgtggagatctccttttggcagtaggcctgaatctgcttgagcgtcgggcgctcgtagacgcacttgccgtccacaaacaccggcacgagcaggtcccgcagcgtgtagtccgtgtaggtctggcgcttccaggtgtccacggggtggaagatggtcaggggctttgcggggtcgatctgctcgctctccaggaggatgaggtcggccatggccatgccctcgcggttgtagatgcgctgcaccttcttgatgccggggttggtgaccttgctggggttttcggagatcttgatcttgggcacgaccttgccgtccacgatctcggcgctcatcttgtagacgccgcccagggccgcgcagccgtcggaggtgatcatgcgcgtgcccacgccccaggtgtcgatgcaggcgccctgctgcttgaggtcccagatgacgtcctcgtccaggtcgccggaggcgcagatcttcgcgttggggaagccggcctcgtccagcatccggcgcgcccggcgcgagaggtaggagaggtcgccgctgtccaggcgcacgcccaggggctcgtgccccttctcccgcagctcgcggaacacgcggatggcgttgggcatgccgctgcccagcgtgtcgtaggtgtccacgagcagcaggcaggcgtccggataggcgtccgcataggcgcggaaggccgtcagctcgtccgggaaggacatgacccagctgtgcgcgtgcgtccccgccacgggcacgtcgaacatcttgcccgcaaggacgttggacgtggagccgcagccggcgatcagcgcggcgcgcgcgccgtagaggcccgcgtccgggccctgggcgcggcgcaggccgaactccatgaccaggtcgccctgcgcggcctggcagacgcgcgccgccttggaggcgatgagcgtctggtggttgacgatgttgagcatcgccgtctcgatgagctgggcctcgaagatcggggccttgacgcgcagcaggggttcgtaggggaagaccaccgtgccctcgggcatggcgtagatctcgcccgtgaagcggaagttcttgaggtagtcgaagaacttctcgtcaaacaggttcagcgagcgcagataggcgatgtcctccgcgtcaaagtgcaggttttcgatgtagtcgatcacctgctcgagccccgcggcgacggcaaaggccgcgtttccggggttcttgcggtaaaacaggtcgaacaccgcgatgcggtccggaatgccggcctggatgtagccgttcatcatcgtcatctggtacaggtctgtgagcattgtcaggttgcgcatatgtatccctctctccccatgcgggtcagtcgtcgtcctcggcgtccgcgtccccgctgtccgcgccgccgtccgcatccgcgtccgccgtttcagcgggttcgtccgcgtccgccgtctctgcaggttcgtccgcttccgccgtctcctgcgcctctgcggattcctgcgcctccgcttccgcgcccgtcacagcggcctgcacgacggccgcgcccagcacggcggccgcggcgtcgtcctgcgcgtcctcgtcctgcgcgccgcccatggcttcgcgcttgtcctccgggatgagcacgagctccgggtcgagcgggccgacgggctcctccaccttctccacgggcggggcgttcttgcggcgcttgacaaagcgcaccaggagcacgatggagaacgccacggccatggcgatggacagcacctgcgacacgcgcaggccgttggggaagaagatcaggctcccgatggggatgccgtccttaaacatccacaggctgtccgtccgcagcccctcgacgtaggcgcgctcgatgccgtagagcacccagtaccagaggaagaggttgcccgcgggcgcgtttttcgccttgcggcggtagatcatgaggaaaatgaagatgaggaagcaggcgacggactcgtagaagaaggtcgcctggtgccactcgccgaggcgctcaatgtagaccgcataggggaaatactgccacgcggggtccgtcaccaggccgccgaaggcctcctggttgaagaagttgccccaccggccgatcgcctgacccagtacgagcccgggcgcgaccaggtccgccagcttccagaaggagatcttcttccagcgggaaaagatcagcgtggcgatgacgccgccgatgaccgcgccatagatggcgattccgccctcccagatgtacagggcgcggatcgggtctgctgcatattgatcccactcgaagatgacgtaatagatgcgcgcgcagacgatggcgatgggcaccgtcaagagcgcatagtccagcatgcaatcggcatccagtccctcgcgcttggcctcgcggtagaccatgatgaccgcaagcaccacggagagggaaatcagaattccgtaccagtaaatgtcgcggccaaagatggtaaacgcgaccggatccggacaaaacatggcggtttcctcctgcttcatttttttgttaaactgcccctgcaaaagcgcaaaggtgtaaacacattatagagcgcaaatcttttccagtcaatccaaacccgttgacggcaaaaataaattcacaaaagcggccgcggcgccgggcaaacgggcgcaaaaaaacctccgccgccgcagggccttggcccattgaacggggaggcatttccccctcgggttacgccgcagacgattccgtgcccgcgggctggatcttctcatacagttcgtcgaattttgccatctgctcctcggtcatcggcttgccctggacttcctgggcaaggttcttgatctcggtgcacagcgtggggtccgcggtcacggcgatgtggattacggccggctcaatgccggtgatcttttcgcgcaccatttcctcgatgcggtcggtcagcgtgccctggtactgcgcgtcaaagctcaggcccaccacagcgcggtccccttcggcgaccacgtcacagaggctgacttcgctcagcttctccacttcctgggccagcgcgtccaggttcagggcggcgcccgtctgggcggagctctccgggctgggcgacgcgtccgaagcgcccggggtcgtcgccgcgctctccatgggagagggacttgccgtcgcgctctgcgtggggctgggggtcgccgtcagcgccgagggcgagggcgagggggatgcgccggggctgatgctgcacgagcacgcggtcagggccgccgtcgcaaggatgaagaccagcgtcaataacagtttccttttcaaaggtttcgcctccttcgggccttattgtgcgccatgcgcatccgtcgcatacctaaaacgctgcaagttttttctcctgcccgcgccgttgcaaaaagccgtgccagcatgtataataggatgagcatttgaggcgctctcgcgccgtacggaggcgaagaaatggacaaactcatacagaaaagacgcggcgtgttgggactgcttctcctgatcgccttgatattgcccgtgatgggatgccagcagcaggaggtgtacctggaggatcttctgccccgggacagcgtgcagcaggccgccgtcagctacctgaacatcggcgtgggcgaaaacatcccccgcgtggactacgcctcgggcaccagccagtgcgaccagctactcagccttctctacggcgcggcgccggtcgttgtggaaatcccttccaattattctccggagatcaacgcctcgcacgagatctttttgaccacgtccggcggaacgatgtccctgtactacgacgactaccagaacctgctcaacgtgcccatcaaccgcagggtggacgaggagagcgtccgcgtgtacctgagctttcagcccacgggccttgccgagctcctctccgcctggggcgagggcctgagcagctcctcggcgagcacggggaacaccagctcctttgtgcccccggacgacagtgcgctgcgcgccagcatcgactccacgctctttgaccaggtcagcgcggagatcgccttca

SEQ ID NO: 4280 - DNA, 8438 bp, Unknown
  16S sequences of unknown bacteria
tctcctcccggaacacagtgcggtaaggacgcaccccggtggaaagatcgatgtcattctgatccatgcaggcgatggcacaggctccgcaggcacagcagcgggagatgtccagttcaattttccatgccatactcttacttcctcctcacattgcagcaggcgctgcgataggccgggaatcccgaataggggtccagcgccgcaccgtccagaatgctgttgatatccagttcccgatagccatgatagatatagacctccccgggctgcacggtggcagtgggaagcgcctggaaggtgagcgaacccacactggtggtgatctccaccgggtcacccagctcgatgcccaggcattcggcgtcctccatgctcatctccaccaccggatcgggcagcaggctgcgctcccagggcacatcgtgcagacgggaatgcagggcattggggatacgggtaccggcgcagagcaggaacggatactgctccgggtcgggattgtagggcggacggtaggtgggcagggcatccagtccccattcgggatgggcggcaatgcgctcggagtagagctccagcttgccggtgggggtgttgacgccccgttccagaatgctgccgacctcatagggggtcacgcccggcaccttgatggggccttcggcggcacgcagttcctccacggtgatgggcagatcctgaatgatatactttatgcacgcctcatagccggcgcagagcagttcatcgtccatcttcatgcggcgggccagcagggtgagaatctcacagtcggacttggactcgcccaggggctccaccaccggattggtataccaggcatagccgccgggatagcacttgaattcaccccgctccatggaggtgcaggcaggcagcacaatatccgcatacttggcggtatcggtgaggaacagatccacatccacaaagaaatccagcttgccgaaagcctctgccagccgtccgtcctgggggaacatgcggtagttcatgcccagagcaaacagcaccttcaccgagttttcgtcctggcgcaggatattgtcggtgaggtcgttggcctgcatatcatgccgcaggtcgtaccacagcgggaaccgctcggcgcccactgccttgggggcgtcatggggatagcgctcttccatgaagtgctcctcccgggtctcaaagccgcagtaccgctccatataggtgtgcggaccgggaagctgaccgccggcgcggtccacattgccggtgatcaccagcagtgccatcatggcccggtagttctgcaggccgttgaggtgatgcccgatgggggcgctgctctcgttgacgcagaagctgcccgcctcatggatcatggcagcagcctgccggatctgctccgccggcacgccggtgagctcctcgcccttttccggggtgaactcccgcacataggcggcatattcttcaaaaccatggacataccggtcgatgtatgcccggtcgatccagtcattttcaatgaggacatgggcgatggcaagagccagggcaccatcggttcccagatggggacgcaggtgcaggtctgccagacgccgggtggtgggggtaatgcgggggtcgatgatgaggatcttcatgccccgcttcttgccgttctccatggaaccgatcatggggtaccgggagaagtagctgttggcgccccagccgatgaacaggttggtcttgcccaggtcggtgcgcatggcatagcccgaggtgagctgccaggccatcagaccgctggtaaagcagctgctggattcggtgccatagttctggctgccataatccccggcaaaccgccggaacatgaaccggtaccatttgctgtatcccgaatagaaggccacccgatgggcgccgtattcctcccgggccgagaggagcttttccgcgatggtatcgattgcctcgtcccagctgatgggctcgaacctgccctcgccccgttctcccacccggcgcagcggggtgaggatacggtcctcccggtagaggtactggcggttgcccagacccttggtgcagagcttgcctttattctgcgggtggtcgggggtgccttccaccttgatgacctttccgtccttgacatagacatccagtccgcagtgcatacccggagtacagatgtcacagacgctgcggcggatctcaatgccgctttcggcaccggggatcttgcccttgctgtaatcgatctcagccatgatatcgtccctccatcttctcaataaacgacggcttgagcccctccttgatgaggatgccccgctgaatgggtgaaagctttgcgttgccgctctccataatacggtacagatagttctttacagtaccgctgatccggtagttgtccaggatattgacgcccaccaggccctgttctccgatgactgcctccacatagaggccgctttcgatatggcccgaggtgactacctgaccggtgagccggttatcgccgaagccgatgaagtccatatccatgaagtgggtgatgttgtgcaggaagttgccgtcaaactctgccttgccgcctgccatattggcgccggctgtggcgccctgatgggcggcattggtccacaggccgatgatcatgctggtgttgctctggagttcctcgccctcacagcagtcgcccgcggcatagatgcccggcaccgaggtctgcatatcgtgatccactacgatgcccttatttactgtcacttccgccgggtccgccagcgatacattggtgcgggtgccgatgcacagcacaatgagatcggcctggacggtgctgccatcggtcatcgagcagataaagccatcgccggtctcctccaccgaggccagggcactgcccagtgccagctgtacgcccttctgggtgatgcgccgctcgatctcccgggacaccgactcataagctgccagcgggaacattctcggggccatatccgccagggtggtatggatgccgcggttgttgagcagctccaccaccttgatgcccaccatcgaagcgcccactaccagggcagtgcggtaggggtgggattccagtgcctcccgcagccggatggcatcgtcaatggtgcgcatatagaacgccttctccgggtccagtcccgggaagctgggcgcaaaggcatgggcgccggtggcgatgaggatcttgtcaaactgacggctctcaccattttccagccgtacagtccggctccgggcctctaccttttccacccgggcgccggtatgtacctccagccggagctcctgccggatcttctccatatccccgaaggggaacagcccttcaaaggggatcttcccggctacataataggtggtcagcatgggattgtagggagaatagccgtgttcactgtacacggcgatcgtcccgtccgggtcgttttcccggatggccttggctccgtaatatccggcacagccaaaaccgatgatcgcataatctgccataatgtccttcctttctgctcctgtgccaaaaagatagaattctaactttattttagcggtatgataagttgttgtcaatggatttttcgccaaagaatcaggatttttcccggctctgtcatagatttcctgttttctctggtatcccggcaccgcctgtggtagaatgagggtatatcccattattttacacaaatcacttcccgaagcggaggcgtttgcatgcataaattgctcaaaatcctgctggcgggtctggtgtgcctgggcagtatggcaacggcctttgccgatgagtctgccggggtgctcccctgcaccctgacagcggaaaacggcaccccggtctggcagctttccgaccagaaccgctccaccaaactggactggtccggcggtaccctcacggtggagagcacagagcccatcaccgggctctatctcatctgggaccgtccgcccgaatcctggaccggcactgccggcagccagaccctctcgggcggggaatacggcttcctgcatgagtatctcccgctggaatccccggtgacccgggccgaactgaccctgcccgagggaagccggtgctgtgatgtctatgccttcggcgcgggggaactccccgactgggtacagcagtggcagcctccgctggcggacgccgacctgctggtgctgcccacccatgccgatgacgagcatctcttcttcgggggcaccatgccctactatgccggcgaactgggaaaaaaggtccaggtggtctacttcaccaaccactgggcggaaccctaccgtccccatgagctgctggacggcctgtggacggtgggcatccgcaactatccggtgatgtcctcctttgtggaccagtatgccgacagcctggactatgcccgcaccctctacgacgaggaggaggcagtggcctggcaggtacagcagctccggcgcttcaagccggaggtggtggtgggacacgatgtaaacggtgaatacgggcacggggtgcacatgtacaatgccgacacactgatgaaggcgctggaactgagcgccgacccgtcctatgacccggaaagcgctcaggaatggggcgtatgggatgtgcccaagacctatctgcacctctggccggaaaatcccattgtcatggactggagccagcccctctccgcctttgggggtaaaaccgctgtggagatggcacggctgggctttgcggaacatgtttcccagcagaccttcttcaaggtggaggactacggcccctatgactgccggaaattcgggctttaccggtcgctggtgggcctggatatccagggcggggatttctttgagaatctcgcagccgaggactactcggactatctcccgcccgagccggagccggaaccgaagcctgtgtccgaaccggaaccggagcgcacccggaccctgccgggctggacgcttctggcgggaatggtgggcgccgtggcgctggctgagggtatgattctgtatggaaggaggagaaagagatgaaggtgacagccattgtgccgtcctacaagccggatgaaaaactcgccggcgtactccgggacctcgccgccgcgggatttgaacggatcatcgtggtggatgacggcagcggcccggactatgaggcttacttccgtcaggcggagggctatccccagtgcgtgctgctccggcatgaagtgaaccggggcaagggcggggcgctcaagaccgcctttgcatggtttctggagcacaccggggaggatctcggcgtggtgaccgtggacggcgacggacagcacaccgctgccgacgccctgcgctgtgccagggaactggaatcccacccggacagcctggtgctgggggtgcggcagtttgacggcgccgatgtgccgctgcgcagccgcatcgggaaccaggcgaccatctggtgtttccgggtgctgtgcggcgtaggggtatcggatacccagaccggactgcgggccatcggcaccgactttctccgggcgctctgcacagtccccggcgaccggtatgagttcgaaaccaacatgctgctggcaacctcccgcctgggcattcccatccgggaagtgcccatccgcaccgtctatctggagcagaacgccacctcccatttcaatcccctccgggattcccttgccatctaccgacagatctttcgctttctctcggtgagccttggctccaccgtgctggatgtggcgctcttcgccctgatggactggctcctgcggggcttctccgtcgagctgcggctgctgggcgccacggtgatcgcccgggcctgctcctccctgtgcaacttcgccgccaaccgcaccctcgtctttgaaaaccgggaacaccccggtcctgccatggtgcgctactacctgctctgcattgtccagaccgctgccagctatggcggggtctatctgctctcggcggtgctggggctgccctcggtggctgccaaggtcatcaccgataccctgctcttctttgccagcttccagatccagcgccgctgggtctttgccgtaaaaccccgtaaacaggaggaaactgtccatgtctgaaccgaaaaaacaccaaaagccctcgctgctgctccggggtctggctgtgctcggcaccacactggggattctgtgcctctttgtgtatgccggtgtgaatatcatctgcaagggaccatctcccaccgcccgggatctctttgtgggctcggtgatggagaccagcgccgccaaattcctggcctatctctgctactccgaggaggagatcgccgagatccgtgcccggaacgccgtggtggagaccgctgaggtcaccgaacagaccggctttgcccagcgggacgagagcgtccccaaagataccatcgagctggcggatgtcaccggccccaccttcaagggcaagatgctcattgtccatgatcccgcccgggtcaaagtcgccgtggctccggtcttttccgaggaggcctcgggcgtccgggtggaggacttcgccaaacaggaaaatgccgtggctgccatcaacggcggcggattcatggatgagggcggcgtcggcaagggcggtatgcccctgggcatcgtcatcaaggacggcaagctcctcaacggcgggctttccagcgcccagcccattgtgggcttcgatcagaacaatcagctcgtagtgggcaccatgaccggtcaggagtgcctggaccggggcatccgggacgctgtttcctttggccccacctttattgtcaacggcaaggccatggaggtcgccggttcgggcggcggactcaatccccgcaccgtcctgggacagcgggccgacggcgctgtgctcatgctggtcattgacggacggcagtcccacagcatcggcgccacctacaaggactgcatcgatgtcatgctccagtacggcgctgtgaatgccgccaatctggacggcggttcctcgagcatgctggtctataacggcgaagtgcagaatgtatgcgcctcgctctatggctcccgaccgctgcccaccgcctttatcgtcacccagccgctggacgaaggagggaactgaccatggctgcatctgcaaaacaccggctgggcttccgggagaagctcggcctctatgccctggcattgatgctcatcggagcggcgctgctgggatacctgtggttcgcgctggaccggtacgaatccaatacgcccgaatcctcggtgcgccggtacctgcaggaaacggctgccggacagtgggagaccattctccaggacgctgaagcggacctctccccgctggaccgccccgaggactatacagcctggctgaccgaggtctatgccggattgccggaggaatacacgctggtgcgcacctcgggcggcgagggacagacctacgccctgatggacggcagccgggaggtgtcccggctcatactcaccccggctcccgcggagagcggacggagctggcaggtgcgcaccctggcagaacctctgccgccggtggagatcctggcgccggagggctgtacggtacaggtgaatggcacgccgctgggaagtgaataccgcaccggcagtcaggcggcagcggggtatgaatcgctgccccagggctgcgaggcaccccaggcggaagcctaccgcatcgaagggctgctgatggagccggagatcaccgctgtcacagccgatggctctgcctgtacggtggctgctcccaccgagggggaagtgcgcaccgtttcggtgacagcgccggtacccgaagcccaggccggggaatactgggcagcggcagaacaggccgccaaaacctatgccgcctttatcagctcggatgccgggcgtggggaactgaatgccctgcttctgccgggaaccgagttctggcaggccatgcaggagttctacaacggctggtatatcgaccacactggctacgcctatgagaacctccagcgcctgagcctcacctctgccggagagaatgccttcaccgccgagctgtcctttgactatctggtctaccggggcgcacgggaataccgttacccctcccgctaccgcctggacttcctgaagacagccaacggctggaaggtagtacgcatcgccacactataataaaaatgaaagccgctcccttgcctggggcggcttttgtgctgtattggggttggagcgaaggtgcgttccttcctgcctgggggcggcagacggtgggctatgctccttggcctgccgggtgtgagggaataccgccctcctctccgctgccgtccgagcttctgaacggcagccaacggctggaaggcagtacgcatcgccaccctataataaaaatgaaagccgctcccttgcctg

SEQ ID NO: 4281 - DNA, 1680 bp, Unknown
  16S sequences of unknown bacteria
ttcgaccggcgtgctgccataggtgctcatggcgaacagcgtgcccgccttggcggcgccgatagcagtgtcgacctcccctttcacgtgcgcgagcccatgagccgccgacggcgcctcgataatcggggtcttgaggtcgatgccgaagatggacgtcgagaggtccgccttcgagatgccctgcagcacgcgcggcacgatcttcttgtcgttgaaggcccgcgtgttctcgcgcatcgtccactcgtcttcggcgccttcgcggatgtagccgaatgccccgcggtccatgcgtgccttgacgcggtcctccagacttgcgatgttgagaatgtcgatggggtgttcttcgttgcttgtgtagtacgccaacgcaggttccttctttccttttgcgcttttcgtccaacgctcccgagtattgcgagtacagggcgaagctgatagtaggcactttgaggtgccataggttcccgatggtaacttttggcttctgctggggtttcttgcgagaagcatgcaggatatgtggattcctgcacgcccgatatggcatcgggcagagaccgttctcgcctccgaaccggacgggcagctacacgcccggcgtgactgcccggggctcgaggaacatctggcggcagagctccttgcccgtttccgtcttgaacacgcgctcgagcgccgagcgtgccgcacgctcgcccgccccgtcctcgaagaggttcacgagcatgtccgcctcgaggaggatctgccagtccaccccatcgatgccggtataggtatggtggtgcgcgatgaggaagcatacacgctgcgcatccacctcggagaacccgcagcgttccagaatcggcgccgcctcgccgggcccgagcttttcctggttcttgcctccgcaatccccgagaaggccctcggccttgtggattccgatgtcgtgcaggtatgcggccgcctccagcacgaagcgcgtgtgcgcgtcgacgccctcggactcggcgatgagcttggcaaacgcatgaaccttgatgaagtgctggatgcgcttggggtcgccgcaatcgtaggcgatggtctctttgcacaggcggttgagcatatcccgctcggcgggaacgtccgatttggccgtcgtgttgccttggcccacgggggcgctgtctgcctcaaaccattcgctcatcgaatgcacctcacactagttcacaaaacgcgataatcccggttgctgcacgtatcggcgaccgaaaggccgcaggcgtcccctgtcgccgtcgtgcgcagaagtgtactccaagcgtattgccatcaggtaaccgcggtttttcctcagcgtggtatcgtcggatctatctctgcccgccagcgttcgagcagggcgcgggcatgtttccgggaggacagccgccggccatcgatggagcgcaccggcatcgctcccatgagggagttggtgacaaacgcctcctcgcagcgtgcgaggtcctccgggtagagcaccgcctcctcggctgccccctgctccagcacccaggcgcgcgccaccccggggagcagcccgctttttaccggcggcgtcagcacgcggctgtccaacaccagaaagaggttggtagttgcgccctcggccagctccccgcggttgttgagcatcaccggctcgtcaaagcc

SEQ ID NO: 4282 - DNA, 7412 bp, Unknown
  16S sequences of unknown bacteria
gcacggcacttttttaagattttttatctttgcgaaggggaaatggggtaaaataaaaacggcggggcaagccttttctatcccatataaaagcgccgtttccatgcctcgcgaagatgcggaaaatgcggcgatacgcctgacttgcgacgtgggacgccgtttcgcagccgcggtgttttttcctccctctccttatatggtgttttttatactttgcgttttttaaatcgcctttttgccgcgcagataggacgcgattaagtctatatcccgcgcgcttttcggattgagcacccggaaatcgtacagggtaagggtggtttcgaaatgcctgccgctcacggcaaaatccccgtagagcggtttttcgtgtcccgtatacgattctatcagcgtacccacgcttccgcgcggcaatccttcgcgcagatgtccgttcgtcgtcagaacgatcaggtccatttcttccgctaacttattgtctatgtacttgtccatgtttaaactcctcccttttttctctcgtgccattagtttaccacacatttcgaaaattacaagcgcggactgccattttttccgttttttggtaaaatttttttcaacgcagccctgggcggctcctttttggaaaaatcaacaaaattttttctttcggggagtcggaaacgcgaaaacggagcaaaaatctttcgaaaaaatttctcctcaaaacagtttacaagcgaaaaattttgtgatataattataatcggtataaaaagggctttaatacgaaaactaaaaatgttgaaaaataacattttttcgaaaacgcgctttcggcggatatttcggggcggaaaagctttgaaaaagactcgtcggggcatcgatcaaacgcttgtttttctcggtgattaaagactttttatgcgaaaatttataacgcatcgtcataatataaaacgtctgtaaacaaaacttttcaaggagataaccgatatgatgaccaacaacaaaaaagtgcttaaatttgtcgaagacagcgcggcgctcgcctgcccggacaaaatcgtctggatcgacggcagcgaggcgcaaagggacgcattgcgcgcggaagcggtcgcttccggcgaaatcatcaagctcaacgaggagcttcttcccgattgctatctgcacagaacggcggaaaacgacgtcgcccgcgtagaggacagaacgttcatttgcagccggaaagaagaggacgcgcttccccattccatcgtcaaatggatggatcccgaaaaggcgtataagatggcgggggacatcgcccgcggcaagatgaagggcaggacgatgtacgtcattccctattcgatgggcgtggtcggttctccgttctccaaaatcggcgtcgaagtgaccgattccatctacgtcgtcctcaacatggaaatcatgacgagagtaggcaaagtgtgcctcgacgagctgggcgaaaacggcgatttcgtcaagggcttccactgcaagtgcgacgtggatcccgaaaagagatatatcatgcatttccccgaggacaacacgatcatctccgtcaactccgcttacggcggaaacgtccttttgggcaagaagtgctttgcgctccgtatcgccacctatctcggcaagaacgagggctggatggcggagcatatgctgatcctcggctgcaagcggcctcaggacaaagagatgaagtacgtcgcggcggcgttcccttccgcctgcggaaagaccaatctcgccatgctgattcctcctcaggaatatctcgacgcgggctatgagatccagacggtcggcgacgacatcgcgtggatccgggtcggcgaagacggcagactgtgggctgccaaccccgaaaacgggttcttcggcgtcgcgcccggcaccaacgaacattccaatcccaacgctctggcggcgaccaagaagggaacgatcttcaccaacgtcgcttacgatcccgaaaacaacaccgtttggtgggagaagctgacgaaggaaacgcccgcgcatctcatcgactggaaaggcaatccctggacgcccgagatgaacgcggacggcaagcaccccgcggcgcatcccaactcccgtttcaccgctcccgcagagaattgcccctgcatttcgcccgaattcaattccaagaaaggcgtgcccctgtccgccatcatcttcggcggcagacgtgcgaccactacgcccctcgtctatcagtcgagagattggaatcacggcacgttcgtcggcacgatcatgtcctccgaaacgactgcggcggcgacgggcgcggtcggcgtgctccgtcacgacccgatggcgatgaagccttttatgggctattccgtggatcagtattttcagcattggatcgacatgggcaagaaagttcccgccgagaaacagcccaagatcttcaacgtcaactggttccgtcaggacgagaacggcgacttcatgtggcccggtttcggcgaaaatatgagagtcctcgattggattctcgaccgctgcgaaggcaaagtggacgcacgggaaaccgccatcggctatcttccctatgcgaaagatatcaatattaagaatacggacgtcacggaagaaacgctcgataagctcctgtacgtcgataaagagcgctgggcggcggaggcggaagaaatcgggaaatattacgacgataacttcggcgacaagcttcccgaagagatccgcgagaatctcgaagtcctgaaagccaattgcgcgaaataagctttttcgcctttccgctctgtcttttaaaaagacggggcggagaaacaaataaaatatatcgcgaaacaatcgaaagcggaatacatttacaggtgtatcccgcttttgtatagggaggaaagtatgttaaaaagagaagagatccgtatccgcgacccgtttgttatgcccgacagggaagcgggcgtctattatctttacggcaccacggcgctcaaagaaggcttgaacgcggggaacacgttttccgcttacaaaacgcgcgatctcgaaaatttcgagggaccgtataccgtcttcgacggcggaaagacgggattttgggcggacagggatttttgggcgcccgaagtacataagtacgaaggcaggtactatctcttgggaagcttcaaggcggaaggaaagcgccgcgcgacgcagatcctcgttgcggacgatcctttggggccgttttctccgctgacggaaagcccgataacgcccgccgcatgggagtgcctcgacggtacgctttgggtggagaacggcgttccctatctcgtgttctgtcacgaatgggtgcagacggagaacggggaaatgtgcgcgctgcgcctgactcccgatttaaaagcgcccgcgggcgaaccgtttgtcctgtttaaggcgggggacaatcccgccgtggacggattcgagggatgcgcggggcgacagtgccgcattacggacggaccctttttgttccgcgaggacgggaagctgaaaatgatctggtcgagtctttcgggcggaaagtacgccgtattggaagcggaagcagacgctctcgcgggcgagtggaagcacggcggcggccgttttacgttcgacggcggacacgcgatgctgttcgaggattttggcggcgtaaggcgcatctctttgcaccatcccaatacgcctcctctggaacgggcggtatttctgcctttttgaggcggggcgtcacaaaaagcggcttgcggattgtttttgcgcttctattttgtccgcgcacggcaaagcttaaattttatcgcggcttttgtttcggcttacggctttttcgggggcgacgaatcgattttacttcgcggcgcagcgaaagcgcggacgttttccccgcacttttttccgcgaacgggcgttttactccgcggcgcctgacgctcgcctgcgtaaaatcatcgcgggcgcaactgtaaagaaggcaagggagggtgtttttattccgcttttccctgtctttcccttgcctttggcggggagtcgcataaagagaaaaaaagagtcgggcaattttgcccggctctttttcacgtcgtttttgcttttttagagagccgcgttttgactggaaacgccttctgcccttccgcctactttgtgctcgtcggcgcctctgccgcctgttccgcggcttttccccctttctttttacggaaacgcacttcggcgatgacgatggaaacgacggtgaacacttcggtgacgatgcctccgagcgatctgcacacaacgtcgtagatcagccagcagccgctggaaggcagggtgagaagccgtaccttctgcgggtttttcatgccgtaagcgagcgtcgtaaagatctttcccgcaatcgccaaaaggcaaacgggacccgtccacgtcagcgcgcccgccgccgccatcagcagagaaaaaagaataatgcccgcggcggtggatttattcttttttacctgccgcgcaaagacgagattgcgcacgcatccgatgacgttcatcgccacgcccgtgtacgcgcccaagaggataaattgcagcgcaaacgtcagttcgctgctcgttttgtaaagcatgatttttttgtgttcgtttttctgataggcgataaaaccgaagatcgctcccaaaatgccgatcagttgaatgaagatttccttccccataccttctctccgcttgacttctttttacaaatttattatacttgtaataagcaaataatcaaagcgtaaggagtacagactttattttggttaaaaattcgaaaaaacaatcaaaataaacgcttatttgagggaaaacaatcaatgaaaaagaaagaggacaaagacggcgggattctcgcgttcctgcaagaaagaaaacacgcgagcgtggaggaaatttgcgaaaaagtttacgccagtccttcgacggtgcggcgcagactcacggagctgcaaaggaagggactgatcacgcgcacgcacggcggggcgcagatcaacgacggcaacagttttcttccgagtttcaccttccgttcccatcaaaacagtctggaaaagaaaaaaatcgccttatccgcgatcaaattgataaaaaacggggacgtgatctttctcgacggctccacttctgcgtttttcatcgcagagtacctttcggaatttgaaaatatcaaggtgcttaccaacggcatcgacacgctctcgctgctttcccgaaacggcgtgacggcgtattcgacgggcgggctgatttccggggagaatcggtcggtgctgatcggccgcgtcgccgcggaaacgatagggggaatgtatgcggacgtcgcctttttttcggcgctgtccgtaggaagggacggcgttatttccgattgtttcgaggacgaaaacgccctgcgcctctccatgatgaaaaacgccgccaagaaggtgtttttgtgcgattccacaaagttcggcaagcgctccgcctttcgcctctgttcggtggaggacgtggattgtatcgtcaccgaccgcgacatccgcaattatttcgagccgcggctttctcttcccgaaatcttgttctgagcgctgtttttgcgcttttcggcgagtcggacggaggcttgcgctcgtttttttgaacgccgtgaatggaccactttttagcggtaaatcacaaaaatcctcgaacggacgttgtaagaacgcccctcgaaaattgaaatttttaagagcctgaattttttgaaagaactttttaaggtcttgcaaccgaccgcgcggttttttctactatgcaaatgagaagatggattcagagtctatttcgcgcggcgaaaaagcttcgcaaaggcgaaaatcgcttttgcttaggacgatctgcggcgatacggcgtctttttaaacgccgtctttgcgttagatttttttttaagcggaactcgtaacccttccttttttcatccgtgtaggaaagggtcctctgtccgtcttcctgctttttacatgacgctgcggcgccatatctcggaatgctcttttccgattcgtcggttaaaatgattctcggattttagggagggaacaaacggaaaaccgggaaaacaaagataaattttcgccgcgaaactataaatcgttacccttttagtgagaatagacaaatactttccgcccgaagctttctatggctttgggcggaaagcgatttttaagcaaacgcaaaaaatctccgaccgccgaaaatccgccgagtcggaaaagctgtaaaaacgataatccccccgaagccttgcgacctcgggggaactacctatatgataagggggaaaatgatgagcttattgatgagtaaatctcttgaaaagtaccttcatttgatttacaaatatattctactataaatccgcaaaaaagtaaattattttgtcgaaaaattttttaatcctccaaaatcattagaaacgagcaaaaaatgaaatatattatcattttcacatatttttcacaaaaacaaagatgttaactgttaaatttttgtaaactgcaaacatatcgggtaaaatggaaaaaaaggggtagagaaaggggacgagtttctgtttgaaaagcaaacgcgccctcaggggcggggaaggacttttatttgaaatcaaaagcggaaattcatagaattttgcaaaggaaacagcagaggacgacggacgcgaagtaggaaaggagggaaataatcagcgcgcccgtaaattttttctgttttacctgcgaaaaatagacggcgcctatgtaaaagacggtttccgaggacccgtaagcgacgcaggcgcagcgcgcggcatagctgtccggtccgtaacgggtgaggatgtcggaaagtacggcggtggaaccgttgccggacagcggcttgatgaggacgagttccgcgatctcttggggaatgcccagaccgcgaaagagcggctcgatcaatttcacgagcttcgcttccaatccgctcacctcgaacagctttgtcagcatcatgacggcggcgatatagggaaagacggacatgacgagcggaagcgcgcccttgactccctcggtaaaactgtcgtagacccgcacttttttgacgaccgcaaagaggaaggaagcgagaaagatgatcgggatgatcagagtaaaaaacttcattatctcagccctgccctttgctttttgccctgacgggtccgaatttccgtttttcgcgctccttcggcgcggcgttttttttcgcccgcttgtcgtccgttttgataaataatttgacgagcaggacgccgagaatcgtggaaaacgcggtggcgagcatcgtgggcaggataatatcggcggcggaaacgctgccgg

SEQ ID NO: 4283 - DNA, 17814 bp, Unknown
  16S sequences of unknown bacteria
cccgaaacatcgccttcgacttttacgttctggcaggagctgatgtctccgtaaacgtttccgcggactattactgtgttgtatccgtcgaggttctcgtgaacgtcgccgtcgattatcttgctctcgcctgagatgttaacatctgcgtcaccgtcgttaaagatgtggatagtcttgtcgcctgacatcgcgtttttaatggcttctctgatgccctttgtcgctccgtttatcgagcaagcggcgtcgctgacactcttcttaaagtcttccatgcctttctttatagcattttcgccgttcactccgaaagcgccggaagcctccccgccaacctgtccgcaatttacgttgaagcctgcctttacgttacccgcaacatcgccgcactttgtttcaaagccggatctgacgtctccgcctacacagccgcctatcgtcatgccaaagccggatgtagcgttgccgtgtacgtttccttcgactgttacgccgagattggagtcgagcgagtaaacgtcgcctttgataacaactgtcatgaacttgtcgggattgccgatgaaggatgtgacgcgctcgccgtttttcataacgacaacttcgtattcgtcctttttaaggtcaagcttttcgccgtccccgtcaatatttacgttgccgctgtcgtcctctgcactgcgctcggtgtattccgccgttatctcaggctcgccgctttcctttgcttcttcggcgggtgcttcttccgcattttcagccgcttcttcgtccttgtcctcgtcggagataacgttttccgcgttgtccttcgctttaacgtcttccattcccataatagccgatacggattctccgaatatctcggcaagcgcgggaagtgtcagaatgtcgggaagtgtttcgcttctttcccactgtgatactgcctgatggcttacgccgatacggtctgcaagctccgcctgtgtgagtcctttgttctttctcagctccgctattctctgtcctataatgattctgtctgtcatgttcatttctcctttgtatgtgtcgaatgaatgaattcgatttataatgtatgtatatccctctcacgaaaacacattgctgcgcagctctctgctttctgttttcagcatagcacaaacgagacaagaatgcaataaagccgtaattgaatttacaaaaaagttgaaattccagtaacgcttgaattttcgagccgatttgagtctgattcgtggctgcacagtgttcttttgttattgttttccatttgttatggtaatttttggcttgtcggtatttttgcacaaaccgtccgtcaaatacgatatatgcaaaaatatacatacaatttgtatattgcgcacaattcaagcgttacttgcataggttttgggcgttcttacagtgtcatgcggagccgctctcgaatatactgaaaaacagccgcggaaatattcggctaaaccatacgaagggatgcgtgctatgaacaacgacaccgaaaaaggatatctcaaaatcagcgttaccgaagccggaggtacaattcctataaagggcgcgcttgtcgttataacggaatacggagacgacgacggcgagagcgtcaacgtactatactcactcacaacggacgagagcggatacaccccgacactagctcttgacgctcccgtaaaaagtgagagcatgatgccgggagcttatcagccgtatgcgctatataatataaatgtagtgtttgacagatactaccctgtcgagagcgtcggagtgccggtttttgcgggggtcacttccattcagcccatcaatcttctgccgctgagcgaaaaggcattcatagcgggagctgacaacgggcgaatcatgatatatgaaactcccggaatgaacgcactctcccctgacggagtggttagagacgagataggaaaccgcaacggcactgtctccgggggagttatacaggagggcagacaatgaacaacggagctattctccctgttatacccgaaaacataactgtccacctcggcagaccgaccgagagcgcaagaaacgtcacagtacctttcgccgactacataaaaaacgtggcgtcaagcgagatatatccgacatggcccgagaacgcgctgagagctaacattttagcgcaaataagcttcacactgaacaggatatacacggaatactaccgaagccgcggatatgattttgacattaccaactccacggcgtttgaccagtcttttgtgtacgggcgcgacattttcgagaatatctcacagatagtcgacgagatattcaacgaatacatacgcaggagtggttcggttgagcctttgttcgcagtgtattgcgatggaattaatgtgcagtgcaacggaatttctcaatggggcagtgtggagcttgcgaatcaggggcttacgccttacgaaatccttcaatattattacggagacgaaattgagcctgtccgggacgtacccgtagtcggaagcacttcgtcatatccgggaacgccgctcagactcggctcaaacggagatgaagtgtatttcgttcagacaagactaaaccgtatatcgcgcaactacccgaacataccgaaaatcgcaaatccgaacggcttgttttccgcagatacggaggatgcggtcaaggcattccagcggcagttcaacctcacgcccgacggaatagtaggttcggcaacatggtacgcgataagcagaatttacactgcggtaaagcgtctcgcagatataaactcagagggcatatctctcgatgaggttacattattgtttaacggtcaaatttccgaaggctcctcggggcttggcgtaagagagctgcaagtattgcttgcattcatcgcacaattcgacagtgccgttattcctgttgcaattgacggtattttcggcagcggaactcgtgcgtcggtcgagagcttccagtacgaatacggtctgccggtcacgggaacagtcgacgccgccacatggtacgccatagtgaacacattccagaatctgcgcgcctcacttccagatggatatatcacaccgccgacttccgtatatccgggaacgccgcttgtcataggctcaacgggagaggatgtcgtaactctgcaaaattatctgaacaggatatccgacgtgtacaccgacataccgaagctgaacgtcgacggaatctacggcacatccacacaaaacgcggttcgggcatatcagcgaatattcggcctcgaggagcgcgggatagtcggagctgtgacgtggaactccatagcctccacataccgcaccataaccgacggacaatacggctcccccactcagttcggcggctctgtgggaaactaaggagggcaaaatgacgtttgatttatctaaggaagaaaaccgcgtgcgacaggttcagactatgctgaggtatctctctttcgcattggacgaaccgatatacacagtaaatgtgacaggaaagtacgacaagcagaccgaaaacgctgtccgacactttcaggcaaaaaacaaactgcccgtcacggggatagtagaccttgacacatggaacgcgctctccgcacagtatgtccgagaaaacgaaaggcgagctcccgttctgctgtaccccatcggcacatccgcagactatgttacgccgcagggagaggttagcgatgtcgttctgattttgcaggcgatactgaattctctgaggacgtggtacgattacgagcacattcccccatccggcatatacgagagaaagacagccgacgccgtgagagtattccagtccgcaaattccctccccatgacaggaagcgccgaccgagaaacatggcaaaggctcgcccgcgaatacaattccgcctacggtgaatagcacgcgaaaacaaaaaagccgctgttctggactgatgtagttttgcataactcacagtgattttgtcgagttcacagtgatttgcaaaattcacaaccgaaacagcggttttttcgcgcgatttgtaataattatttataatccaccttgaattcccgtgatttttgtgatataatttataaaattaagtttgaattatcttttatgcatcggaggatgagataaatgagcaaaatcaatgttttttcatacaatcttagaatggacaaccccggcgacggtattaacgcgttctcaaagagaaaggaatatgttctgcgcactttcccgaagtatgacgctgacataatcggcttccaggaaattctcccccacatgagacagtggcttatcgacagcttcaaggattacgaaatctgcggtatcggtcgaggaaaacacttcgacgatgaaagcaacgttgtagcaatcagacgcgacaaattcgatctcattcagatggaaaccttctggctctccgacacaccgcaccagcccggctcacgtttctccacagaccagagcggctgtccgagaatctgcacctgcactactcttctgcatcgtgaatcgggacgcgctatccgccactacaacactcatctcgaccacgagggacagttcgctcaggcacagggcatttctctcatcctgaacagaatcgcgtccgactacgacacatggcagattcccgttatcctcaccggagacttcaacgtaactcccgacagtgttgtggtaaagtccgttctctcgttcagcggatgcagagaaaagctcgttgacgccacagctgatattcccgtttcattccacggctatcatcccgacacgtgcagaagcaagatagactatgtttttacaaatcttccgttcgtaaaaggctcttcctttgccgcaaccgactgtgaaaacggcgtatatctctccgaccactatccggtaggcactgttctcgagctttgatgaaaagacaccgtttattcaccgcacttctgtcggctctgcttttgttcacctccgctctcgtctcctgcggaaaagaggacacgtcggagaatgaaaccacgcttgccgaaacagaagaagcggtctccgacattattatagcgaaacgcggcgaggacacacagttccgtcttgcctacaacgtggactcggaagagagcgttcgcgacaacattcttgagataaaaaaggcgtactcggacaagctcggtgtgaagctgatgccgctcgacgactacgacccgtcaaacgaatgtgactttgagataatagtaggctcgacaaagcgcgaagaatgcgttacactgacaaattcgcttgaagacggagaatacgccataaaagcagtcaccaataacggacggcagaaaatcgtaatcgcgtacaagggaaactacgctcgtatgtacgccataaaaactttcatagacaattatattggggaggactattcaatggtacccgaaaatctcgacctcaaaggaagatgcgacgactggaaaagcgtcatcgtttctaaaattccgcagctccgcgacccttgcattctcgaagaaaacggcgtttactatgcctacggaacaggatgggtatactacaaaaacacgtcaggctatctcgacggagactggtcgggaccttatgacgcctgcgaagttcccgcggattgtgccggagacaagtgggctcccgaggttcataaatataacggcgcgtactatatgctgactacataccgctctgctaaaacaggacaccgcggatgcaccgtaatgaagtccgacacgcccgaaggacctttcaaggagatttcatccggtcacgttactccgctcgactgggactccattgacggcacgctttacattgacaaggacggtcagccgtggatggttttcgttcacgaatggacctcgaccgacgacaaggtaggaagattcgccgccgcaaagttctcggatgatctcacctccctcgtttccgaaccaattgagctgttccgtgcggatgctccgtcatggtcaacaaacaatgtcaccgacggctgctggatgtacaccacaaaggacggagagcttctcatgctctggtccaactgggacaagtacggatactgcgtaggtatcgcgagaagcaaatccggcgacattgcgggaccgtggactcaggacgaggatatgctctactcaagagtgatgaagaatgtaacaaacgactacgacggcggtcactccatgatatttaaaacgccctcgggtcagatgtatctcgcgcttcactcaccgaattcttcgtcagccggacgtcccgaaactccgatattcgtcccgataaaggaagaaaacggaacgctcgtctgggatatatttgatacaaacaattaaaaccgagaaaggagtaagcctgcgccatacgtttttgttttcacggcgcggggaaatattatgaaatgtccgaggtgtctctcaggcgacagcaaagtaatagactcacgccctgttgaagaaaacaacagcataagaaggcgtcgcgaatgtgagtcatgccatttcagattcacgacttacgagataatcgacacgctgacgcccattgttgtaaaaaaagacggctcgcatgagctattcgacaaaaacaaagttctctcaggcttactgaaggcttgccagaaacgtccgatagacgcagttcccattgcggatgaaatcgaagcggaaattcgcagctccatgaaaaccgagatatcatcgcagaagataggcgaaatggtcatggaaaagctgaaaaagctcgacgcggttgcatatgtgcgttttgcgtcggtccatcgcgaattcaaggatatcgacacgtttgcaaaagagatatcaagcctgcgcgaagaagaagaaaacgcgaagaaataatataataccgtatcgaacagtgctctccgtttgccgatttataaggctttcggcggagagataaatctgtcggtacggtattttaatatattacgcttgaaaacctacaaaatatatgttattatagtatatgttaagtattgaaaacagaaggtatataataaaatgaagatttcaaccaaaggaagatatgcgctgcgtatgctccttgaccttgccgaacaccgcgacgaaggatatattgcgctgaaggacattgccgaaagacagcacatatcgaaaaaatacctcgagcagattgtgccgattctgaaccgctccgatattttaaagaccaatcgcggctaccaaggtggatatatgctcgcgcagactcccgacaagtacaccgtgggaatgatactccgcctgaccgagggaacgctttccgctgtgccttgcgccgaacaagattcggtcgagtgcgaaagatacgccgactgcgccacatatcccgtatggaagggactgtacaaggtcgtgactgaatatcttgacgggataacgctgcaagacatcatagacagccaaaacgaacgcctttcaaacaattacgtaatttgaagatatgataacagcatacaagccgaatttagaagacttatggtttcgcgaaaagctcatgtcggacgaggaaacaatgtcatataacccgggcggcactcttccctttccgcgagaaagatgggcaaagtggtattcaaaatggattgacgcgcctgaaaacgagcgatactaccgctacctgtacgatacagaagcaaaagaatttgtcggcgaaatcgcttaccgctatgacgaggagacgaagacccacatatgcgacgtgattgtgcttgccgaatacagaaaccgcgggtacggtactgcgggaatacggctcatctgcaacgcggcgaaagaaaacggaatatcccacctttacgacgacatagcgagcggcaatccctccgtcaagctgtttttgaagaacggttttgaggtggaatacgagaacgatgaagtcactatggtgaaaaaagctttataaaacaaaaatccgacaggttttaacttagctggaaagcattagctaaagcttgtcggagatttttttattcagccgtatcaatcggtgaacatgggagtggagagatatctgtctcctgtatcgggaagaattgctacgatgagcttacccttgttctcggggcgttttgccagctcggttgccgcgaagactgccgctccggatgaaatgcctgcaagaattccgtcctcacgtgcgagtgctcttcccgttgcgaatgcgtcctcgtttgttacgggaattatttcgtcatagacctttgtgttcagcgtatcgggaacaaatcctgcgccgattccctgaattttgtgaggtcccgcaacaccttttgagagtacgggagatgtagcaggttcgactgcaactaccttaacgttcgggttctgtgatttcagatattcgcctacgcctgtgagagtgccgccagttcctacgcctgctacgaaaatatcaacctttccgtctgtgtcagcccaaatctcaggtcctgttgtcttgcggtgaacttccgggtttgcgggattggtgaactggctcgggatgaagctgttcggtatttcctcggcaagctgttttgcacgctctatagcacccttcattccctttgagccgtctgtcagcacaagctccgcgccgtatgccttaaggagattacgtctctcaacgctcattgtctccggcatggtcagaatgattctgtatcctcttgaagccgaaactgccgcgagtccgattccggtgtttccgctggttggctcgattatgacggtatccttgttcacaagaccctttgcttccgcgtcgtcgagcattgcctttgcgattctgtccttaacgcttcccgcaggattgaacgcctcgacttttacagctatcgtagcttcaagttctctctttgcggaatagttcggcagctttacaagtggtgtttttcctacaaggtcggttattctttcgtaaattttcattgtattttcctccgttaggttaattcctatatcacttacctgtttggtaggtattgtatcacttatgccccgatttgtcaataggtcggacgaaattttcagaaaaattattgtattgacttttcgacggatttcaagtataattataaagcctacatatttgataggtaatatgtataagcaggcatgatatgaataataaaaaaagcgctcttattgcgatgagcggcggtgttgactcttccgtagccgcgtatctcacagtaaaagccggatatgactgcatcggaacgacaatgcggctctacaacaacgaggacagcggagtttgcggattccacacctgctgttccgcccgagacattgaagacgccgccgaggttgcgtttgagcttgacattccctacgaggtgcttgacttcacgttcgacttccgcgagatgataatcgacaaattcgtccgcacatacgaagccggaggaacgccgaatccatgcatcgactgcaacaggttcatgaagttcagcaagctgcttgattttgcccgcgcgaagggtatgaactacgttgtcacgggacactacgcccgagttgaggagaaagacggcagattcatcttaaaaaaagctcttgacgagacgaaggaccaaagctacgtgctctactcaatgacgcaggaggaactcagccatgtgctcttccctctcggcgagatgagaaagacggagacgcggcgcatagcggaggaaaacggttttgtaaattcgcacaagccggacagtcaggacatctgctttgtacctgacgggaattatgtttcgttcatggagcagtataccggcaagcactaccccgagggagattttcttgacgagaacggaaacgtgataggcagacaccgcggcattgtacgctacaccataggacaaaggcgcggactcggcattgctgccggacagcacgtttacgtatacaagaaggatatcgaaaacaacactgtctacgtcggagcggaagaaaagctgtacacaaagtatctcaccgcaggagacgtgaactggatagtgtttgacaagccgaactttacgataagagtatcggctatgacaagataccgccacaaggaacagccggcaacgctttacccgaacgctgacggaacggtatcggtggaatttgacgaaaaacagcgcgccgtaactccgggacaagccgtggtattctacgatggggacacggtagtcggcggcggcacgataattgaagcacattaagatacggaaaggttattatgttaaatcagtattcaaggacacagctcattttcggcgcggaggcaatggaaaagctgcgtaattcccgtgtggcagtattcggtataggcggggtcggtggatatacggttgaagctctcgcaagaagcggagtcggtgagcttgacctaattgacgacgacaaggtatgtctcacaaacataaaccgtcagattatcgccacccgaaaaactgtcggtcagtacaaggtcgacgtcgccgcggaaagagttcacgacattgacccgaatattgtagtaaacacctacaaaacgttctacacacccgagacagccgagcagttcgacttcacgaaatacgactatgtagttgacgctatcgacacggtaacgggaaaaatcgcactcgtgatgaacgcgaagaaggctaaaaccccgataatctgctcgatgggtgcgggaaacaaggtagaccctacggcttttgaagtcacagatattttcaagacctcagtcgaccctctcgcacgtgttatgagaatcgagctaaaaaagcgcggtatacgcaagctcaaggtcgtatattcaaaggaagtcccgctcactcccgttgacgacatggcgacaagctgcaagacgcactgcatatgccctcccggaacggcaagaaaatgcacacagcgcagacaggttcccggcagcaacgcttttgttccgtcagtcgtcggactcatcatagcaggcgaggttataaaagatctcacgggcttcaagggcaagggcatgggagtatgatatacctcgactactccgcaaacacgccgtcatgtgaggaagttctgctgtcgtttcttgaagccgaacggaattttcccggaaacgcgaactccgaccacactcccggcaggcaggctaaggctgaaatggcgcgtatcacctcatctgtttcggatatgctcggcgtcagggcgaacgaagtgatattcacgtccggttcaagcgagtcaaacaacacggcaatattcggcacaaccgcgcacaagaataaaggtcacattatcaccacaaagcttgagcacgcgtcagtctcagagccgatacgtatacttgaagccggaggatttgacgtagactacgccgatatcatgccggacggaaaggtttctcccgacagcatagaaaagctcatccgcggcgacactgttctcgtttcggtgacagctgtagacagcgagcttggcacggtacagccgattcgtgaaataagcgaggtcgtgaaatcccataacggatgcgtattccacgttgacgcaacacaagctgtgggaaagataccgttttcgctcgacggagtggacgtctcatgatgctcaccgcacaagttctacggaatctgcggagtcggcataatgataaagaaaagccacattcgcttggaaccgctgatacacggaggaagcagtaccacactctacagaagcggaacaccagcgctatcccttgccgcgtcagccgaaaaagctctggaaacggcgaatgttcatctcactgagcgatacgaaacggtgaagagacacaacgacgagctgagagaattcttcaaagcatacgacaaagttaaaataaacagtccctccgacgcgataccgcacattttaaacctcagcgtggacggagttaaaggaactgtcttccgccgcgagcttgacaaatacggtgtgtgcgtctcggtgaagtcagcctgttcatccgacggaatgccctccgacgcggttcttgcgatatgcggagacagacggcgcgcactttcctcatggagaataagcctcagccacctcacgacaacggacgagatagagcagttcaaggagatattcgaccgctgttacaaaaccctcataaaataaaacggagataccgcgtttttttgcagtaaactccgttttttgttatatgagaagcattctgtcgttgtcgagattctttccagaaacttctttgaatttattgagtaagtcctgaaccacgagctttttgcgctcttcaccggacgtgtcaaacacaatttttccggcgttcatcataatggtgcggttaccgagctccagtgcggactccatgttgtgcgttatcatcatgcaggtgatatggttatcttcgacgatgtttttcgttatctcaaggactttttcagccgttgacgggtcgagagccgcggtatgttcgtcaagcaaaagcagctccggcggattcagcgtagccatcatgagagtgagcgcctgtctttgtcctcccgagagaagtccgacctgctgttccattctgtcttcaagtcccattccgagcatcgctaccctttcacggaaaagctttttatctgtggatttaagccagctgagccaacctccgtgtcccgcagcaagcgcaaggttttcttcaaccgtcattccgggagctgttccgcgcatggggtcttgaaatagccgtcctatgacacgtgaacgcttatgctccggcgtcagagttatatcttgtccggcaaggaatatgcttccgctgtccgtgatgaagcttccggctatggcattgaacaaagttgactttcccgcgccgtttgcaccgattatcgtaacaaaatctccgtgctcagcgtggaatgagagtgaatcaagagcctttttcgcgtcggttgtgccgggattgaaggttttggtgatattttttatgtcaagcatccctctcgtcctcctttcgcgagtgaacaaagcggcgtttgaacagcggcatctgctctttgagatacggtatcgagatggctgctattacgacgagagacgaaaccagtttcagcatgaacgcgggcatatcgaatctgagggctatagtataaacaagtctgaaaacgaacgcgccgagaaccattccgacaattctgagcggcattttcttctttccgaggaacacgtttccgatgagcagtgacgcgagagctaccgttaccatgcccgtacctgtgtcgatgttgaccgacttctgcatctgtgcaaggagacagccggagagcgcggtaaacgagttagctatgcaaagcccgattatagttgtaattacggggtttatcgaggaagagcgcaccatatcggggttgtttcccgtcgcgcggatggcaagtcccactcttgttttaaggaagaatccgagcagaattgccactattataacggcagacagggcaatgatgagcttatagtgtcccttgagcggagtttcttgcgtcagctcgcgtaccttagaaaaaaccgtgtcgactttattcatgttgagtatggatgagccgcccattaccgcgatgtttacggaataaagtcccgtgttcacaataattccggcgaggagcgagtttatgcccatctttgtttgcaggaacgccgtgacaaatccggaagcaactcccgcaagcatggctgccgcaattgaaaggtacggatgacccgcgatagctactgccgctccgactgttgctccgagtgtgaagcatccgtcagtggagaggtcgcagacgttcagcatggagtagctgagaaacaatgcgaggacagtaagtgcgctcacaagtccaagctcaagcgcggtttccagaagagttaatactgtagtcatttcaaattccttcagccgatgtcgtcaaagctctcggcggttactatggattgtacctttgtgcagtaaggtgcgatttttgcggaaatatcgtcgtagtcatatccgagctcagcgcaaatttcggtgtttattgtagccgtgccgttgtcaaaggtaagaacgggagtagtagcgggatctttgccgtcaacgaggatatccgctatcatgtcagccgtgcaaactccgaggttagcatagtcgacgccgtatcccatgaaagcgccgttgagagcgaatgagtccgcgcctgtgtaatgacctacgcctgcttttgcgaatgtttcatatatcgaaagctcggatttcatgatggtgttgtcggtgggggtgaacactgccttaactccgtcgcttacgagagactgtgccgcgagagatacttcgtcaaccgtagtacctgtgcgctcgatgacttcgacattctttgacgcgaggtattcctttgccgccgctatgggagttgccgccgagtcctgacctacgtcatagagaagtccgaccttgtctatatccggctgaactgcgaaaatgaggttcatgaccgcggtagtgtcgagatagtctgacgttccggtgatgttgctgccgggcttttcaagggattctacaattccgactgaaacggggtctgacactgcggcgaaaactacgggaatctggttatcctccgtagcggactgcattgccatagcgaccggagtagcaacaccaaccataaggtcaacgtcatccgcgatgaagtttgctataatctggttcatgaggttggcgtcggcgttgcagttgtcgtaggatattttgaattcgatgttcttctcttccccgatttcgccgagtctgtttttgatattgtctactatctggttaagggacgcgtcgtcaacgtaattgcatatgccgaccttgtatgtattttcgtcatttgcatcggatgtggagcaggaagcgagtgttccgagagctactataagagcgagagctgctgtgataagttttttcattttgatttatcctttcgatttttgaagtaattttaagttgtttttcatagctaattcgtaaatcaaactgcggcgcacctgcgccaatatttagtcagcaattgcatagctttttctcccaataaaaaactcctgcctcagcggtcttttaaaactgctgggacaggagataaattcctgtggtgccacccggcttgatgtgaataaacacatcctctcaatgcgtacatcgtcaatacgccgacttttcttcacggagagccttactccgtctcacatactccgctttagcacgtttccgttcgccctcagaagcccattcaacattagcttattctgccgcaatcacaccgcctgcgactctctgaaagaacagttttaaggtttacttactcttcctcatcggtttaatttattatatcacagcgtgggcaggatgtcaattgtctgttttagacaaattcatcatattttcgcgagtgtttttgcatcaaagtaaagaaacagacacctctcacaaaagaaatgcctgcttcctgtttatattgagttacgactttttgcgtgttactgcgaatcctgcgagggaaacgattgcagcagcggacgcgataacggtaacgtcaaaggtctgcggagctgtcgtttcggtcacggtttcttcagccggttcttcagcagcaggagcagcttctgtttcagctacagtttccgcagctgtctcaggttctgtttcggctacagtttcagcttcggtttcagctacagtttcagcttctgtctctgctgtttcacctgcaccgccgagagtgattactccccaaacatcggcattgttcgcagcggagtcgtcttcatcggaccagccaaggcagtacggacgggtgagaaaatcatctgcgtcgttgtactggaaatcaccgagaaacgtaaagccttcaacaagctcttcgggttcaatgtccgcgggaacaaacttgaattcgaggatgcagtggttttcttcgggaaagctccatgcaacctgatattcgctcggagccgtacccttgcgcggaacaagcgtcagatcttcagccggaataatggcgttctgtgactgaccctccagccatgtttcgccgcctgtgctgagttcatcaatatagaggtaaacagagtcgttcttccagtcgccggcttccgagttaaatgcgaaatcatcgtcgtgaatgtcgaacaggaaatagaatgcgctttcatcccaaagcatggatgcgtataccgaaagtccttcaggcatagtaccgtcgcccttcaaatctcctgccttgacgtgtgtgagctgcaccttttcggcgtttgcccaaacatcgtctactgttccgtcaataacgggcgttcccttttgagcggtataagtttcgcccacagctgaaacggatagcgcaagagtggctgtacaagtcagtgcaagcagtgcggataaaaattttttcattgttctactcctttatgtatatctttatttttgaagtcagttttcttcaatttccataaacgccttattcatcttctcgataatcttgtccgtagacttctgatactttgaggcagtcgaaacaaggcttgtcttatcgttgttcatgaacagcttagagaagaatccgtcgcgtatcgtgccctggaaatatgtatctccgaaatcaacgacgcggtttgcaaggattatgtcaatcatacgtgcggagtcgggatcgcgagcatattttgacttaaggcagatgtcgtagtacgcgggtattacaacattatgcgattcgcatgaaagagcctcgaggatgatggacgagcaatccttatcgggtactgtcacggggattattgatgtatcaaagaacgacacacgggtaatgtattccccttgtgcttcatcatatttcgggaaaggaactataccaaagtcgctttccatgtcacggagagattcaaccaggaagaacattgtcgtcaggaaaagtcccttgttttcgcggaacatttgatgatatatcggagcttcgtttgcgtcctcgttagttctgtaccatgcgccgctgtcgttgcagatggagaatatcttttcaaacacgctgatgaacttctcgtttgttgccatgtcgtatacgggatagttattctcatccttagaaacgtacataactccggcggcctgtacgagagaacactgcatatatttcgcagctccgagcataccgtactggtcatcggcatcaaacgcaccgtcaccgttaaggtctaccgtagctattgatccaagctcgccgtatttgtcaaacgtccattttccctcatccacaagagtgtagagcgatgtatcgagcgagagattattcagaatatctttattgaaaagcagaatatttgtaaagtcgatagctacaaggttggcatctcctatcgcaaagtagttgacgtctcctacgttgatgtctcttgtgatggactcgtcccagtacggctttgtgaggtcgatatattcaagagaggacagcgggaatgcatagcccttctgagcaatgttattcgcggcggtacagcggacgttcatcagcgagtatgtattgtctccggcggttatgaatgtgtacggctttccttcgtcggagtacatttcttcggagaacttcaccttgaagcggtcctccacggagaggtttctctgatacatcgcgtcgttcagctcttctccgttaatttcctcaacgagaaaaggggaatgcgtagtgatttcgcgtgtgtaaataacaaaatccatgccaccgaaatccttctcgggaagattatcagtgactttttcttcggcagcttcgacagtctcggattcgtccgtatt

SEQ ID NO: 4284 - DNA, 9641 bp, Unknown
  16S sequences of unknown bacteria
gaaatgtcctctcgcaggaacagtttgcgcaggacggcggcgaagtacttaccgtttctcctttgaaaaaatcaaacatttctatgcgtaactttcacgcttgtaattatatctcttattgttacatcctctatcggatagtcaagagtctcctcggcggttttataagacttttcattttcctcaccgccgagtgcagacacatagaatccgtctttcaaataaaacacaccgtattctcttccgttatatttaaaagtaatttctcttcctcttgtcaacgtatccaaatattctgctattgttgcgaaatcatagtctgtacgctcgtgatgataattctcggatttcatatatgctttttctcctttgcaaaatttaaacgtttctcagagtgacctccacgcttgtaattatatctcttatggttacatcctctatcggatagtcaagagtctcctcggcggttttataaattttttcgttttccacaacaccgagtgtagacacatagaatccgtctttcaaataaaatacaccgtattctctcccattatattcaaaagcaacctctcttcctcttgtcaacgcatccaaatactcggctatggtttcaaaatcatcttccgtacgctcgtaatgataatgctcgtttttcatatacgccttttctcctttgtaatcgaattcggggacatctccgtcccaatagtttatttgccgaacaaaattaggtataccctctatgggctcgtgccaatcaataatatgatcatgcggattactgtgatatttaggtttaccatgatctgtgcaatgcctctcataaaccgctctcccatcatctcctatctttgttataaattttgctccgttctccatatatgtggtttttatctcacccgggattcccaaaagacggttgtcatcttcctttttcggaatccattgcccgccttcggcgtcacccatacccttttcgtaaacaaaaggcaaaacaaaaccgctttttataatcacattgccgttttcgggcaaaggcttttgtccgcaaatatattcggcgtattgcgaaagttcaaaatccttttgttggtatttccaagacgactgctcataattcacatagataatattccctttcatctcgtcaaacggctcgtaataacaaattatcctttcgggctcgattcttttcagcatttcattatagcccttcataaagaagtctttttgatcggcatgatttccgtgctcggacacctgaaaggtggaaaccgccacagtgccgcctttcggaactccctcaaaacaaaaatcaaaagtgttctcattgccccaattcatactgggtataactcttaatccttttgaggcaaaatatgctccgcagtaacgatttctgaatgtattgtaaagctgcataaccgggttcatttgaatatacatactgaaatccggagaaaacaccgctttataatttttcagcctctctatgcatccttcgggatctttccatactctttcaaatttgtaatcatacaaaaagaagtgcaccattcggtcgaggtctttctgcttgtttgttctgtcaaacccaattaacaatagattttcaaaatcctcatccgatagttcggccttgggaatttcgggaattttaaatttaccctttgcttttgcatcaaactcgtttttgagcaaccccattctgtatttacagttttccgtcgtcatattttttctcctttatagaattaaagtttaaaagcctttcatataagggagctaaaacagtatacggttgcatatttgcgtgcaacaaaacgaatttttcttttttattatttcacaaaaaacaaattctgtcaatacccggcaaataaaaaaagcgacctgcatttgcagatcgctttgtggtgacccattggcgattcgaacgccagacaccttgattaaaagtcaagtgctctaccggctgagctaatgggtcatagggctgtaatttgacagctcgtatattataacaactcggcgggcgcttgtcaacatcttttttcggattttttctttttttatccccgcaaaaagcaaaacctatttctttttgcgcttaaaaaggccgaacaatccgtttttttcctccgaagaaggctgctccggctccgattcttctttgtcggaaaaatcccgttcaccgtcactttcttcgtccgaagcttcgtcaccgacggagtctccctgctcgtcctcgataaccagcctcagtccctcggaaaagcaccccgccggcacaaaaatgtcgtaaagctcctctccctcaagcgcctcgtcgcaaagggcggaaaactctgcggcatagtcctcgtcctgttcctcaccgtcaagagcctcaagctcctcggggtcaaaatcgttgtcgcattcctcggtggaggtgtggacctcggcctcctttttcatggagggaattttattttgctcaagcatttcggtaatgcggtcggcctcgccgctgccgataacggttataagcagtttgggctcgccgtcgaaaagaggggcggcctccgccgtcttgacttcggttttctgctcctccggctcgtcgggagaaagatttgacatgaaaagcacgtcctcgcggtcatcctccacgataggggtataatcaataagcttttcgccgcatttttcgcaggtttcggcgtcggtatcataatatttattacatttttggcaccacatagcgctacctccaaataaaattcgttttgttccttgtataatatatcatttatcttgcccttattcaacaacttataaaaattatttacatagttatactgagggtatattttattcttatttttttgcattttatttgttcgatttaacacaaaattcatctttgctttacttattattttatttgacaaattatattgcggggagtataattttatcaacatgaacagagtattcgctctgtcaaggaggaaaaagattatgaagaaaagcttaaaagttcttgcgcttgttctgtcggtcgcaatggttgcttgttgcttcgcttcctgcggagacagcaaaaagggcagcagcgacaccattaaaatcggcggtatcggacctataaccggcggcgccgcagtttacggacaggccgttaaaaacgctgcagagatggctgttgaggaaatcaacgaggccggcggcatcaacggcaccaagatcgaattcaacttccaggacgatgagcacgaccccgaaaagtcggtcaacgcctacaacaaccttaaggactggggtatgcaggctcttatgggaaccgtaaccaccgctccctgccttgccgttgttgaaaagacccacgacgacaatatgttccagattactccttccgcttcggccaccggagttatcaaatacgacaacgcattccagatgtgctttaccgatcctaaccagggtacaaaatccgccgactatattgcggacaacaaccttgctcagaagatcgccatcatctacaacagctccgacgcctattcttcgggcatttacaacaactttgttaaagaggctcaggcaaagggtcttgaggtcgtttcggccgaagccttcaccgacgactccaaaaccgacttctcggttcagctcaacaaatccaagtcctcgggcgcagatctcgtgttccttcccatctatgcacaggaagcttcccagatccttgagcaggccaacaccatgggctatcagaccaccttcttcggatgcgacggtcttgacggaattcttgccatcgaaggcttcaacacctctcttgccgagggcgttatcctgctgacccccttcgttgccggcgacaccaagagccaggccaacgtgaacttcaccaacaagttcaaggagaaatacaaggacacccccaaccagttcgctgccgacgcttatgacgccatctacattcttgccgagtgcatgaagaacggcaatgtcaccgccgacatgagcgtttccgacgtttgcgaaatccttaaagccgaaatcgttaaggttacctatgacggactcaccggcgacggaatcacctttgccgccgacggttcggttaacaagtctcctaacgccatgaagattcagaacggcgactacattcctatgtaatgtagtctttaaacttaaacccgtccgattactcggacgggtttttctgtatgaacaaagcagacccgaccttgcaaaaggtcgggtctgttttgttaaatattatttataagggcctttggcaatgccttatgccttgtgccattttattccctgcggggtgtcctcaagaattatgcccatttccttaagcttgtcgcggattgcgtcggccgtggcaaaatcctttgcctttctcgcggcggtgcgctgctcgataaggctttccacctgcgcgtcaaggtcgtccccgccctttttctcataaacaagaccgagcacgtcggcaagctcgaaaaagcgttcctttgcgattttgcaaagctcggcagaggggtcgtttctcaaggcggtgtttatgtcgcgcacaagctcgaaaagcgccgaaagaccgtccgcggtgttaaggtcgtcgtccatggcctttataaattgctctctgcggccgtcaaaggtctttataacctcggcctcgccctcccgaagattggcgcaggaggcgtttttctcggcaaactccatgctgtcgcggcaggaataaaggcgctcaagcgatctgacattggcctcgataatatcgacgctgtaatttatggggcttctgtaatgggaggaaatcatcaaataacgaatgggctcatagccgtattttgcggccacgtcacgcaccgtgaagaaatttccgagggatttcgacatcttgcggttgtcgacgtttatataaccgttgtgcatccagtagtgggaaaattcacagccgttggcgcattccgactgggcaatttcattttcgtgatgagggaagataaggtcctgaccgccgcaatgaatgtcaatggtcttgccgagatattttcccgacatggccgagcactcgatgtgccagccgggacggcccttaccccaaggcgactcccaaaagggttctccctcttttgcggccttccaaagggtgaaatccatggggctttccttttgctcggccgaagcgccgcgctcgcttgccccctccttaagctcgtcgaggggctggtgggaaagctttccgtaacccgcaaatttctcggcgcggaaatacacgtcgccccccgaaggataggcatagcccttttccacaagggcggaaattatgtgaattatctcgtcgatattttcggtggctctcggatgaacggtggcctttctgacattaagaccctctgcgtcgatccagaattcctttatataccgctcggcaacctccttgacggttatgccctcctcgtttgccttttttatgagcttatcgtcgatgtcggtaaagttctgaacaaaattgacctcatagcctctccactcaagataacgcctcagcacgtcgaaaacgcaaaggggacgggcgtttccgatgtggatatagttgtaaaccgtggggccgcaggcataaatcttggcctctccctcggttatggggacaaactcctgtttttcccttgtcagagtgttgaaaattttcataaattccttcctctctataatttcataagcagagcctcaagctcggacatatttttcacgatatggtcggcacctttttcaagctcgcctttttcggcaaacccaaagctgactccgacggtttttattccgcatttcttcccggcgtcaatgtcgaaaatgcggtcgcccaccatgaccgagctctctttgcaggcattataatcggtcataagcgcgttaagggtttcggctttggtcttgtgcagctccgacattccgataccgtaaacgtcggtaaaataaccgtcaagcccgaaatgctcgagtattttttttgaaaagaccgtgggctttccggtggcgataaagagtcgctttccggcgtctttaaggctgcttagcatatgctcggtgccgggatagacctcgttttcgaaaatgcccgtcggggcaaaatattcgcggtatttttccaccgcccgctcggcctgcttctccgaaaagccgtaatacttcataaaggtttccccaaggggaggaccgataaaaaaggtcagctcgcggttgtccttaacgtcgatgccgaagcttttgagagcatattgaaccgactttgtaatgccggtcatgggatttgtcagcgtgccgtcaagatcgaaaaaaacgtcggtaatcatttttcttcctccgaagagctcagcttttcaagctttttttccatatgatagagctttgactcgagcatacagattttctgcgccaccgggtcgggaatgtgaacctgatcgaggctctcgcagattttgaccccgccctggcgcacgactctcgcagggactccgacggcggtgctgtcgggggggatttcgttcaaaaccaccgcacccgcggcgatgcgggaattgtcccccaccttgaagggaccgagcaccttggcgcccgagccgatgagcacgccgtttccgatggttgggtggcgtttgccggtgtcgtggccggttccgccgagggtaacgccctgatatatggtcacgtcgtcgccgatcacggccgtttcgccgataacaacaccggttccgtggtcgatgaaaagacgttttccgatggtggcggcaggatgtatttctataccggttttgcgaaccgccttttgggaaatgtatcgggcgataaacttatgcccgtggcggtagaagaagttggctcttctgtgcatacggacggcgcgcagccccggatagagaaaaaatatttccaaagaggaacgtgccgccgggtctctcgccttgacggcatttatatcttctttcagtctgtcaaacataaattcaccttttttatttattggggtcgacaaaggccttgttctttacaaggtaattgactcccgaaaaaacggtcagcacggccgacgtccacagcacaatgttatagaaaatcctcagaatgtcggaaacgagcacaggccacggaatgacggcgataaagccctcaaaggcaagcgccattattatgccgaccatttgcataacggtctttattttgccccatttgtcggcggcgaccacctttcccgaggcggcggcgatcatgcgtatggaactgaccgaaaactctctcatgagaattataagggttatccaaacggtgccgaagcctattccgagactcataaagccgagaaatgcggcggtggtcagcatcttatccgcaatggggtcgagaaattttccgaaatcggttataagccctctcgaacgggcgatttttccgtcaaaaaggtcggtcagcgaggccgcgacaaaaaccgcaagagcggcaaaataatgaaacggaaaattcagcaaaagcagcagcagaaaaatcggaaccgctgcgattcttccgagggtcaggcgatttggaagattgattttaccttggctcaagcttcttcctcccctaaaagatccatgtcaagcacgtctgtcacccgaaccttcacaaaatccccgggggacggcttgttctttgatttgaagaaaattttacagtcgatgtcgggagcgtcggcgggggttcggccgtagaaatgctttatgtaggtgtcatagccctcgacaaggacctccacgctctgccccaccttttgctcggacagctcgtcggaaatgacggcttgtctgtccatgattatttcggctcttttgttcttttcctgctcggaaagctggttgtcaaactcggctgcgggagtcccctcctcggccgaataggcaaagcagccgagccgttcgaaccgcatttttttgacaaaatccgaaagagcgcagaactgctcctcggtctcgccggggaaacctgcgataagggtggttcttacggttatgccggggatttttttcctgagcttttcaatcgtcttttcaagactttctctgtcgcccggtcggttcatgcgggaaagcacctcgccgcagcaatgctgaatgggcaggtcgatgtatttgactatcttcggctctctcgccatgacgtcgattatgtcgtcggtcagtcggtcgggataggcataaagcagccgtatccaatgtatgccgtcgattttacaaagttcggtcagcagctgagaaagcctgcattcgccgtaaatgtcctcgccgtagcgggtggtgtcctgagccaccacgataagctccttaacacccttttgagcaagcgtttttgcctcctcgaccaccgactcgacggttcggctgcgaagccgcccgcgaatggagggaatggcgcaataggtacatcggttgttacacccttcggctattttaatataagcaaaataaggctcgcttatgagcacccttccgccgcaaaggggaagattttccttttctccgaagcaatcgtccttttgcccgccgagagatttttcgattatgtcggcgatttcgtcgtttcgcccaatgcttacaacggtgtcgatttcgggaatttgttccttaagctgttccctgtaccgctcggcaagacagcccgtaacgatcaggcatttgagctttccggtctttttaagctcggcaagctcgagaacggtgtcaatgctctcctgtttggccgattcgataaatccgcaggtgttgacaattatgacctgcgcctcctgctcatagggggttatttcatagcccttgtccttgagctttgaaagaatcatttcggcgtcaacctgatttttcgggcatcccagcgatgccattccgatctttatcatttttttacctcttaaacttattccccgtttttaacccgctcgacggcagccttaatatcttggtagccgtatcccatgcgggcaagagcggcgtaaacacgctgaatttttttatcgtcctcggggagcggactgtattttttgtttataacggccgcaattgcctcgaccgggtcgctgtcctcatactcgcaaagcacctcgtcgataatgtccctgtcgacgccctttttttgaagctcgaaggccacgcggcgctttccgaatccctttcggttaaaaagctcgtcggcaaaatcccttgcgaatgcctcgtcgtcgcaaagaccgagccgctcaatacggcaaagagcgtgttcgcagacctcggcgggaaaagccgtgcgcagctttgtgaaaagctcgcttttggtgtgagcacggtattcgagaagatagagcgccttttcataggctctgttttgctcggcggtctctttaaggctctgccactcctcttccgacacctcgctgccctcccgaagcccggaaagcagcagcgtttcggtgtccaccgtttcgcagacatcaccgaaataaacggcggtgaggcggtggcggcgtttgcttaaagcggttattttcatcagtcgaccgtcacgtcaatgtcaaccttaggggcgggcttttcggccttttcctccggctcggcctttacggcggg

SEQ ID NO: 4285 - DNA, 14864 bp, Unknown
  16S sequences of unknown bacteria
cccgccccggctcccgcatcgccagcacccgcagatacggcggttccatcgccatggcgtccgcatccaggcccagatacgcgcacatgcacatccgggcaatgcggctgcgggcgtagcgcttggatttgacggcgtccagcaaggcatcgacactgcccgcccggcggctctcccggtacagcttccgccacagtccctcggaaccgtagggcagcgcggcaaattccgcctccggcatccgccgcagcaccgccagcatcgcccgctcgccgttatcccgccggtactgcgccgggtgccgggcatagacggccagcgccgccgccgggacatacgccgcccaagcctccggccgcgcaagctcccgcagcgacgtcgccgacgggttctccccctccggcagcacggcgtgatacgccccctgccgcaagaacacggcaggctctatttggctgcccagcgcctgcagcgccttgcagtactccaccgccagaatatcattcggctgccgcaccacttccggcgcagcgcccagctgcgccagcgcccggctgcgggcagcggcaaaggagatgccccccgccaactcccgacgcagcgcctcagaaaacgccggggtccgcaggcaggccgccgtctgccacagggcgtcccggtccgccgtctccgcgccgaagcacagttcgtcaacgacgcccagcgcatccagcagccggacgccgcccgcggcaaacccctccgcggaggagagcgccgccgtcaccggcagctccaggacgaggtccgccccgcaggccaccgccgcctcggcccgcaccgcctttggcaaaagcgccggctcgccccgctggacgaaattgccgctcatcaggcagacgatgaccgtgtcgccccccagccgctcccggatgaggcgaaattgcttggcgtgcccattgtgaaacgggttatattcactgatgatggcagctattttcataaaaacccccaaaaatccgccaggaagccgcggaagaaagcacagaatttccaataaatgcaaagtcgattcttgacttgccgggttagatgcattatactagaagctggtcaaacgcttgaaaagcctttgattgtgcctccgtcgcagcaggtcctgcccaagacggcggcgcgggattttcgatgaaatcctttcatccaaaagcaggcgcacaacgattttatcaggattatagcacataccgatcaaaaaggaaacatctttaggagggcttaccatgaaactgaaaaattctgttcaagtcaatgcttttgttgaagccgtaagtcgctgcaagggcaatgtattcctgcgttctctgcagggcgacatcttcaacatgaaatcctctctgagccagtatatcgccatgggcgctctgctgggagagcatggcgacgagctcgaactgttctgcgagaaaaaagaggacgagccgatcatgctggagtttgagcacaagctgtaccacgatgaaatctaacattctgccttatcttaacacaaaataggagttgacaagtaaccatgaacatcctcgtaatcaacgccggttcctcttccctgaaatatcagctgatggatccgaaaagcggcagcgtaatggcaaagggcctgtgcgagcgcatcaatctggacggccgcctgacccacaaggtcccggcccgcgacctcaaggtcacccgggagatccccatgccgacccataaggaggccattgaagccgtcatgcagatcctggtggacccggaaaacggcgtgatttcctccgtcgacgagatcgacgcagtcggccaccgcgtgctgcacggcggcgataaattcgttgcctcctgcgttgtagacgaggcttgcaagcaggccatccgggattgcttccccctgggcccgctgcacaacccggcaaacctcatgggcatcgaagcctgtgaaaaggccatgcccggcacgccccaggtcgccgtcttcgatacggcgttccatatgacgatgccccccaaggcctaccgctacgccatcccgacggaatactacgagaatgacgccatccgccgctacggcttccacggcacgtcccaccgctttgtcgcccgccgggccgctgcgctgctgggccggaaggacttcaagatggtcaactgccacctgggcaacggctcctccctggccgccattcgcaacggcgaatgtcaggacacgtccatgggcctctccccgctggccggcgtccccatgggtacccgctgcggcgatattgatgcctgcgtcgtccagtttatctgcaataagtacggcatgaacgtcgacgaatgcctgacgatgctgaacaagaagtccggcgtgctggccatgtccgagctctcctccgacttccgcgatctggaaagcggtgccgccgagggcaacgaaaagtgcaagctcgccctggagaagtttgactacgaggtcgccaaatatgtcggcgcctatgccgccgccatgaacgggctggatgttctgacctttaccgccggcgtcggcgaaaacgggccggatacgcgtgccagcgtctgctcctatctggaattcctcggcgtcaagctcgacccggaaatcaacagcaagatccacggcaaggagcagaagatttctacgccggattccaaggtcgaagtctgggtcatcccgacgaacgaggagctgatgatcgcgcaggatacggcggagctctgcaaaaaataagccgccccgaaacatcgcgtccccgcctcttctaagccatgcaggcgtctgcctgcatggctttttccaacctgcaggcgtattttgtcccttgaaacagaacgaaagataaattagataaaaaacaaggagagtgtatatggcaagaggaagattccaaaaaaagcgcagccccctggggccgatcctgattatcctggtgctggctgcgatcgcggcagccgtcctatacttcaccggcgtcctggggcaccggcatcactgcagcgccccggcggactgtaccgtcgcccgctactgcgatgaatgcggcaagctgatggaagccgcccaccaggatcacaccgcgggccccgcagccacctgcgagacgccccaaacctgcaccgtctgcggcaaggagctggccccggccaccggccacacccccggcccggaagccacctgcgccgcgccccagacctgcaccgtctgtggcaaggagctggccccggcgacggagcacgtggctgacgaatctgtcaactgcgcgctgcccactgtctgcaaattctgcggcaaggagatgggcgaggccaccggccatgactttgtcaaatccgacgatggcatgaccgagacctgcagcaaatgcggccaggtcatccaccgcagcaaatcgacggtcgaccaggagatcctgccggagacccaagccagcggccatttccacaatgacatcgacgccttcgagaaaaacaacatcctcgtctgcggcgactacgccgtcgaatacttcaagctcgacgagaccggctcggactcttacgccaaaatggtcagcgattttgcggccaagtatccggacgtccacgtcaccagcctgctcatccccaaggcctgcgccttctatcccccgctgggctatgacgatgtgctggaaaaccaagccgccttcatccaggcgacgtacgacagcatgggcgacggcgtcacaaaggccgactgcatcggcgttctgaaggagcacatcggcgaatacacctattaccggacggaccaccactggacctccctgggcgcatattacgccagccaggcctactgcgccgccaacggcatcacggcccgcaccctgggctcctacaagacgatcgtcaactgcggctacatcggctccctgtactccttcgcaggcgaaccggcgcagctgaagcagaacccggattacaccgtcgcccacctgccggagacgggctacaccatgacctgcaccaccggcggcagcaccttcgaagccaaggccatcaacgaagaggccagcggctacgccgaggcctttatgagcggcgaccaggccttcacggatattaagacggagaacaagaacggcaagaagctgctgatcttcaaggagtcctacggcaacgccttcgcgccgtatatgatcgactattacgaagagatcatcgtcatcgacatccgccaggagacggcgtccatcgccagcatcattgacgaatacggcatcaccgacgccctgatcatcaacaacgtccaaggcgccctgagcctgcgggagaacctccagagcaagctcacctcctgagggcgtgtagggccccgcaaagcgcaaaacgccagccaggttcttccctggttggcgtttttgacgcacgcgccgcgcacagcgcctgaaacgcggtgcgccagcgcctttaaagcgcaagaccccaaggcagcgatgctgccttggggcaatttactttttctgccgtcacccggcacgcgctgcgttctgtccgcgcttttagttctccgcgtcgcggcgctttctgcgggcaaagagcaggaacgcgccgaggatgaggagcaggaggccgaggccgccgcagaggaggatcggggcgatgggctggccggtctggatcagcgtcgccgtgttcgcgatcgtgacggtcccgttcgcggcctggtaggacggggtgtagccccgggggatgttcgtctccaggacctgccagttgccgtcggcggcaagcttttgccaggtgtagcgccagttatttgccgcgctgagctggacggtctggtacgccgtcttgccgttgtagagcgtcacagagacggacgatggccggctggcgggcttatcattgctccagcgcttttccactgtgatggtcacaggcgtccccggggtcggggtgggcggcgtgtccttcgtgttggtgatggtggtgacattgccctccgtcgcgtagctgacggtgtaccccgccgggacggacgcctcttcgacggtccaggtgtggccctcgaccaggcggtcgaaggtataggcccagccgttggcggcgctgagctcctgcgtctcggcaatcttgccatcgcgcagcaggttcacggtgatggtgtcaccggtgtgattggcgttgccgtcggaccagagcttgcgggccgtcagctggctctcctggaaggcctccagatggaagacccagtcgacctcgccgatgcggtttgcatacgtgttatccagctctgccgggacggtgagctcgacccggagcttggccgtctcgccggagcggaacgtgcccagcaggcggttttcctgcaggccgccggcttcctccggagcggcgtcaaagatgagcgtctccccgttccagaccttcatagagagcttggagaggaattcccgggccgtcgcgacggtctccgacgcggcgacggactcgctcagggggtttgccgcctcgtcgtgggggacggcgcgcagatagaggttgacaaagtcgctgtccgtggcggcgttgtggaaggtgatctcctccgtcaaaacgtcgccgggcatgacgtttttgaaattctgaaacaggtccgtcgcggtgtaatcgctgcccggctggaagtcaaagccagtgtccgcgccttcataggtgatcgtcgaagccgccgccaaaaccggagccgccagacacgccaccgccagcaggatcagcaaaaggggacgcagcgtttgaaacgtctttttcatccttctacctccctcagcccgccgggtacgacgtcacgccggtttctgtgatcgtaacgccccaggcttcgccaaccgccttggccggaacagactggatggcggacgctatgatctccacagaaaggtaatacccagttggaaccttcgccccgtccagctgcttgcagctttcaatcaggttgtcggtgctatcgccgggtgcgacgggcgtcagatagtaccagtacccgtccgtgccttgtgcccagccggtgtctttggaatagttgatcgtataatcaacccccgcctggggaacctttgccgttacagtttggtccgcagtgttttgatccttcctccaggtgatattgaccgtcgcccgaagataggcgtcaatattccctgtgtttgtcactgcgacattgctttttgtcgtgccgttaaagttctccgtcacctgacttgaaacctttgacggggtaaatgtattcttcttttccgccgtcctcgttgcaaggtatgcaaccgtgctgccaatcgcgattccgaggagcagcagcagggaaacgagcagtgtaaccggctttctctgccggtgcgcacgtacacgctttggcgtatgggcttcgaatttcccctgatatctgccctgattatgatgcttcattgtgccgttccccccttcttacgggtttgccccgaaaaggttgacgtgaaagctgtccccatcgagccagttgtttttcgcgcgctgatttgcaaacggcagcgtcttaccgtccacatcaagcgtgatttcctttttagcaggcgcataccgccacgaccagccggtcatttctgtcacactgtatttgccgaccggaaggtccttaatcgtcgttttcccgttgccgtggacggtgacggtcaagttgatttctttcgtcgtgtcctcgatcccctggatgtggaacaggaaggtctgattctcgtcgatggcctcccagccgctcttttggatggtaagcgttgtccgggtcggttcataaataaaggtgatcttgttctgctccggatccgaagaaaggtccagcgtaatcgaatactgcgtcggtgcatagccggggatcgatacgtattgctctgtcacagtggaagacgctgtcgtctttgtttcggggtcgatcaaattgttgccaattgcgtcctgataatacaccgtatactgcccagaggtcgcctcggtgtaatagaagatgatttcctgcttgtcctgccgtatgatttcgcttgtactggtcttttccggatagtacttcccctgttcttcggcaggcagcagattcagctccgtacccatcttcgctttttctgtaaccgtctgcccaatcatgacggaattggtccggtcgtctgcaatgcgctccgtcgttccctttttgtaatagtgaaccagataggtcaccgaggttggcatggcgtattggggatagagcttatagtcccttgtgatcggcatggtaaaggagaagggcttttctgtctctccctcttgatagaaccagccgataaacacatacgggggatcactgggattcttcggcgcagtcgcaagggtatatttctcgatgttcttctgctccccggtatagccctcatacgtgtacggcgtctgcatcgaatcatccgtataggtcgagacggtgtacagcccgttgacccacttggcgtagagggccttattggcattcggcatggtatgcgctgcaacatcatacggttcacccgtacactccgggttttggtaccagccgacgaaaaacgcatcctgctcaagcgtattcggcttttgggtcggcacataatcataccgagcaagaggggcctcgtattttacgctttctttcttatctgcaacgtttttggaggctgaatagaattcgaggttataggtgtttctatcataatagaatgctgcatttttacaggagtccccgattgcggtgctcttctccttattgattgtataaccttcccattcataatactcatctgcagtaacggtaaacctgtcaccataaaactgtataacaaaaatcttttgatagtcaccgttaaggtccgccgcataataagtcatcgtgttcaatgtatttgaccaattatattcagccgtcaaagtcttgtttgttgatggcataatcattacattattggtatagtactcagttgtgctatcttcccagccttgtagctttgtattatactttttggcattggtctcgattgcatcaaaacgcgccttgacatttgctccccagcggtcggtaattgtttcagtcgtagcactgttccggccatacttgaatgtcagcgtaaaggtctttcttgtgaagtacacattcagcacagtgtggccgttggcctcgaccgtcacagtatcgctgcgctcgtaattccacagctcgctgtccggttggatatcggacatatacttcttgggcgtctcgctgaggccgcagatcagggtgccgcatttatctttatggtcatgctcttccatgccgtagatgcagcaggaagcgtcatgcttgtgggggcaggaaattccagattgatttatactatacttatagtagtagtccggatacttagaatttccagcactggtctggcctacttgatccccctttaattggttaaaaagggctgcggtgagagaatagtactttccatttaatcttaaataatagaaatcagccgagtcgagtgctgcattttcgtcatcataataaagatacccatcctcaagccctaactgttcaaaataagtttccggtttgttatcgttccaccattgcgtatttttatttgggttaacgcttgaagcgttagcattcaagccatagcaagtcaaatcatgtgtatgcgggcaatcctccaagcacgtctcggtatgcgtatgctcctcttccccacacgtcagctcccagcatttgtcgttatggacatggctgatcagggtctccggcttccaggtgacctcgtcgcccacattgccccaggcctggtgggaggagaggtaggaatacttatcgtcgttggcgttttgcccccagagaacaatggtgtagtctgcatgccccttttccgcctcccactgggcgacataggtcacgctcttttcgatcgtcacggtgccggagagctctgggctccagccgaggaattgatagcccgcgcgcttcggctctttcacctccgatacgtcaaaggtcgtgccgtattttgcatggatcggctccgggccgtcaatgccgtcgttgacatcaaaggtcacggtgtaatactctcgatcgtaataaatctcgaccttggtcgagccgtccgccgcgatcgtcgtctgcgggatgcccttgcagcggtagccgggcttgtgattcgcaaccgcccgggtataggcgtcgatatcgccctccagttcaacaatcgttggatccagggtgtactgattatcctcaagattttgataatagtggtagacggtgtacttcgctgttccggcgacataatagagggtaacggtcacattttcctggaccgcatcgagatcaaagtgcagggtataatcgcctgtcgcgttatccttctgcagtgcaattccttcccccagcccccaggcttggtccgtcggaatggagtagttgaagagcttcggaatctccagggtcttccggaaggcgcttcccttttcgatctgcgcagtatacggctgcgcgaccatcgcattgttgctttcgtaaacatagtttacggtaaccgtaacggtatcctccgccgcattgaccggcgaggcaatgccgccgaacgggacagaggaaaaaagcatcaccaggcaaagcaacaggccaatgctccgccgcatagcgcggtgcgagcttcctgccagccgtttcgaattgtgcatcactgtcccctccctcctttagttggattccggccatccggacgccgccagtgccgtcttgccgttgtttgccgtttggacgccttgggccgcaacgtcgacggtcgcggtggcgttctggtaggcgttgcccatggagctgctgaaatcgaccgttgtgaagatcggcgcggtcgtcgccccggccgggaggggtttgttataatagagatagccgtcctcccccagggtccagtcggtggtgttcaggtccagctgcagcaggctcaggtcgggctcgccatctcccgccagctcgatgcccttcgtcaccaggacacgaatccacgcttcggctttacccgtgttcttgatctccgcgagctttgtcaccttcatgccgggcagaatgccggtcaggtcctcaaagggcgtctcgcgggcctcgtccgcccactcctgaacggcgattcctatcccgccggtggtgatgacattgtgcgccttgccctccgcgttaaagaacgcgatggtccccgcagcgagaatcgccacgcagattgccagcacagagaaaatcaatagttttcgtttcattgttccttctcctctcatactgtattgggaagatcccccccggatcaaaaaaacgaagctgtatggcttcatcaggccatatgagaacatccggggctagccgggtgctctcatatggtctgcgccccgaagggcacagaccacgggatggagaaagttagttctgcgcgtcaaatgcaacgaaggccgccgtggcattcgcaaagccctcgtcctggatggcatcggcctcgaccagaacggggaatacaccgccgggataggggccgttcgcgccgaagagcgcttcgctctgcgcgctggtaaccgttgtatccatgtggatggtgccccagacgttccagtaggtcatttcaccgggagccagcgggtcaatgcgggtgaaggtgtagacgttgtacttgcggccgtcacgctctacggtgccagattgatcgatcgccatagtgaattccttgtccaaggcgctggaggtgtacatgctgctgttcagaactgcggtgtccagatcagcggggatcatcacacggatgcggatgtaggcatcgttgttgccgacattcttgacatagggcatcttgtgataggaacggccgggaatgagctgcacgttttcgcacttatactccgccgcattcgcttcgatctgtgcatcggtgtagaaggtatcgccagctttgtacttgctggtgttgttggagccttccttggcaacattagaccacagctcggaggtagaagtttctccgttggcgacgccagcgttttcacggtgcaggctggactccaacaggtcgatcttaacattgcccacggtgaacgtattcgttgcggccttcgtgtcggtgaaatacgccagcgtggcacccacgatggcgatggccagaagcgcaacgcacaggcaaattgcggtaatcttctttttcatttttgttttgctccttttatgtaataatattttttctgcgcccctgcgcagtggggaaactcattgacacagcctttcaaaaaagctgcgtttccgaaaagcaattacgcctgtgcatcgaatgcagcgaaggccgcctttgcatccgcaaagccctcggcctggatagcatcggcctgcaccagaacgttgacggtcatggtgccatcctccaataccttaataaagcccttctcaacggcagtctggatgtcagcgctggttacgttcttgccaataccgacatagttgataacattccattcggtcatcgcgccagccttgagaggctcattgcgggtgaaggtaaggacatcatacttcaagcccgtctcatcggtgtagccgttctcttcaatgacaggccagttctccccgtttgctccgtgctggaactcaccggagctcgtggcagaagagcagaacattgcattgatgaagccatgatagctgccctcataatcgtgaggcgccatcacacggatgcgaacataagcatcattgtcgccggtgttgaccacataggggcacttggcaaagttgcggccagggaccatgtttttaccgcgttcgccgatatattcggagtatttctcggcgtctgccttgatctcgtcatcggtgaaggccttgtggccgtcggtgacgtacttcatgccgcttgcggtctgggtgggatcggggatggatgtatcgccggagttgtcgttgccctcgcggtggaaccgggactcgatcaggtcgatcttgacatttcccactgtgaacgtattcgttgcggacttcgtgtcggtgaaatacgccagcgtggcacccacgacggcgacggccagaagtgcaacgcacaggcaaatcgcggtaatcttctttttcactttttactcctcctgtaatctcccatccggtggaggtaacatcagatggggcgtggtgtttggatttcggggttagggcgtaatgttgtcccaagcctctgcagcggtaaatttctccgtgttgttcttatacagctgagacgcataggcggtgaccgtcagggtggggtatgtatccgccgtcagggcattcatctgcgctttggtgacttcgtcctttaccgtgacctgattgtccctcaagacctcataggttgtatccgcagttgctgctgcgacctcacgatagaacacgccatcgttgccaggcaacgctgtccagccctctgccatctcataggtcataaaggtatcgaagtccgcagacttctccagcttcacaaacagatagcatgcttcgctgtccgccttgacagtaaccttcgggtccttctcaatatcccagccgggaatcatttggaaatgattcttagtctccttcagctcaatattgatatcactcgtcgtgaacgtattcgtgaccgaaggcgtcttatccgtcaaccaagccaccgtaccggcgacggcgccgacaacaacaagggcgatggccagaagcagcgctaagcttttcttcttcatgtggctttccctcctttccgcagtatttcgctctgggaattctatgcaagccgggctaagccagcgcccgccccgccgctgtagataaaattacgttcctctcttgcatttttcggcaaattgttatacgattgcaaaagagtatactaacaatatgctttaagcgccatgcgttgcgccaaacgtttctccccacgccgcagctgcagaagcaaagccgtcttgctgcaccgcataggcagtgacggtaacctttgtttcagcagaaaagttgttccagctatctgcagcatccgcattgtcagcaattgtgaagttgccgaacacagggagatttgtgatcactgcgctcttggtataagtcttgtaataaacgtttttgacgtcaacgtttttgtcgtccttaaggggttgccacccattttcagcaatctgcgccgcaattgtcgggctaccttcatacttttcaatgccgttttcgaccttcacaaaaatgaagctgtcttcgctgttcgcctgaacgtgcaccgtcgggtccttcgtgtatccatggcccgggagcagatgataggcattttccttgacacgttcggccggggtgaccgcagtgccgtccggatcgacctgagcctcgtccagcgtgattgcgaccttgccaaccgtgaacgtattgacaaccttctcggtcgacgtcaaatacgccatcgtgcccagcacagaagcggtcacaagcaacacggcacagagcacaagcatgagtgccttggtttttttcttcatgtaaaaaccctccttaaaaatttttcatttttcatattttggaatcgcagtgccctgcgtttaccactgatttagtccgggccctcgtccccggtcattccggccgctggggcggctcctgatcgccgctttctgcgcggcgtggctcggtgtaaaggcccttctttttcttctgtgcacccttcttgtcgccggagagcagatccggcaggattgccagcagcaggagaactgcgccgccggacagggcaacatacgtccccggcgggtgctgaatataatcggcgacgtaccccaaataaggtacggtaaagaccggcacaccaatgacatttttataatgtaccagcccggcgtcctccgcctcgttggcatcgccctttgtccggaagcggatgacggtgctgtcctcgtcatcggggacgacttcggtcacccggtgggtggcgacggtgtcctcgtcgagcagaaaggtaatgggctggccgggggtgatcgtaaagggatcgacccttttgacgtaaatcagcgacccggtgtgatacgtcggctccatggagccggacaggacggtatagacctgcaggccgaataaccgcacgccgaccagcgcgatggccagcagcacgaccagcgccaccaggacactgctgataatactccaagcttttttcatactgtttccttcccctcctctgacaggagctccggccggatattcggcgtgataaagcaacaaatctgcgcaaaggtccagcgggtcagctccgggctattggcgaccgcgccgcagacgacgcggccggcaaaggtcagcatcgtcgcaaacagctggtgcagcaatagggagagattcgtccccggcaggaagctgccgcggatttcctccagcagtgggcggtagcaattgagatgatcttcgtaggcatatttttggcagctggcggagtaatagtaacggtaataaaagctgcagtcggcttccttctccaggataaacgcccagctggactgccagagcagaaaggcccgctccttccaagagcagtgttcccgccgcatcaccggcagcgttttccgcaggagctgaacgaagcgcttgtcctcttccagaaaagcctcccgcaggagcatttccttgttctcaaagcagcggtaaatataggcctcgttgagattggcttcggtggagatcaattttgtcgtcgtccgctccaagccgtactgggcaacgacgcgaactgtactttccaggaaagtacggcgcatcgtttccatgcgctcctgcctagtgctgcgcgcattctgctcgctttgcttcatcttctgtcgctcctttttcg

SEQ ID NO: 4286 - DNA, 3892 bp, Unknown
  16S sequences of unknown bacteria
cgatcaatgcgttcagctctgccttggagacgatctcccacagctcctgtgctgccttggtcatcgccttgttcgctgccttcagctcatcgacggtcgcttccgggtcgttgacgacatcctgtgccgccttgactgcgtctctcagcgcatctaccttgcctggacggaatccttctacatcgttcaagatgttttcgttgatgaagtcgatcgtcgcctggacgtctttgcacagggcatccattctttcatcggtgttcagatcctgcatcgcttcgctcagctcgagcaatgcgctcacaactgcggtcacggacgcgttgtccggatcatcaagcagtgcctgtgcagcttcgatcgccgcattcagcgcttcatcatctgatcccagcgcattggctttatcgaccatgtcctgcagggcattcagtgcagatgcgcttgccttgacctgcagggcatccatcgcagactgcaatgcagatgcggcctgatcgacctgttcctgggtcgcgtcctcatcggccatgatcgtctctgcggctgccagtgcatcctgcagcgcggtccagctgtctgccgtatggccttcctcttcgatggcctttgccgcatcgatggcttcggccagcgtgcctttatccacctgtgctgcttcaaatgcgcgcagttcccagatggagtatccatagcggttcgataccttcttcgtgcagttgatcttcaggtatgctgcttctgtcggctcaaaagagatgacgcgattctctgatgcttttccatcatttaccgcagcgaccgtagtgtaagtctctccatccatcgatacctgcacttcataaactgcgcccgcagcggcttcccagtcgatctccacccggttcagcgtatatgttccctgcagatcgacgacgatccactcattgagatcataaccatttgcccgattcgatgtccatcttgtgtcgctgtctccatctactgcgttttctccgttttgcttgccctgggaaagcggatccaggctgctgacggtgaccggcttgttcagcgtgaccgaacgctcgatctcgatatcctggatctcaccgatctcttcttcatccagttcgcggtcaaataccatcagatcatcgatggttccattcaggccctgaccgactttctgcaatgggagatagatgcttccggagtcgtaccacttgtttccggaattggtcagcaccggtccggagaaggtgatctcgtgacggccatccacaaagacttccgaggtcttctgattgctttcaaaggcgatcttgtagacctttccggtctcaaacacatagtcgctttcgaaatggtaattgtcccggtcgaacatcagctgatatccgccgtctgtcctcttcatgtagatcttccttgtctcatatccggtcgtgatcgtctcgttgcattcttcgcgcggcatctgttcttcaaacagcacgatctcatcgtcgctgctctcattgatcttcagttcaaatgccacggtgtatggccagcccagcgaacgatgacgcatctcgatgtagccgtcgttttccaggacgagctgacgatcctgcgtgctgctgctcagttctccctgaaccacgcgggcatcataaccgttgccggaatggtcgctgatctcgaagctgtctccttcttcattcttcgcttcattcatgtcgaaggagcagatcatcgaatccgcagactcgatgcggtgagaagattccacctgcggtccgtctccgaggatctcctgttcagctttgaattcctcataagacagatcttcatcctgtccataccagtatgcctgcgcatacagcgggatgatgctcttcgtgcgggcaaatacatcatagacggaaatgccgttgaagatcccgcggtcattccataatgtggccgatccgccagcgatctgcggatgtccttccgccaccgtgacaccggcattgtttttatcgatgaacttgccggcgctcatgttgtaatagatctcttcttcctttggaaaatccggataaccgttatttccgccaggaacgacatatccatatttgttggtcgcattcaccagatgatagccctgcgcgaacaggctcttcaggttgatggcataattggcccaggcatccatcaccggatagtccggcaaggtcgtctgcgtgctgtccaggcaccccatgctcgcccatgccatcggcgtcttgccatagcggtcatggaccaattccatgacatacttggtatactgcgtcatgtcttctttataattagagttgtattcgtctaatccgacattgaacatatccgtgacgaataccggatcatctccgcccagatattcatcatacaggtcagcgatgaactgatagaccttgtccttgttctctgaatcaaggcggatatcgagatgcgtcttgtcaaatccaagagagggatcgacattgtcgatgaacacctgagagtgcgcaggcgtatcgaactcagagatgatgcggatcccgtaatcctgcgcgtaatactgaaaatctctgtactcatccttcgtataatagccgtcttccgcagtcagtccttcgatatccgactcgaggcggaaacgggaatgatcattgtaagatgtgtcattcagatggatctgaatgtcgctcatcttataccatgacgcatagcggacgagatccttcagataagacatcggcatatactttctggcgacatccagggtgaactttctgattccgtatttcggatagtctctcgctatgcctttcgcgatggtctcatccccgctgtaaagcagtgcctgcagcacgctgcgcgtgccgaaaaacacgccctggtaagcagaagcacggaccgtcacctgatcctggatgtccaggatatatccttgttcgctgatggcaggatctgcgccttccatggtcaggacgatgtcgcccgcacgagcggcgtccttcgtcacttcgatctccatgccgaacagatcgctgatgtctgcctgcatgatcagcgccgcctgcatcagcgcgtcatcctccacacagatccggctctcttcactgagcgtgaacttgccggaagcgcctttccattcctgcaggctgggcagggcgaccggcgccggattgtcagaagcctcaggatgatactggccaggaatgttcacttccaggttcatcacctgcttttcttctccggaaaccttgtccttcagcacataggtcacgaggatatccttatccaccagcggctgtgtgatgctgccttcatcatccacgacatcatccgtgtcgctgcagaagaattccgcgctgacccggccatccgcaaagctgaaggaaggcatcttcgtcatatccggcgtgatggtgcctacggtgaagtcctcggcgatatcatcgagcgagatatcttcataatgcgatgcatggatcatcatctcccataccgagatcggcttgttgctgccgaccccgttgctcgccgtggcatacaggcgcacataacgggccgtgatcggatcaaagttaaatgtgacccagccgccttctccatcatccacagcggtaatgctcgtccagctgccttcttccgccgtattcgaatactgcagttcatatgcggtcgcatacgcctcctgccagtagatccggatgcaggagaatgtcgtctcctcttccagatcgacatagatccactgcgggctctggatgatgttgccgctggaccagcgctcatcgtaatcatcgctccattttccatcgaacgcgccggcagggccgaggcggtccagcccggcttcatttccagatgcgtaagccggcttgttcagcgccaggttctccggctgcgcagg

SEQ ID NO: 4287 - DNA, 14876 bp, Unknown
  16S sequences of unknown bacteria
aaattccaaaagatttgaatttgaattaaaacgtgcgttgaaaaagcaagaaatgggtgtacgttttttcttaacacaaccgatttattctgaagatgcaatcgaaaatttaaaactggccaaacaaacactgagtgtaaaaatactggcgggctttatgccaattgtcagtcatcggaacgcagtgtttttaaataacgaagtagcaggcatagatatacctgaaaaaattgtgtcgcagatggaaggaaaagagtctgaatgtgtgcaacaaatttcgttagattattgtatggatttggtatcaaaaattggacatgattgcgatggttattatttgatgacacctttgaaaaaatatcaaatgatagttgagctgataaagagaataaaatgatagttttgtaacttttttgacctatattttgtattttaaattagcaaattaacaatattttgatgttgaaaattgttgttttccataaaataacaattaagtgacaaataaattacaaaaagtattgacagtaaagtagcctaggaatataatgtaaaagcaggaaagaagtgcaaaaggtatagcgtaagatgtctaaggtttatacagtgtacagtttagtttgaaagattaattgagaggtgtcaggagagggtatattgttaaatgggaagtatgaattaattgcaacaactattgatcatgaggagattggatcttacattggatatggtattcgttatggtgaacatacggtaacggatatatcattagacagagcgaaaatagaaaatttaattgaacgcatgaatttaaatgaattatctccattacatatgatggatattatagaagattttcttgcggaagacagtaatttcttttcatgtaactaggatgtaaggagagagacattctagaacaaacacaccagcaacgtaaaggggaaagcgttgctggtgtgtttgttttaaaagaaaaataattttttagaaaggggaggtggaccgtaccgacgaatgatggttacatacaactgtttggaaatgtataaaatcgaatttttatggactttttattataaaaaatacataaagtggataaaaaaggaacaatatacgttgtataaagtcccttttttaattaatcaaccggtaaaagattcaactgtataaactcatcataagtaaccaatttggtagattgattttccacataataaacgtaatccggattacgatatcccggttcgctggataacgtagcttgatttgcattattccagtaatacagtacaatcaaatttgatgttttaataagtttgaaggaacaatttggtttttccacaccggataaatatatctttaagcgttctacaataaaattgtaataaatagattctaccgactggtctaatgtatctaaagaatcattcagatggttactggtaaatgtgatagttgaggaaggaattgtaacagattcgtactgtgcatcagcatgtgcaacttcaaaagctccaacgatatctttactatgagtataagcagtggaatagtcggcagattttgaaatggttgtaatagtaggtattacaataatggcaagtacagcaacaacaataattacaatactgaattctatccaacgacgtgtatgactgattttataaacacgcgattcattaatggaatcactatgttcggaatcgatttgatggttatgattcataaaattattacgctccaatatgtcggatgaaagaaaaatataatttctgtgtattcatagtataatcagtattgttgtgagtatcaagtagtttttctgcaattctatttatctgtcaccccaattatacaaaatattcattttgtataattggtgatatttctttcaaacggttttcatttacgtatttatttccatttcatatctgtatctttaatgataaacatacaaaatcaaaaatctgaaatgtacttttcatttatgtgtgtttgatatcattgtccaaacaataaattttatcttaaaatgtatcttttattatcaaatcagtcataataaactataaatcattcgaggtgaaatttgtatgtttagtatgattccttgttcttcagattgtatttatcaagtagacggttattgtactttagaaacgcctaccattgtaaccaatatttccaatcatggctgtgtacatcggattcaagtaaaaaagagaaccgcatcatctccaactcggacgtattgctttaagtgtccgttgccgcctcaaacgcctccctcacatgtcgcacaccaatgatttgaattttttgagagtttaccgttatttgtttcaaattatgataaggaacaatgcatttttgaaatcctaaatgtattgcctcggaaatacgtgcattaatatgacttacggaacgcaattcgcctgccaatcctatttctccaaacactaaacaattctcactgattggtacgtcttttaaactggataccagtgccatagcaacagccaaatcaacagcaggttcgtccaatcttaatccgcctactacattaatatatgcatctaaatttgaaaaataatatcctgcgcgtttttccaaaacagccagtaatagagacatacgattatagtcaaatccggtagacatacgccgtggatttccaaatcctgttgtggaagccaaaccttgaatttccgctaaaataggtctggagccttccataacgcaagtgacacaagttccggcagtgtattgcggtcggcctgacaataaagcgattgaaggattttctatctcttgcagacctgtctcagtcatgtcgaaaacaccaatttcgttggtcgaaccgtaacgattttttacagacctcaaaattcgataggaattatgtctgtctccctcaaaatataggacagcatctacaatgtgttccaatacttttggtcctgcaatagcgccgtctttgtttacatgtcctacaaccaatgcaggaatttccaaatcttttgcagtgtgcataatggcattggtacattctctgacctgggtaatactgcccggcgaggaagtaatatctgtatgattcatagtttgaatcgaatcgacaattaaaatatcaggctttactactcgcacttgctctaaaatggcctggatatccgtttccgccattaatgacagattgtcgctggtaacccccaaacgtgatgcacgcagcttaatttgttttaccgattcttctcccgacacatatagtatttttaatgtattccccatgtattggcatatttgaagcagaatggtggatttgccgataccgggatcaccgctgataagaaccaaggaaccttttaccaagccgccgcccagtactctgtccagttcggataaaccggtatgatatcgttgttcctctgtactgtcaatttcgtgtaatcctacaggttttgcaatgataccgctgccaacagcagaatgaatacgttttgcagtagttgttgtattacgaacttcttcttccatcgtattccaagcattacagctgggacatttgccgtaccatttggcagattcaaatccacattctgtacacacatattgcactttcgtttttgaagccatatcgttataattccttcccaacccatttcaatataatatgagttatcagatattatgtaaattataacgcaccaaaccttatgttgcaagcatagggtttggtgcgttatttgtactattgactcatatattttaaaattccacaaaaaatagaaaatgccattttgtcttgataagaagcatcttttaacaattgtgcttcggatggatttgataagaaaccacattctaccaatactgcaggaacatttgtattccatagtaaatagatagattctgtagcaggttttatttctcttttattttccggctgaataaaagtcacaacttgattttgaatatcttccgcaatcgctttgctgtcctcatgatttttagagtaaaatacttgtgttccgttgtatttggattccgaaaaatgattttgatgaatactgataaaaatgcaatttggcgtattttgaattaattttaatcgatttttaatatcagatactttacgctgcttcacagtatctaaatttggatcgtttacggcaatatcagtctcccgtgtcattttcacttgaaatccggccgattccaacatggcttttaaacgcaatgtaacggctaaattaatgtctttttcttttgtaccatccgtactggaagttcctccgtcttcccctccgtgaccggcatccaaaataataatacgggaagcaggatctgtagtggcagttacagtttttattacaggcattgttaaaaacaaggtgccaacaatacctgcaattacgcaaacgaataggatacatggaataaataatggtttttgaatccattgttttaatactttcaattgtatcacccgttagaatatatgtgtatcgtaccatagatatcacaaaagaaatttcgtgcagtaccttaaaataacaattcttttttctgtctttccttcacttttttggaatgaggatgtgtgatttgaaagaaattgaattttttataacaaattttttcttaagttgctttgtttcttcttcgactcccttcgctgatgtttcttcacttttaacatgttatttcagagtgacgactaaaaatctatatacataccaaatgaataatatttaagaatgaaaatacttgttaattactccttgtttttgtaaagaaagcaatttgtgtagtcagagttccaatatgagtgttataataagataaacgtatatagaaaatatttatatgtagtttttaagtatagtataatgaaaataatagaaatacaaactataaaaggttatatgtggaactccttaaaccgaaagcccaatattgtgggttagaagaatgaatgagatacaagaaaaggtaagagaatttctatgtagcaaattgatttacaactaatgagtgtaatgcttattaccttacagcacagtggatagaagaaaacgctaacctattgttttagacttgcaaatagcaataaagcagggcttgtcggtagacaatagcgttacccttgaaagaaaacaaatatggaaattttcacaccttggtggtatacctttaacggaaaatagaataacaagttttaatttgtatgaaaaggagcccttttaatggatatctcagaattaaagcaaaaggaattgccgtccatacccgatgagattaaaaaaaagcattgcagcctgtaatattacactaaccccatttgacagaaaaaatgatgtactatgcaagtcttatttacagatggaggctggttatggtagattttccgatgggagctatcttgtttccatgtactgtcctatgtctggactcacggccgagatggttgcatggtggttttggtggcatccacaggcaaaagaacggtatcaagtctggtttcccggtgcgcacttcggaataggatatccacgccggtgtgccggttactttgagcaggaaacacaaccgccatttcaagataatacacagcttccgacagaaaagatcggtggaatgcggatgccgcttcgcatagactttgtggcaccggaggagtttggcttttccagattatctatgaaaaagaacaatattcccttaatagtctgtggtcatgtaggtgcgttcaatggtttgatttggcatacggaaatggcacatattttttatcagacgcaggatggtcttttactcactagtcgattttggcttggaagaacgatgaacccgcttcttcgtaagttgatgattaacaattctatggcgtgtggaatggcggaacattgtgcaattgaatatcgtaatttagcagaaatacttcctgctttatataaaaaatataaataaatatgatatttatcgaaacaaaataggaaacttataaacagagaaaatacagaacactacaattggaaaaaagtttgtgttggatggcattgtatcacaacagatgaattaagcgtcatcgcagaaaagattccgccgcacacagaagagaatatgcattttcatcacaaaacaatttttatattcttttgggtgaagcaataatgcagtttaagaatgaagccgtacagttgaaagtgggtactggaattaaaattgacccgatggaagcacaccagatgcgaaatgtatctgatggcgaaatgaatttcattgttgtttttacgccaaaatcacatagaggccgtgaacttgtgtaagtaaaaattattatttatttaaattactaaaaaacctgttgctataactgaacgctataacaacaggtttttgcaatatgatgctgatattgttttatttctttttcataaaacgttcgcagtcttcacataatccatataaggaaagtttcgtttgggttgtagaaaaaccgtactcattttttacatgttcattgatagattccaacatactgtcttttacatcacggatagcaccgcacttgaggcaaatcaaatgatagtgcacttcatggtttggatcattgggatgtacgttttgttgtcccatcatatatactttattcaaaaggtccatatcctctaacattttcaatgtacgatatacggttgccaaaccaatggtgtcatctttcttttgtacgtaagaaaatacatccttagggtgtacgtgccaccccacttgttgagcaatggcttccaaaataattttacgctgagttgttacacgaaagcctgcatcgtgaagcacttcaatcatagaatataacaaatgttctgttgtctcttgtttgaagtttaaatcttcaaagctaaaatctttatgcatgaatattaccacctaaacaaagtacttgtgtattttcttttacaacgcttctattacatcatattatagtcaaaatgtcaagaaatattgtctcacggtactgtttttaggaagattttgcttaaatttatgatttgtttatgtatttttcgtgtacaatattttatccatttatgagcacagtgttcttcattacaaaaaccacaaaacgtacctgcctgctgtgattgttttatcatgagttttgaatttgtaattgatattttatcccccattgtaccatagcatctaaaacaggctttagactgtaccctgtgtcggtgagtgtatattctactttaggaggcacttgggcatatactgttctgattaatagtccgttttcttccatggctcttaaatttgctgtcaatactttttgtgagatatttcccagtgatttttttaattccccaaatcgtttggttccctccattaaatctcttaagattaacacattccagcgattgctgattaacatgagtgttgtttcaacagggcaagcaggcaattcttttttcatacggtatgttatttcccttctaatagtatccttttggtaactatagcactaaaaagtgcgtactttacatataggtgttatggatttattataaacttgcaagcaagaaaagacaagcttgttttatccagaggaggtcatttttatgaaaattgcagttgtatgcgcaaacggaaaagcaggaacacgtattgtaaatgaggcggtacagagaagacttgatgtaactgcagtagtaagaggagaaaattgttccaatacaaaacgagtcattcaaaaagatttatttgatttagccacaaatgatttgaaagaatttgacgttgttattgatgcatttggagcttggacagatgaaacactttctcaacacagtacatctttaaaacacctatgtgatattttaagcaatacagatatcagacttttagttgtaggcggtgcaggcagtttgtacacaaactttgaacatacacaacaactgatggacggaaaaaattttcccgaaatgtttaagcctcttgcttccaacatgaataaggcattaaatgaactgcgagacagaaacgatgtaaaatggacttacatcagccctgccgcagattttcagtcagatggagtaagaacaggaaaatacattcttggaggagaagaattctttgtaaacaaaaatggagaaagtgttatcagttatgctgactatgcgatagcaatggtagacgaagctgtgaacggcaatcatattcagcaacgaatttctgtcattgcagaataaaaaagaagcgggttttcatatagaaacctgcttctttgtcttattcaaaaatgtcttttttgttttcttttttcaattttacatatacttcaagtgtattgttgcaatcgcaagtggccaagaatacatccttgatatgcgaaacgccctgtgcgtgcaattgctttttaagccagatttcatcattaccggtatgtctgagattttcctgcataatatgcccgtccataatcacattggcaacaggggcttcttttgcaacattgatattcaggtcctgcggtgtaacaggccgtttggtagaaacgggtataaagctgattttaccattggtttcaaaaattgcagattgaatatcagataaataaaaatatccgtttgttctgcattctgtcaagaactcgttgatgtccaattttgctttctttaaattcttttcaaacaattttccattttcatataacaaaaatggtcttcctaccagaaagcggcgtgcttttatggatttcatgctgatataagaaatcataattgcaaaaaaagcataaataatcatagcgaacagtggctgccaaacatcaccatccaatgctgtagccatttcagcagcaatagaaccgatggtaataccattaatatagtcaaacattgttaattgagaaatttgtcttttacccataattcgggttaaaataaacaatacaatgacagaagacacagaagtaatgacaatatagccgatacctttccatgagatttcaatattaaaaaaatccattggcatataacccttctttataaaatcattactagcatatcccaaataggtagctttattagtattgattagaaaggccattcaactgatcgcattatttcgtttacttcagatttgtttagcagatttaatcgaaaaattttcctttataaaaattttcatttcccaattttttggctgtaagtttaaacatgacacagccatcaggacatacaatatccttgctgtatttatcagttcccccaatattttctaaatttccgccgcttctgacagcttccatgacgggaaataacatcatcattgcttttgaacaaatcccgtatccttgagcattaacagggcaaccatacgtgcaggaatatttatctcctatttcttctccgtttctgcaataccgttctgtatggtcacctcggagaaatcccgttacctcaatctcgaatgaatattcttcattataccattttttcatatattcctcccatttttgatttcatgctctctcttatacccattggttgcatcaattacatgctattcttccacaatttaatatagatactgctgattgaaagcttttatcatatcaaataatacataccttaatcttataaaaaatttttgttgttttgtgaataatataagaatgaacaacgttattatctgtgcgcaaataggaattttatattctaatgttttctaaatggaagatatcatctttttccaccgttgtgggtattgtgattcaggtacaacacctgaaaatcttacaaatcatagatattgattatgagtttctccgtgagattcagcagtatcgcaattctttttgtgtattaacatttctacacatctctacagcttttttagatttacttacaagattaacaatttaataatttagttaaatcttcaatgggagcgtccatcttacttgatatttcttccattgtcataccggttgaaagaaaacgttgaattactattttcatactttctcctacttctatgatatgtccgtctaagtcataaaatcgaatgacgcgctgtccccaagtatgttccattacttcgtctaaatattctatgttttcatactgtttcagtcgaatcaagaattcgtcgaagtcactttcttcaaatgcaatctccacattattcgatttctttaatactttttcttttggcagatttacaagccaatcaaaatcttgttgtaaagccaaaccgcaagtgaaagcaatattttttccgtagtcttgatagatttttaatccaaataaatctttataaaacttttttgcagcctcaatatctgaaacggatataacggtacagatgtatttcataatgatttttcctttccgatttttactgttattaaatcataaaacgattgatttttttgttgctgcaaagctgtgactatcgcatacgaaaatggcaaaacgtaaggcaaccgttcactttaattttcaatcgttatattagtatacttattgttgtgtttctgcaacatatttatagattttaaaagtacaatatctcattatgataatatatagtgttgtgtactccaaaagcaaagccaccacttttgggtattttaattaacgattattatttttttgcggaatatccaaagctaagatatcttctttgtgttttatcaaattatcgtctgtaatatcggataaaaatacctcaaagccaacgcggtcgatgacagcaccgaaacgctctttttggtaaccgttgctgcggtaccaaagcagagtcttttccaacaagtgttctatttcattcagatgataatattgcggcaaaacagttcccatgcgggttgttttcccccacgttccgcctacaaaaatacgaaacacaggttctgcttctctttcaatagctccaaaatggcaggcattgctgcaaataccacaatgaatacaagaggtatcgtcaatctttaattttccattttctaaaactgcagcatgaacgggacaacgtttttctacagcacatacgtgacaggaacggcaatgttcctccttatattgaaataaaaggtgaccttgaataccaaagtcatttaaactgggtttcatacagctattgggacatcccccaacagctattttaaacttatgaggaagatttatcgtttgccatgcctcaaaaaatgtatggtgcagctgttccgcaattgcttgcgtgtcacaatttccatagatgcaggttgtacctttacaagcggtaacagcgcgtattttggcgcctgttcctccaatggtcatattttgtttagctacatgattgcgtacattatcaatatgttcaaatggaattccgggaatttcaacagttaatctggtagtaaacgtgactgttccattgccatattgttccgcgcattctgctaaattttttaattgctccgctgacaagacgccgtttttggtaatggcacgtcctgaaaaacagtttgtccctctgttttgtaaaaatcccagtgattttgcgtgcgaaatttgtgcaggcgttaattttgacattgataatcacctttctgacatacatttcattttctattctaaactccgtccgttttaatcattgattattatacacaattcgactttttctgtaaagcaaaaggaaaatgtaaggttatcctatatcataaatgaagattttaatgttatgatgcaataacaaattattttattttaacaacacattttgaaatatgatacagattgcattcaaaaatcccacaaagaaaatgtgggttcgattgtataatatggataaaatgtaggcatactccctaaagaggtgagtaatatgcaagatttaccattgggatttgaatttgcgttggcacaaaatcctgaagcgatgaaattttttgcaaacctaacggaaacggaacaaaatcagttgattgaacaatccaaaaccatgcagtcccgcacggaaatgcgaaattttgtgcagcatttatcacagcagcaaggtggtttttaatgggagctgaatactatttgaaaaatgatgatttaagagagtattttatttcattgccccccattgtccaagatcaaattgtagtatccggcgcggaaatttgtacgttaggcgaattaatgcaagttgcggaacattttaaagcagaattgcgcatgggaagagaaatggatgaatcttttccttcataaaaagtcccctctgaaccaattggtatcagaggggattttttctaatgtaaattattgaatctcttttttccaaagaccatgcaaattgcagtattcaaatactgctacaggagcgtcatgctcaatagagaatgttgcttccggagcttcatttggatgcaaagagattctttgtccgccattttctgtttgaagataaatccattgaatataatgttcttccaacattggatgagtaacttcaccaacatgcacttttaaagtgttgccttctatggtaactgccggaacgtgcttttcggtagctgcatcggtagtattggccaccaaatgtttcattggttggccgcagcacatcattggtacgcctgcgtcgtgaattaaacctgccatattaccgcagtgttcacatagataaaatctttctgttgctttcataataatacatccttctttctttttcatttactatcattttctaaactacaaatttattttatcatgctgttctgaaataacagcatgataaaattcatatccgcctgacaaattagagcatgcaaaaccatgttgtgttaaaatacggcaggcaatatagctgcgttgaccgcttctgcaattaacatagattgtttttgaggcatccaattcatgtaaacggtctctcaattgatttaaaggaatatgtatgcttccttcaatggctccggtctcatactctttgtcagtgcgaacatcaagcaatataatgcttccatctttcggcagtttggcaatatcataccaatggtgctgttttaccagacctgttaagatattttcaattgcaaatccaatcatattcacaggatcctttgcagaagaaaacggaggtgcgtatgccaattccaattcggttaaatcatatgcagtcattccggctcggattgcggttgccagaacatcacagcgtttatctacgccttcgtatcctaccaattgtgcacctaaaatttttccgctttgcttttcaaagatggtttttatcatcatattttttgcgtttggataataagttgcatgagatggagaatacgtaatgatggtatcataatccaaattggattgctttgcttgtaattcatgaatgcctgtagtcgctactgtcatatcaaatagttttaatatagacgtgccttgtgttcctttaaaggaaacattgcgtccgcatatatggtcggctgcaatacgcccttgtttgtttgcaggaccggccaaaggaatataagcttcctgtttggtaacaaaattggtcactgcaatggcatcgcctaccgcataaatatcaggttttgaagtacgcatatgttcgtctaccaggattgctcctctggcattacataaaattcccgccttttgcgcaatgtctgtttccggttttaccccaacagacattaaaaccaagtcggcattcaaagtaccatgacttaactgaacttcaatgtgagattcggttggtataagggcctgtactccattttttaaaattaaacgaatgccattttttctggcgtaatgttgaaccaaaccggccatatctaaatccaacggcgctataatatgttcggccatttcaataacggttacgtccaaacctgcatgttttaaattttcagccatttccatgccgatataaccaccgccaatgaccgctgcagatttcggtttgttttgttccacatatgcgcgtatttttaatgtgtccggaactgttcttaatgtaaaaactctggcatcatcacttccgggcaaattcggtctgattggtttcgcaccgggagacaaaattaacttatcgtaagtctcctgatatttttcgcctgtattatgattacatactgtaacttttttgtcctcagtatgtatttcaacagcttccgtattggttcgtacatcaatgcggaaacgttcataaaaactttgaggggtttgcaatgtcaaattggattcttctgtaataacaccgcctacgtagtagggcaaaccacagttggcatatgagatgtgctgaccgcgttccaatatgataatttgtgcattttcatctaaacgtctcaatcgtgctgctgcagaagcacctcctgcaacgccgcctacgatgattactttcattgtcctactcccccttttccagatttcccggccagaagagaatgcctccaatgtctgtaatatgtccatatcccatatcggcaaatagttcacatgctctttggctgcgtccgccgcttaagcagtatacaaaaatagtttcgtttttatccggaattttttctgtaatcaactgtggtgtttccacagggacattgattgccccgggaatatgtcctttttggtattcttcaggagtacgcacatctacaatgatgatattaggattatcctcaatttcaattttggcttcatccatagtcaatgtgtgaaaagtagattggaatagttgtgacatactatatagcctcctgtatattttatgcttctatttttaataataagaatcatacttgttttgtatatgtatttagtatactttaaactttactaatagtcaatggtaatattcataagcagata

SEQ ID NO: 4288 - DNA, 9639 bp, Unknown
  16S sequences of unknown bacteria
gattcgccttagtctcgtgggctcggagatgtgtataagagacagtggcggggatgtttaccgccatcgtgcgcgccccgctcaccggcatcatcctcatcgtggaaatgtccggctctttgacccagctgctcagcctgtcgctggtttccatctgcgcatatcttgtcgccgatctctgccgcagcaagccggtgtatgaatcgctgttggaaaacctccatccctctcagcaaagcgtcgcgcagcccggagagcgcattttcctggatctgcctgtgcactacggcagctttgtcagccaaaaacgcatcgcccaggtacattggcccaaggactgcctcatcaccaatgtagagcgcgggcgcgaaaccctgattccccacggcgatcttgtgcttttgcccggcgatacgcttacctttctctgcaaaagcggggacgaagcgcatctgcgagagcagcttgcgccagctttagagcaataaatccatgcaaaaagcgcccgaaccgggcgcttttttatgcgtcgatttgccccagtacccagccgatcttctcctgaatcagcaggtttgccctcctgtcgtatggcgttgcgtcgcggttgatgagcaccagccgatcccctctgtaatagtcgatcagccccgccgccgggtacactgccagcgatgtgccgcccacgattagcacctctgcattttctatcagccgcaccgcctcctcgatgtccgcaccgttgagcgattcctcgtacagcacaacgtctggtttgatgacgcctccacacacgcatcgcggcacgcctcggctttttgcaatctcctccgccgtatacgctttgccgcattgcatacaatggttacgcagcacagagccgtgcagctccaccacatggcagctgcccgctttttggtgcagtccgtcaatgttttgcgtaatcacgccttttagcctgccctcgcgttcccattttgccagctgtaaatgcgcctggttcggctgcgcctgcaaatacagcatcttctcccgataaaaacggaaaaactcctccgtctgctgcataaaaaacctatggctcaaaatggtttcgggcggatattggtaggattgatgatacaatccatcctggctgcgaaaatccgggatgttgctttccgtcgataccccggccccgccgaaaaatacgatgttctgcgaatccctgatccaggattgcagcgtttggatctcttgcataaaataccgcctcctacttctagtataccgccgatgcaccgccaacaaaagaaaaaaggacgcgcgtgtccttttttatccctccagccgctcgcgccgccgggtggatgcttgaaacatctggcacagcgcgtcggtatcgtccgcttggatggcatctttgatctgatccagctgcgcttcaaaacgcccgatggccgccagcaggttttccttgttgcccaaaaacagctcgctccatagcgtctcgttgatgttggcaatgcgtgttaggtctcggtagctgtccccgatgaagctgccggtatcccgcccttcctcgtcgctgttgatcagcgccaccgccatggcgtgcggcagctgggaggtatagccaatcatttcatcgtgcagctctggggtaatacggcgcacccgcttaaatcccagctgctttaccagcgattctatcacggccaagctttgttctttgttgcgctctgtcggggtaatcagatagttggcgcccttgaacacctctgcgctggcaaaatcgatgccctttttctcacgccctgccatggggtgcccaaacacaaactccacgccctccggcagggcctctgtgatctcgcgaataaatgggcgcttgatgccggtggtatccgtcacaatgcatccttttttgaacagcgcctggttttgctccacaaacgcgcggataagcttgggatagatcgccaggatgatgagatccgcctccgggaaaaatgccttcccctccttgcatcctttgcggatgatgcccattttttccgctttttccagcgtctctgcattggtatccacgccgtacacgtcatcgtaccccgcctgttttagggccagggcaaacgagccgccgatcacccccaagcccacaatcacgattttcatgcttttttcccttccctgtacgctgccagcgcttccatcgccatcacatagccaaacgcgccaaagccgcacagctgcccaatacaggccggcgccgtgaccgatacatggcggaaatcctccctttggtgcacattagacaagtgcacctccaccgtggggatatcgttgcccttgatggcgtcatgcagggcatagctgtaatgcgtgtacgcgcccgggttgatgatgatgccctccacatgttcccgataggcctgctgcaaaaaatcaatgagcttgccttcgctgttgctttgcagcacagagacggtatgccctcttttctgcgcttcttctgtaatataccggcagaggtcctcataccgcatcgtcccgtatacgtccttttcccggatgcccaaaaagtttaggttgggcccgttgatgaccataagtttcataacagcgcttcccttcttttgatgctgtctatcagccgttgcatcgtctgtttgaccgctccttcgttggaaacgatctcatccgccgcgttttcatacagctccgcccgttcccggtacagctgatacagccgctctttgccctgttttaacagcgggcgcgtcgaaaggcggatatcccccgcgatgcgctccaccggccggtccagataatacaccacgccgctctgctttagcagctccatgttctgttcccgcagcaccgcgccgccgccgcaggcgatcacggcatgctgcttttgcgccaggtggcggcaggcctccgtttcccaatcgcggaaaatctgctccccctcctcaaacagcgcgggaatgctcttgcccgccagcgataccacggtatcgtccatatcgtaaaactcataattcagctgcttggcaatgcgccgcccaatggtggtcttgccgctgcccggcataccgatcaaaacgatattgctcttctgcgggccgctgaggcgctcgtccaaagcgtcgtagatgcgccggatcatctcatcccccagcgcgcgctgctgccagatctcctccgagcgcaccgcctgcgccaccagcatatacagcccgtcacacacagtcttgccgcatagccgccccaggcgcaaaaattctgtctgccgcgggttatagatcaggtccaccagcgcctcaaagcgttccaccaccgttctgtccaccggcgaaacgcccgtattggggtacatccccactggcgtgcagttgacaagaatgtcccccttgagggagggcagggccgcatactccatccattcgatgcccggctgttcaaacccgggctttttgtgcgcctggcggctgacaaggcacagcctttttacgccgtgatccagcaaatacgccaccaccgccttggctgcgccgcccgtacccagcacggccgccgttttgccctctgtctctatctggttgatggacagcatcttgccaaatccgtcgtaatcggtattgtccccgtaaaacttgccgcctcttagggcaatggtgttgaccgcgccaatcttttccgccgccggcgacagcacatccagctgccgcagcaccgtctgcttgtaggggatggtcacgttggcgcccttgtagccctcgtaccacagcttttgtacaatatgccctttgaaccgcgccgggatctccatcagcgtatagccggcctccaggtccagctcgccaaagaccgcctcatggatgcagggcgaaaggctgtgtgacagcttttcaccgatcaatgcgtattttttcattgcccgttccagccctttctctggcaacgccccagcagcaggtctgccaggcccagcgccatcacgctttccagcaccggcacagcgcgctgcacgatgcaggggtcatgccgcccctttactaccagcgtttcctcggttttccgctttaacgaaacggtgtgctgctctttggcgatggaagctgtcggcttgatgacaacgcggcacaccaccggcatgccgtttgtcagcccgcccagcacgccgccgttgtggttggtcgtggtctccacctgtccgtttttccagatgtacgggtcgttgcattgcgagccgtaccgggacgccatggcaaagcccaggccaaactccacgcccttgacagcgggcaccgaaaaaaacagatgcgccagcgtggactccaccgaatcgaaaaacggctcgcctacgccggccggcagcccaatggccgcgcattccacaatgccgcctacggaatcgcacgcggctttggccttggccaccgcctggcccatggcctcggccttgctcatatcaatcagcggcagcgtctgggctttccatgcttcaaactgcgcttttgtcaggtgctgcgctgtcatttccccatccgtcacatcgtggatgcgctggatatgtgcccccacatagatacccttttgcgccagcatctgcttgcagattgcgccgcaaaataccagcggcgcggtgatgcgcccggaaaaatgcccgccgcctctataatcgttgtatcctccgtagcgcatagcgcccggataatccgcatggccggggcgcactgtgtcgttaaggtctgcataatctccgctgcgcgtgtttgtattctctatcaccgcgcaaagcggcgtacccgtcgtatagccgttgaataccccgctgaggatcttgggcacgtccgcctccttcctcgtggtggacatcgcgttttgccccggcgcgcgccgcttcagctcgcgcgccacctcgtcccagtccaccgccaggccgctgggcaggccgtctaagacgatgccgatgcccgcgccatgcgattccccaaagatggatacgcgcagattttggccccattgcccgctcattggcagttccctcccagcatggtatagtcctcaaaaaagttcgggtaggatttggatacgcactcccagtcttcaatgaccaccgggccctccgcccttgtggcggcaatggccagcatcatggcgatgcggtggtccttatggctccagaccgtaccgcccgtaaaccgctctacgccttcgatttccaggctgtcctccttctccttgatgcgcgcgcccagctttgtcagctctgcaaagatcgcatgcagccggtcgcactccttgatgcgcagccgccttgcatttcgtattgtcgttgtgcccttgcacagcgccgccgccaccgaaaccaccggaatgatgtccgggcattgggaagcgtcgatgtccaccgcgtgcagcgcatcggcccggcagcacaccgtgccgtcctcctggcatacctctgcgcccatgcgctgtaaaatatccagcactgcgctgtctccctgcagcgaatcacgctttagatcctccacctgcacggcggagcccatggcgtcggcacacaggaaaaaggccgcctgggaaaaatctccctctacccggtaccgggttgcccggtatttctggccgcccggaatgataaagcgcctgtacgcctcgttttccacccggatgccgaaatccgccaacaccgagagcgtcatgtccacatagcttttggactccatgtgggtggtgatgatcagctcggaatcctcttccatcaacggcaggataaacagcagccccgtgatgaattgcgagctcacatccccccgcatggaaaatgtgcctgcgcgcagctgtccggatacttggaaatccagcagcgggccctgcgcttggtacgcaatcccctgctcatcgaatatcttggtatatacatccagcggccgcttgcccaaattgccctggcctatcaagcgcgcaccgtgcgccatcttcagggccaccgggatcaaaaaccgcagcgtagatccggattccttgcagtctatctccggcgtgccacccatcgcttgcccctgtctgatgccgtcgacaacaagcgcgccgccgcctatatcctcaatgcgtgcgcccaagcgccgcatgccctctatcgtcgccaaaatatcgtcggaaaacgcgatgttttccactgtgctgcgcccctctgccagcgccgcgcagatgatggcgcggtgcgccatgctcttggacggcggcaccttcacccggccggaaagccgggtcggctgtatcgttttctgccccatgggtctaccactccaaaaaagacggatcggtatccaccagaacacccttgcccagctgttccagcgccacgatcttcagcgtcttgcctaaattcttcttatccattgtaatcgcggacgcaatgcgcgtaaagtccgctttttcatcgcgcaccggcaggccgtattgccggcagaggctttcaatgcgcagggccgtgcccggctccgtcaagccgcggcgctcggtgcgctttgtcatctccaccatgccgatggccaccgcttcgccgtgggtatagtcctcatagccatggcatttttcaatggcatggccgatggtatgcccaaaattcagcagcatgcgcaggcccatatcgcgctcatcctgctctaccatctggcgcttgatatcgcagcataccgcgatgatatgctgcatgtgcgccgcggcctgctgcctggaggaaaagccctccagctcctcaaaaaacactgcattctggatacagccatatttgatgacctccgccatgccgtcgcggtaaaagcggtcgggcagcgtatccaggctgcgcgggtcgataagcaccgccttgggctggtaaaaagcacctaccaggttttttccctccggcaggtctacccctaccttgccgcctacggagctgtccacctgcgccaaaagcgaggtcggcacctgcacaaagggaatgccccttagataggttgcggccgcaaagccgcccagatcgccgatcacgccgccgcccaaggtcaaaagcaggtccttgcgcgtcagcttggcgtctgccatggcctggtatacctgggccatcgtcgtgtatgcctttgtcttttcgccgggcggcagcaccagctttttaggctggtaccccgcgctttccagagaccccatcaccttggctccatacagcgcatccacatgctcatccgtcaccacaaagacgcggccctccgggtatacgggctttatgccctgtgcaatgtccgccagcagccccggcgcaatgcggatgtcatagctgttttgccccaggtttacatgtagcttggtttccatgctgcgcctcgcttacaattcgcgtcctacggcgttggcaatgaccttcaattcctccaccagtgcagcgtaccggctcggtttgatggattgctgcccatcgcacagtgcgcaggccgggttgttgtgcacctcgatgatgagcccgtcggcccctaccgccacagccgccttagccagcggttctaccatccaccatttgcccgccgcatggctggggtccacgatgaccggcagatggctcaactttttcaccgccggaatggcgctcaagtcctgcgtgttgcgggtgtatgtctcaaaggtgcggatgccgcgttcgcacaggatgacgttttcattgccgcctgccagaatgtactctgcgctcatcagccattcctcaatcgtagcggacaggccgcgctttagcaggatgggctttctcgtatgccccagctcgcgcagcaaatcaaagttttgcatgttgcgcgcccctacctggattacatccacatcctctacaaagcgctcaatatcatgcggcgccatcagctctgttacgatgggcagccccgtttccttgcgggccagcttcaaaagctccagcccctcgtattttagtccctgaaacgcgtagggcgaggtacgcggcttgaacgcgccgccgcgcagaaacccagcgcccgccttttgcacttccttggcgatctccgtgatctgctcctccgattccaccgagcaggggccggccaccatcatcagctttttgccgcccaccgtgcgcccggcaatgtccagcaccgtgtcgtccgggtgaaacatcctatttgcctttttgaacggctcggctacatgtaccacacgctctacgttgcggttggcttcgatgcggctggggtctattttgctggtatcgcccaccaggcccaaaatggtcaagtccgtgccgtacaccgggtttacctctaccccttgcgccgtcaggctttccgccagcttgtcgatttccttttgctctgtcatgggtttcataatgacgatcatgtttggttcctccttacctaaaatcaaaaaaggagagctcatcaatgagctctcctttgctgtacctgcttataggggccttttttctcttcctaggccgccctctcttcacaaaaactcattgaatcgctatggtttgcgcaagtaaaatagccagcgctaaagctaaagccccggaagtaaaaataaaaggtatagttcattgccatattcagctgagccatgcttttattccgtccttcctttgtcaatttcgtttttgttttttacaagtatatgcctgaaggtgcgccttgtcaacaacttttttcggatattttcccaaaacaaaggggcaaaacgaggagcgcagtgccctttttgcggcccctgtttctccatcgaagacaaattcacaaaatccttaaaaaagccaaaacatttattgattctttcttcccaacaacggtataatacttttatcatctttatcattcattatggggggaaaccaatgcaatttttgaaaacgcataccggtatcgtgattctgtgcggtgttttggtcgtagcgctcatcggcgggctggcgtatgctttctccgacgccccggccgcgcccgtctctgaaacagatccttctgcctccgccacggatgagatagcgccggagattaccgatgcgccggacgaaacaccggaggaaatcgaccctgcgctggccagcgcctcgccggacgccaccaatccttccggccagcctgtggccgacgcttccaaaaggtatctggtgcgtgtatacatcggcagccagagcgtctgcgtctatgccttgaacgacgccggcaccgcctacgatcagctggtccgtaccatgatctgctctaccggcaccggcaacgccacgccgcgtggtacattcaaacttcagggcaagtaccgctggcattcgctgatgggcggcgtatacgggcagtattgcagccgtatcaccggcagcatcctgttccattcggtgccgtataatgtcaacaaaaaccccgccagtatgaatgaagtttcttatagcaaattggggcgcaaggcctcccacggctgcatccgtctgctgtgccgtgatgcgcagtggatctataacaatgtaccaagcaagtccactgtggaaatcgtaaacggcagcggcccgcgcggctcaaagcctgccttggccagcggcgcccagtaccgcggctgggacccgacagaccccgatcccaacaatccgtaccatggctatgt

SEQ ID NO: 4289 - DNA, 32759 bp, Unknown
  16S sequences of unknown bacteria
cacggctgggatgacaacggcgtattcaacttcgagggtggctgctacgctaaggttatcaacctggacaaagattctgagccggatatctacaacgcaatcaagagaaatgctcttcttgagaacgttactctggatgcagaaggcaagatcgatttcgctgacaagagcgtaaccgagaatacccgtgtatcttacccgatcaaccacattcagaacatcgtacgcccggtatcctctgcaccggcagctaagaacgtaatcttcctgtctgcagacgcattcggagtacttccgccggtatctatcctgacaaaggatcagacacagtactacttcctgtctggattcacagcaaagcttgctggtacagagcgcggaatcacagagccgacaccgaccttctccgcttgcttcggccaggcattcctggagctgcatccgaccaagtatgcagaagagcttgttaagaagatggaaaagagcggcgctaaggcttaccttgtaaacactggctggaacggaaccggcaagcgtatctccatcaaggatactcgtggaatcatcgacgctatcttaagcggagcaatcaacaatgcaccgaccaagacaatcccgcacttcaacttcgaagttccgaccgagcttccgggtgttgatccggcaatccttgacccgcgtgatacctacgctgatgcttccgagtgggagacaaaggcacaggatcttgcttccagattcgttaagaacttcgctaaatacgaaggcaacgcagctggtaaggctctggttgctgcaggtccgcaggcttaattcaaaccaaaccatacgcaggatcgattatgaacggcaggctgcttttgcagactgcagggaatatctgatgactgcataaaagaggcatcgcctcatccatccggatgggcgatgccttttctggtcaaagcggatattcgcaatccgcttcgctactcggttatacagactgcgaaaccaaaattccctgctccatcttcacgattcgctgtgcacactccgcaacagctgtatcatgcgtcaccatcaaaatgccgattcctttttggttcagttcctgaaacagctccattacgcgcctcgtattctcttcatcaagatttccggttggttcatctgcaaaaagatagcgtggatgattcacaagtgccctcgcaatcgccgcacgctgctgctgtccaccagatatctgtgacggtctttttttacgctcgctgaacaagccaaactctttcagcagcgtttccgcacgcttgttccgctcctttgccggcacacctgcatacccacagggcatcgcaacattatcgatcagattacgtgtctcatccagataaaatccctgaaacacaattccaatcttttccctcctgtatctggccagcgctcttgcatccagtgtatcaatccgaagaccgtcaacaaaaaccataccgtcatctgctctctctaaaccacataaaatattcatcaatgtacttttcccacatccggagcgtcccatcactgcgcagaactcccccggtgccagtgtaaaatccactccgcgcagtacctgcgtcctctcagaacctgtctgaaacgatttatgcaggttctttacctgtattccctgccgcgtattctctctttccatgtttttttcctctgcaactcttccttttccagaacatgcctgaagcacacattactctccctttagtatctgtacgtatgatagttttccttcccatcttccggaaataacacataccgcagctaagattccaattatcacaccggacgtaattacattgctcactgaaaaatactgaagcggtgtgatcggaagcatttcgtttatattgatgcaccacgctgccagcagacctggcaccaacgcaagtccaaacagcgttccaagttccgccgccgtctctgccatcagatatttttccgtcgttcccatcgcgtatgcgattgcctttactctccttctctgatgaagcagcaccagcaaaaggccgatcagactgccgccaacaagcagcagcgccgaaaacgaaatacggagccagtaaaacgcagtccagtccagctcttctttctgcgattcaagttctgcatagtgatccaccatttcgtaagagaaattactgttttgcgcctgcagtttcagcagtacctcttctgctccatttttcatttgctgctgatcagcgcctcccactttcagtgtgcactgacaattggtattttcctgactcaggtccagcccgctcatccactcaatcggaaaaatgacacaattcttcagccagacatgcgaagtttcatcgctgtatacatccagcatagttgtttccagctctttccctctgttctcgtctgtcagtctttgaaggctccctctgaaaattccaagctgtattgtgcctgttttccagtccgccttaaatttccagtttccaacctccccgttttttattccattctgtgcacgttgtatctctttctccgcctcttcccctgcatagaccgtatttttttgacgtttctctccgaacatttcctcatacagacgatcattcagaaaaaccagtgtccactgcgccgtttcttcccagttctcaccgaaaaaggcattatcatatacccacgccgcaaaggaaatttccagctttccggcaaagcttctctccaactcccggtactgtgcatagctcaccggcacatatgcttcctcccatgaatctcccgtccaatgatagcgcagcatcggctcttctgctcccatcgcctgttccgccttttctacaagtgcccggcttgtcagaagacgattgacacaaagattcagaagtatcactccaagcagcagttccagccagatcaccagatactgttttctataataaaaaagctgatgaaaaatgcgttccgcaaaatatttcatacgtctcccttcagaatcggaatcagtgcctgctttccaatcatccgctcccacagtatgcccgtaacaaacagccagactgcgctcccggcaatccctacaattccaaccaccggaagcggcagttctctgctcattccatgcatacttccaaaaagtatcggataaagcggcacatttactgcacaggccaggagatacagcacttccatgcgaagtgcatattcccagaaaagctctttttccttcgctcctattgcctgacgcactgccagttgcttttgctcctgcatcagcatgcctccatttactgaaaccaaactgatcatcgtaaaaatcagcatcgcaattccggtcgtcagccgctcttttgcaatgcgctctactgattgcagatatactgcctcctgttctgtgccagtcagcactccgattacagaatccatttccagtagtacgccgttaactgcctccggtgccgtcggctcaaaaaaacgataaagtccctgaaactgtgcctcttttccgtctgccagcgccgccagtgctttataggaaatggcaatgcttccatacaacttcggagccttcaaaatgcctgccaccgtaaaggatttgcctgcgatctgaatctcatctcctggacagattccatttcgatagagcagatcacagttatcacatacatagcaaggttctccttttcccgaccactctttttccgggtctgctccatccagaacctgataaccattcagcttccagaagtttttgctacatccctgcacatagggttctccattccacttcttccattgtacctcttcgctcaggaaggctgaaattccaatctgttcgctttcttttttcaatttctgtctctgctgtgcttctatctcagaggtctccgcttcactgattcggtcctggtattccgcaacaatcagctgttccggtagctgataccttgaaagcgctgcttctgacatcaaatcccataccgtcgctcccatccaaaacggcactgccattccgatcgccatcacaaaaaagatcacaccgtgcagataccgaaatgccagggtatctttccatatattctccagatgaaagaaaatgctgtcccacatagattcctccgtcatttgtgaacataatagatctgattattttcctgatctgtcacgtaaaactgatcggaagtttctgctgcaaaacgcagtttgaggctgcttgttgggagctgagcaatcccttcctgtacctgtccgtcttcggaaaagcgatcaatccgcccaaaggagccggaaatcccataaatttcctttccaagtgccagcatatccgtcggttcatatttgtacggcagttctgctttctgcaccagctcttcatctgttacctcatacagataatttgtcccggtaatataaaccgatgaagttggtgataccttacagtattccagcatatccgcagcataaaaaacatcctcatataaaaacagacagccgcgaaactgtcctttcggagtcaccttttcgtcgcctgtatacaatcgtactcttgccgcgcttgtatcatatttatctgcgcttaccgcaatcctgcccgctccattcacctcaatgctgtaataatccccgtacccctgccggtccaacattgtaagtccgatctctcctgtgtacgttccgtccgtctttacaatctccgctctgctgctgcccgcatcgagtacataaagttcatcctgataaacggtaatatctgtcggatgtgaaaattctccttcccccattccaatttttccaaatgtccgcaccggattcagttccagatccgtcaccacaatcttgccatcctcataatcacaaatatagacctcgtctccatatacacacagcccggatggactgacaatcccgatttctgccgctgcaacgcgctccaccgtatacccgcctgtaatctccggaagtttatccggctcacgttcttcttcggctgcggatgcatggcatgaaagtgaaagtagaataaaggcaactggaagtataatatctaattttttcttcttcattttctttctccttttgcattatatttatgtaatactttttatcaaaacaaatatacacattaatgctgtgcatatatgtttcttttcaactaatgagtacatttttcgtaatttaatgaattgagtcttttaattatttgtatagatccgcatttcgaacaccttttggcacgataaatgataatcttgcagcctcccgttgagtttcttatatgtttcttatactcgccagttacatatgtatgggcacaagaaaccctgctattttgtatctctttcgtaaaagtcatttcttttccattattttctgtaaaaacaaaattccccattgaaaaatcatagttttcttcctctatgatttttccttcgttatccatccagtaaaaatcaccatctgaaacgcctgcaaactgatcactactctctaatccccctggcttctgatatccaatcgcagttgccgaacacaaaaataccgtaaccagcaccacaaccggaaaacattttttcttcttcgtaccatgaaatattctttcgattcttcgtttcaactgtttttctcctcccgtaagataatttttctctattacgatctcctgtttttttgtctccgtaaattttaccagaagttttgcatattcacctgcctcctcttttccgtgtaaagaatttacgacatattcatcgcacagttcttccaccgttttacagtattcatgcagcaaaagccacgccgccggattataccagtgcagcaataaaattactacgcaaacgcattttccaagtgtatccctgtttcgcacgtgtgttttttcatgcaggtctaccatctttttttcctgctgatcaagctcctcttccggaaaaataatccaccgctggaaaattccaattgtaaacgggcttttcacttttccatttttcaaatagctgatgtttcctgattttcctatcttttccgaatcattccaaagagttcttttcatcttttggtatcgatacacgtaaacaatacagaaagtgacaattcctgcaatccagagagccagaaataccagcttccaaattgctaccaatgtataattttcactctccaggttgtaaaccgccatgtatccaggcaatttcaggtaatggatttttcctttcggattttttaaaaaaagaaacgaaaagaccgaattcttcggcaatgcatacttccaatcctgaaatggcaggagaaaaaagagcattgataaccgaagaagacacatcttctgctttgctgcaaatggctttttccctgttccgaataccagataataaatcagcagcggtatactgtccgctacagacattgcaaacagcattctcataaattatcccttcagctgatcaatatagtccagcaattcttctttttccttttctgtaattttgctgtttcctgtaaaagccataataaaattggaaatgcgtccgccataagactcttccaaaatttcttctgcacacatctgctcataccttacctctgttatagctggataataaacggctttaccactgttcttttcttttgtaagaagccctttctttttcagccttaaaatgtttgtattgagcgtctgcttacaccagtccttctgtctgttctcgttaaaataatcgagcagctctgcgaacgtgcatttttcatcccttttccacaaatattccataatttccaactctgcgccagatatttttactcccatattcttgttttcctctgaactgtttcctgttttccacaatttgtattacttttttgtcatacttttatattaaatgctatatgctgttttgtcaagtcaacgtggatattcgccatccgctttactggcaggctgcttttgcagactgcagggaatatctgataactgcataaaagaggcatcgcctcatccatccggatgggcgatgcctttcctttactttacccttatattttctttactttaccattatattgttacgaatatccattttcagtacacaacaattgtcttaatctcaaacggcttcatctctaccgtcactgtatcgtcataaactgcaagctcctgctcctcttcctcaagcatattggtctgtgcagcgcgggtaaccgggcggccaaagatcagggtcgctttgctgcggcggttccagcactcatacatacggatgatcgtgccctcgccatcctctgccttcttgaccgtctcgatgatgacgttcggcgcatccacggataccagtgaatacgatttgggaaggctgccgccctcatttgtctttctgatgacctgatacggattgttcagcgcgtaagccttcgctaccgtgtcattttcctgccatcttcctacgtgcggacataaggaccacgtgaagctgtggtgttccttatcggcatccggattcgggaagatcgcagatttgagcatcgtcaggccgatccgtccgttgtgaatgtcgcagccgtacttgcagtcgttcagaacactcaggccgtagccgtcctcgcttaaatcaatccacttatgtgcgcagacctcaaagcgtgcgtcatcccaggatgtattgtaatgcgtcggtcgttttacattgccgtactggatctcatacgttgcctcatcggtatgcacgtctaccgggaaatagcagcgcagcagcacctgcttttcattccagtcgatctcattgcggatgtcgatctggtacagatcacggtaaaagctgatgtactgggtgacaacagaatccaggtagtgatgctcgatgcggatggtagcacggatcggtccctcttcctcgatcgtcatctctgctgcatcaccgatctcccatgccttctcggtgtaatagtggttgatatcccaggcatcgaagttgtgcgggcggtcctcatagctcatgatcacgtttccgcacttgccctccggcaaaagctcgcgctctgccttcttatcataaacgcttgtaaactgtcctttttcgttccaggttaccttgaagaacggcgtttctgcgccggacctgctgatcgtcaggctgctcttctcctctttcttttcgtccttataaacaagaatgccaaggcgctcctctgtgagaaggccatccttctctgcctctgccggtgtcagcaggccgattttttccacctcttcattcttcaccggatggaaggtacggtagcccttggacgggatgtctttgataattgcaagcatgccgttttcggatctctgcagcggaacaatctcctcaccatctaacagcatgcagtgctccagtccaagcggaagcaataccggcgcagcagcgctcttgctgttcggattgtagatcgtgatatcgccgatccggccatcgattctggcagtcaggttttccagtgccgcatccgtctgtgtgcggctcaccgaaaacagcttctcgtactcttcttttgactcgtcatagacctcgcggattgaagaccccggaaggatatcatggaactgattgcgcagcagcacagtccagagctttccaagctcttccttcgggtaaacatagccgcctgcctgctcagaaagcagtccgtaaagctccagatcctcacatgcaaactctgcgcggcggttgaattttttgtttctcgccatggatgtgtaggtgccgcggtgatactccagatacagctctccaacccagcgcggaagctcctcttttccctgtacgtgggaatcgagtgtctcgaagaagtggcgcgcagttgacattacagtctttggtgcgcccggaatgcctctggagagacgcttctgattctccagcatatcctttgtgactccgccgcctccgtctccatagccgtagctcatcagcacctcgcggttcagctccttctggctgtagcgctgccatccgcccatcgtctgggaggaattcagatagccgttgtacgtcgtaaaatgcgccgtctccacgccgtcctcaactgcgcctgcaccgtaatcgcgcgtcggaacgaaatgcgtcagtacctcggtgccgtcaattccttcccacaaaaacgtatcatacggcatcttgttgcgttcattccagctgatctttgtcgtcatgaaataatcgatgccgcatttcttcatgatctgcggaagtgctgcagaatagccgaatacatccggcagccacaggatcttgttgtccacaccgaattcctttttgaaaaatctcgtgccatagaggaactgacgtaccagtgcctcccctgaggaaagattgcagtccgcttcaagccacatgccgccttccgcttcccagcgtccctgtgcgatccgctccctgatctgctcgtagatctccggtgcatcctccttcacatactcatacagctgcggctggctcgacatgaaaatatattccgggtactgcttcatcaactccagcaccgtcgtaaagctccgctttgccttgtctctcgtcacgccgagcgtccactgccatgccacatcgatgtgcgtgtgtccaacacagtacacctccggcgcatccatcctgccacagtacttctgataaaattcctgctccagatctgctctcgccgccttcaggctctcaaaaaatgcttcggaatactccttccgaagatcgagcaggcgcagcgaatgatcgagtgcgcggatgatgagcgtgcggttctcgtttgactccggcaacacgcgtgccacctgatacggcacctccagatcgtaataatagccctcaatctccggctccaggatcttgatctcagaatccatatgaagggagaagttgttgtcgcctgagtaggcagaaagcaggattttgaactgttcaccgcctgcggcgcagtccgtcagcaggatctcccgatggttgacatccagtcccattcgcggctccccgttcacatacgcataaaactgcgggttcagcgcatcccactcgccctcttttccggtgcgcagctcgtatacgacctgcttgcccttccattcctgcggcacctgtacctctatctcaaaataaaaatactcccgatggccgccccacagatccttcgatggtaaacactcccaatctgtggtgtctatcgccttcggatccagtttttcacttcccgcttttttgtatcgataagtttcgatcggtcggatatcgcgataaatcagatttttcaggtctgtaatcagcttcccgacgtgttccttcattaaaaacatttattttcctcctgacttgttttttccggcactgtctgtccttgagctttctttttaagctttttctgcctgcaaaacgtttccgacaattctatgtttgtttctaccgttctgccaggccgtcatcctctacattttaaccgagtctccaagatagtcaattacaaattcacagaatacagaatttgcccaggaaaaccatggccttgtatactgctccggatcatccttgcatactgattcatgcatcagatctgtacctgcatctgcattacacaccatttccagtatcttttctttttcttcgcggctttcactcgtaagtccctgaacacacagagctatcatccatacgtagctgtgcggtgtatgcggactgccgattccctgcagggcacttccgctgtaataatatggattccactcacttaagatcacttctctcgtattcagataacgttctgcattttttttacaatatccgatatacggcatggcgagaaggcttggtatattggcatcatccataatgttgtactgtccataaccgtctacctcatatgcataaaattctttctggtgcccaggaacgattgcatactcctcgattgcttttcgtacctccacagaaaagctctctgcctctgccgcaaacgcttcatctgccagcacctcacgactgacctgtgccatttcagaaagaacgacactggccagcatatttgacggaatcaaatagccataggtacaggcatcatcgcttggccgaaagccggaccagatcaatccggttccgctctttacaagggcacccttgccgcccctggaaagcgtatctgtgtagacacagttcttccgttcaaaatagtacggggatttttcctcatgatactgctctgtccggaatacctccacaattctctttgccgcttttctccagctttcatcaaactgctctgtacagcccgtattcttccaaagctggtacgacagctgaaacgggaagcaaagggaatcaatttcatatttgcgttcccacagctccggcttcatttctgtgcggtcatcctgaaaaccatttccatttgcactttcattgaatgcattcgcatacggatcaatcaaaatgcattccatctggcgctttaccagatcacggattatctccagaatctccggttcttcttttgcaaacagcaaaaacggccgcagctggcaggacgaatcccggagccacatagccggaatatcaccggtgataacaaaaatttttccgttttcgtctcttttaatagttgtatccaatgtattggaaatacacttttcaaacatccgcgcgatcttatgctctgctccgaatgcttctctgactctttccatcattttttcaattgcttcatactgcttttctttcttcatcttctgtcctcacaactatatttatcataagcaaaaactctcttttcccatccgctgacagctatggataaaaatgaagttttgtccttcgcatcactcttgcaaggtaagtgacagctgctcatactctttgtgctgtctccggtcagcttcttcctctgtctttttatttccgttatccacaggaagctccggtgctttcaccagttccgcaagtgactctgggagatcctctgctttcagctgtcttacaagctcccgcatcctgatccgaatccccttttcccgctccagccagcacaatatttccaaaacaggagcttccgtttcaaatgcccgttctctttccgcctgcagctcactgtcttccatttgcaggccattactcctgcctgctactgcagaaattgcccgccggagaacctccgttgcaagcagaagctctgatactgctcccttttgcagagttcggatattttccgtttccggctcatgcgttccttcttttatccagaatacagatatttctttttcaaacagacggctgatagtttcttttatccgtgcacactgcccttcctccgcgcagatccatgccggaagcactcctgctcctgatatcctggcaatgatcttttgaagcagctccgcctccttcttttcaagtgagcaaagtaccagacgtctgctgttcactgcctgtgccagatcgtatgcatcgagaccgatatccactggcttcgcacttttttgatcctttatccacagcggccggtttacttttgcaccggcaatcaccggaatcacctcttccggatctgcgtcacgcaatacagtttccgaatccgacgtcagaataatctgaattccaagctcttcctgtatttttcgcaaggtatccatcagcttcagagaaagaagtccatccagtcctgcatccggacagtcgagcaataccacttcactcttttccggacaatagcgcagaattgcagccagaagctgcaaaatattcagcatcccacttccgcagttaccaaattccaggcgaaccgcatccgccgttcctttctcctgatattccgaaatcagataacgctctctgttctcatcaaactgcatctcgcagatctgaaatgcaaacgcttcctccatcagctgttccagatactgatatttctgaggcatctgctttttcagatcgagaatcatattgcgcaatgcagaagaactgccatcctgcgcgattcttgcttccattgctgccggaaacagccgctcttcctgcagctttacaccccgtccgccctgaagatacagcggcgctcttgcctgcagacgcggcgcacgaagctcctcctccggcgtcagcagcttcacatttatatttttaaacagctctcttacatgaagcttcaattcatttccacgttcatccgtcaactccagcatcgctccgctgttttcatcgtacgtggagctgttgcgggatatccgattgtaaaacagtcccgacagatcctcccgcgatacaaacggaagatcaaacaagtaacagcctgttccgcttaccttggactgcagtgttctccggtctaccgagagcagccgtccctcatgcagactgtgcagtgccagccagatggcctccagcacagccgtcttaccggcattgttcccgccggtcaggattgtaaacggacgcagctccagccgcgtctccttaaattttttaaatcgtatcaatctgattgaatcaatcaatgttttcctccgttttcacaccgaagttccagaaaggtggatacatacaactcctgctctgcttattgcactgcgttcatgaaatatcataagggggcggattgcgaatgtccgctttacgcaggggacttgctttactcggttaaattttctctctttttctgccaaatcgtccttttctgtttcattcggtcaaattttctgtttttaccattttataacaggctgcatgggaaaatcaatctttgaattgcaaaaaattattcagatcctcacagggtgctatgacaatcgatcagatgccagaaaaaagcagtgaaacacagaaatgtgcgccactgcttttttgttaatcaaagccgatctttgtaattctcttcgatgcctgcaggttcttctctataattattccacgtttttgagcgcctcatccatcggaacgcgacggatgcgccggtactcaagaagggcgacaacaaaataacttcctgctcctgccgcaaacatctgcacatagatcatgggatcgatccataaggtgatccagccggtcatacttgagagcatgatcgcgcggaacagaaatttcatcagggcacattcaaccggaaagctgagcagaatgcataccactaccacaattgaggttgacacaatgtacagcctgctgatctcaccatttgtgtagccgaggatcttcgtcatcgagatcgcctgtgcgttcttctcaatgatgatctttgacaacagatagatcaccaccacaaagatcagaattgcaaacccgttcatcagtcccatcatctttcccatcgatacatcgagctgtctcgatattttcgtcagggcatcaaggtcaagcaccgaaccgatgtatttttctttgatatcggtgatcggcgtatctgaaaaatagccgctgaaatactcatcgccgagatcgaatgtctcattgagctgctgctgtttcatgaatacacacagggacgcggtgtagtcgtaaatgcctgcaacctgaaatgaatacacatcatcctcgtatttctcttttaaggtgatcgtatcgccttcctttaacagatatttatcggcatatgccgaagaaacccacacaccatcctccgaaaaatctgcctgaatgtaactgctcttcggatctacaccatacagcaaaatctcctcactcttatatccatcctctgctgtgttcagttcgtatgcagaaaactgctccgcatcctcattgtcggtccttgtgccaagataaaaatcgagcagtgcgaacgcttcatcgatccggctgccgctcactgcactgactggaacactcaggatatactggtaattggcaagcagattttcctgcacttccttctgataatgatcaagtgtcgatggaagcagcaggccaaacatcaggatcaggtttgtgaacaggattccgatcagcagcacgatgtagttgcccacgttttgaaagatgacgcgcagacggaaccgctggaaaaaacggatccgggggcttaagtgtaccgccctgtgctgctttttgcctgagagatcacgccgcaggaatttgagcggcaagagattcagtttgtggcgcagcaccccgtaattcaccgccagcatgatcagaagcggcactacagtcgtcatcagaaatgcctctgcattccagatcgtgacatacgtcggcaggctgtagcttccataatacatggcagcgcacacatctttaaatatggtatagccaagtatgtttccaattacggcgccgattaaggtcaccaggatcggaagcgtcatgtagtggcgtaccagctcctgctttgtgtagccggatgccctcagcgtaccgatcacgcccgcttctttccggatcgtattactgatcgtaagcgcaaaaacaaatgccatgatcacgatcacaatataaagcagtaccgtcaccatcgcacggtcactgcccatgtcatcgcccgtaaaacgaatcgcctgattcagatactgcggcgtaaaatcttccagcgtgacgatttttccgattgctttcatcagatcctcggaacgttctttctcttctttttctgtcacgggcttctcgtcataaacccacgcgtaatcgtactgcagcagatcctggttcagctgcgcaaacccatccggtgtcacgactgccactccgaatttgattgaatcaaacatggaatcactgttgttctggaacagtgcgctgtaatcagaaagcgcgaccagtcccgtaattttccattcatggctgccccctgtcagcgtatctcccacagtcagagcattgttgtccgcgtacatgcggtcgattgcaatctcatccttttcctgcggcagctctcctttcatcaggcagaccaggtcaacatcctccctgtttttaaaaatacgcacggtacttccattgtccatctcattttcaatgtaaaaattctcgtagagtgtcacgccttccgcttctatcttttcccgctgtgaccggtgaatctcatcgtccgtacggaaatttccgtcctcaatgttatatttttcgaagctttcgttatacgcggtcatcatgctgccgtctgccacaagaaagccagacacaaaaccaatcgtggataccatcagaataaatactaccaggtattttccaatctcatcccgcagttcccgaagcacccgttttcgtaaaggatttttcatcatgtcctcctttaccattccagctctgcagctggaattttatgttcattgcggtagtttttgcggatcataccatctcgcagccgcacaacacggtctgccatatccttgatcgcatcgttgtgcgtgaccataatgatcgtatttccatatttttgattaaccgtctcaatcagcttcagaatttccttcgaagtgttgtaatcaagtgcacccgtcggctcatcgcacagcaggatatccggatttttcacgatcgcacggccgattgccgttctctgctgctgaccgccggagagctgattcggcagcttccgctgatgctcataaatacccagggtatgcaaaagctcgtccacatcaagcggacggtcactcagatatgcgcctacctccacattttcccgcaccgtcagattcgggatcaggttgtacatctgaaaaatatagcccagatgcttcctgcggtaaagtgacagttttttttccgtcatattttccagccgttccccgtcgatcgcgatactgccttcatcggctccgtcgattcccccaatgatattcaaaagggtggatttcccggaaccggatggtcccagtaatacacagaattctcctctttctacctccagatccagtccccgcaacacttctacacggctctcacctgcgccgaacgatttccggatcccctgcatcgtcaaaaacataactccttcctcctgtccgcaacatatgttctgctgcagttttctgttttcggagcgcgccggaaactgctttctgcatacacccttttgtgttccgcacacttacagctgatgaatgcttcccctgcctccggacatactcatatataggtaacaaactttggttacctatatattatgtatgttagttgagtcttactattttgtcaagattcgaattcgttttcgtacggtttttcggatttttttacacctgctgtcccggcggatatttcgttttatccttctttttctcttatttatcgcttcttttatcgcttctttttcccttctttttctcttctttttcatcttcttttttctcttctttttcctcttgacatttcaaaatacaatgtataaaattgctacgtttacgcttgtttccacagcaagaccactgctcagatctgcagtcttttccggaattgctgtcttattttacagaaaggaaaaaacatcatgcagttagatatgacaaaaggaaagccgatgccggtaattctgcgctttaccttccctctcatgatcggaaatatgtttcagcagctctacaacatggctgatacgatcattgtcggccgctatgtcggcgctgatgcgctcgccgcagttggctcaaccggcacgatcatgtttcttattaccggattttcccagggaattacctccggattttccattcgtgtttcgcagcgctatggtgcccgcgatacggaagccgttcgtcactcagtcgcaaacggtatttttctgtccgttctctcttccctgattctgacgatcctgtgtcttctcagtatgaagccgctgctgaccattatgaacacgccggagaacattttcgatgctgcttatacttatattattgcaatcagcatcggcatcgcagcaaatgtcttttacaacctgttttccgcatatctgcgagcggtcggaaacagtcagattcctctgttctttcttatattttctgcctgtctcaatgtcgtacttgatcttttatttatcataggactccaaatgggcgtagccggagctgcatgggcaaccaacctggctcaggccatctccgctatcctgtgcggtctgtatatctggctgcgcgttccggatctgaaacctgctccacgccactggcgaccgtcccgtcttacttcgcgtcagcagcttgctgccggaatcccgatggcctttcagtttgccattaccgcttccggtaccatgatcatgcagtctgcaatcaacctgttcggctcagaagctgtcgcagcctttactgcctccggaaagcttatggtccttctgacgcagggcatggtcgcaatgggacagacaatggcaacgtacggcggccagaattatgggtgcggtgacatcaaacggatcaaagccggcgtccgcgctgctctgattgcagattccatctattcggtttcgatggccgtactggtttattttctgctccgtccatgcctcggcctgtttttttccggcgatgttgatgtgaatgcactgctgccatgggcaaaaacctacagctatctctgcattgctttctatgtcccgttgtgcacgatctacatcttccgaaatatcatgcagggatgcggctacagcttcctgccgatgatgggcggtgttgcagagcttcttgcacgccttgtcgtttcgatcgccgccatgaagcttttaagctatccaatggcctgcgctgccgatccggctgcatgggtcgctgcggcggcatttaccggtatttcctatctgtacgtgataaagaaaattgagcgtgaagcagcagaacatgcttcagcgcgcagccgcacggcatgactcagaatatactatctgcccctgccaaagcgcgcaaatctcaaaaaaggaatcgatttctcgattccttttttcagccattccttaccactttaaacgcaagtagcgaagcggattgcaaatgtccgctttactcacggttttatgatattttacgaggttttctctgtaaacgtcaaatgtcttccatcccttataaatcaagcattcccgccactttccagtccttacttctcatcaaccacctggaagatatagaatttcagataataggactcatctgctgcccacaggatcgggtgatccggggactgggtgcggaattcgacctgacggagacgcttatgcgcggatctggctgcctcgcgcacggtctttgccagaagctcctgcgtcatgaaatgcgagcaggaacatgtcgccagatagccgccgtcttttacaagcttcaggcccttgatattgatctcacggtagcctttgattgcatttttcgtcgcctctcgggatttcgtaaatgcaggcggatccagaatcacgacatcgaacttttctttccgctctgccagcagcggcagctcatcaaatacgttggcacaccggaaatgcaccgtatcctccagatgattccgccttgcgttttcctgcgcctggtggatcgcataatctgaaatatccaatcctgtcacctcttccgcccccgcaatgccggcatttaacgcaaatgttcccatatgcgtaaagcagtcgagcactcgcttccctttgcagagccgctgaattgcaagccggttgtacttctgatcgaggaaaaatccggtcttttgaccattcactacatccaccagataacgaactccgttttctgtgatctccacattcgtatcaaacggctctccgatgaactctttcaccttcggcagaccttccttttttcgctcatttgcatcgctgcgctcatacacaccgcgcactgcaatgccatcctccgccagcgcttccttcaaaagctccacaatcgtcttcttaaaggcttccatgccaagcgccaggcattctacgaccaatacatcctcatatttatcgattaccagaccgggtaaaaaatctgcctccccgaaaatcacacggcaggatgacgtatcaacggtcgttttccggtactcccacgcattttgcacccgcattttcaaaaactcgcggtcgatctcctgatcgatgctgcgcgtcatcatccgaatccggatttttgaattgcgatttatgaatccccttccaagcggatacccgtcaaaatcatgcaccagcacaatatcgccattttccgcgcttcccatcacactctcgatctcattgtcaaaaatccatgcgccgcctgctttcagggtgcggccctccccttttttcaatgtggctactgccatactcatatgcattcctctccatattgatacttctctatattgatacttctcagaactgatgtccatagtaatgcattgaccgcaaattgtcaatcgttctgcggtatatggtcggtctgtgccactcctgatacaggcaagtcctgcccttccgtttattgcgctgcacactcccacaggagtcctgcccttctgtttattgctctgcacattcccacaggagtcctgcccttctgtttattgctccacacactcccacaggagtcctgcccttctgtttattgctccgcatactcccacaggagtcttgcttgccttgccggttaatttctggcagtaatttttttgacccacgcggtcacctcgccgggataatcggcacggccgtgcggctcgtcccatacgatctcataatccacgtcagtctttccggtctgcatcagctttaaggcaagcgtaagtgtgatcatcagcgacgtatccgaatccttcgaaccaacccggatccggtagtgcggtgccagcgtattttccggccttccgatatagttcattggattaataaggaagcggcgcttttccaactccgagtcttcgagaacctccttatatccctttaaatattttgcgctttcccccggaaattctgtccgaaattcttccatgatcggcgcaagatacggatcgaaatgcatcagatcacactctgatgtgccaaactcctggttctctgcctgaatcagattcagatcatcaaatgcaggacacagctttaatctgcgatggtatgttttctgcatgtctttcagccctgtgatcatagcatgatcatcggtccacgagagccagctgctcttatccagtcctggaatccagctttcgccaacagatcgatgctcttcaaataatgtttcataatcaccggtgatataggcggccggagtgacacaagcctgcaggttcgcttcattcgcattttccttctgcaccaaagccatctcctgactttctgtatgttgtttctgcatcgcgaattcactctgcgtcgaagccatctcctgactttctgtatgttgtttctgcatcgcgaattcactctgcgatttttcaaccgactctgtctggccttccaaaatagttctcctgcgaatccttgctccggaaagcgtctctcctgtttccagtcttttcagatattttgcggctgactgctccagttttttcatcaggtaagcataaccgcttccttccagctctttccctatggtaatcgcagctccggtctttggatccgtaagtccaaggctgttaaaatactcaggatatgcatccgccatccggtcagacagcgctttctcatacggcgtcagattgccttccccaaatccgacaaacggcattcccatataatgtgtttctccacgaaacagccactcataagcaagatctgcatgatcaaggtcaatgatcggacagtagcactgtgccgcaaatatatcatccgtctcatccatgaaggctcctgctcttttcagctcttcctcataatccctgctgtttccggttgcgccaagcaatgtactcattgctccgcctgcgctgatccctaccgaaactattttttccatatcgccaggaatcacacccgcaaaatgccgaagaaaacgaatgcctgcttttagatccacaagtgaaagcggagattttccacatcgttttttatcgatattttcagaactgcgtccgcggcagccgcaggacacatatacgaaaccagcattcagaaaatcctttcccgcacttctgaaatcgtccagctcgaacggctccgcttcatggtatccggcaagtccattttcaaaaataacaggaaccgtccttgcgttaaatccattttcatcaatctgtcctgtcagttcaccgctctcagccagaaaatgctccggtacataaatattcatacactgttccgcaggtacctcagggttcctgcagtatgcagcccgctcccacagatagcaatgatgctcttccagatatttccatgggatttcagccgtgttatcgccaaatcgttgctttgttgtcgtgttcatagtgttatactccctttcctgtattactctcctgtattatttttctatgttatttttctgtgttacttttctgcattacttttctgtactttatgtttatgactctgttgcgatttccgacaattgtgtaacaagctcctgcgtcatctttctcactgcctcccgcacctccagaatctgacggtcgcaaatatcctccacatgaactccaccgctgcacacaactgtctttccggttcggatggctgtctcctcagcaactgctctgcagatttcttcatccttatgtccaattcgattcatgacggaagaagtactgctgcgctttccgtttcctttcagtgaggcacgcggcgaggacaaaacaacacatcctatgtgcggtctgcttccaccccacagcagaatctgcagatcatccccgatctgctgtgcctgaatacagagtgtaccacacgaaagctttttatcgatttttatcaatgtatctgtttcctgtttttctccacagcggttttccacttcattttgtggaactccaggttctgaaatccccctccatggtacaaatttctcatattccagctgaaactgcagcagtacttttccgatcacatgatctacctgctcctccagagtctttgcgccattataaaatgtcagcatcggtggaacaattgcacagccaatagctgctgcctttttcaaattctttaaatgaacttttccaagcggcatttctcttggtaccagaactacttttcttccctccttcagacaaacatcagctgcccgctgaatcaggttttctgcatagccggatacaattcccgacagtgttttcatactgcagggaagaatgatcattccattggtcacaaacgacccacttgcaattattgcagcaagatcctcttctctgtaaacataatctgccagattgtacagcttagtaatctccctgtcacattccagattccaggtcagcctcgcgccctcgctgacgatcaaatgaatctcacactcctcctgatatctgagcgctctcagtaatatttcactcatctgtaccccggtggcaccggttactgctacaatgatccgcatttttcagtcctcttttcacaggctttccttttttgtctctgtcaccagtatatctgccagagttttggaatgcaattccgtttccagagcgttctattccgtattggaattctttttgaagttccaggcgctatccctgccggacacttttatatttctgtaactgttcagagccaacctccaaaatgctacgcatttcgtcggtgtggcgtatccgccaaataaaatttcaaaaacaggcttaaaaatgcaagcattttccgcctgttttatgaaattttgcctggctctgaacagttacatatttcttttttcagaaattcccagaatacatttactgctggatttccttttcggctttttcttcgcacaaataacagtcggctttcacacgtttctttcaatgcaatttttataattccatcttccttcttttctggaattgtccgatccatcagaagtgaaactccaagaccattcgccgtcattgccagaattgtgtcgattcgcactccctggtacgctatattcggctcaaatcctgctctgcgacacagcttctgtgcctttgaaaacagctctgtcttttcatccagtaaaaggaaggaccgatcttcaagctctctcaaagaaatctctgtccgctccgcaagaggatcgttctccggcagtacagctacaaatcgatcatatgccactgtgagcttttcatcacacgcttttccgtttctgttactgagcagttcttcctcctcatcaaccctctctcttgtataaatcacatcgcattttccatcttcaagattctgctccagctgccttttttccgtttccataatctgtactctaatctgcggatactgtgctttgaaacgtgcaatcagttccggcacatgatactgtacaaataccggaagcacctgaattcgcaggagctgctctaatccggagctttgctcctcaagaaccgctctcatctttttctcttcctgcagcagattttttacattcggtaaaattgcctttgctgccggtgtcagactgatttttctgtgtgaacggtcgatcagttctgctccaagttccttctccagcgccagaatctgttttgacacattgccctgtgttgtaaacatccgctctgccgtttccgaataattttctgtctctgccagatcaagcagaaattcaagtttcctgagttccatccaggtcgtgtcctctctttctctttctctttctttttccgttttcttcttccgttttcttctttcgtttttttcagcttcttcttcggctttctttttcagctttcttttttcaacctattccatttaagaataatataccacagatttcgaattgcttgtacctctttcctgcgctacactgttcctagagcgtgtctgaaaaatcatttccgcaatctgcaagccccactttgcagtatattttgccctcattcggttgacgtagcccgctacgccgccctcattcggataaaatctcccacaaactgggactcgcagctcacgaaaagcctttttcagacacgctctaaagcgatattcgactggaacgtagataagcattcccccacttcaagtgcgcggagtactaagtggtggatgggatgcttatgtcagtgggagttgaaagcggacttgtccgctttgttctataaaaacttcaaggaggtacttatgtcttttacacctgatctcacacactcacattcatcagaatactcagctgattctttctccagtacacaatctgcagcttcggatgataccgccgtctgcgatctccgttctgcactcgcgcttctgcgttccattccaggacagttgatcgaaacagatacagaaactgatccgatgggcgaactttccggcgtttaccgccatgtcggcgcaggcggaaccgtagcacgtccgacgaaagaaggtccggccatgcttttttgtaacgtaaaaggccacccgaatgctcctgttgtaatcggtcttctcgcaagccgcagacgagtcggatatctgcttggctgcgatccgaaacgacttggatttcttttaaaggaatccgttgcacatccagtgccgccagtcgtaattccaaacgaaaaagcaaaatgtcaggaagtcgttcatcttgcaactgatccggatttcgatctccgccgtcttatcccggcaccgaccaatactcccgaagatgccggtccttatattacgctcggtatgtgttatgccagcaatccgcaaaccggcgaatctgatgttacaattcatcgcatgtgcattcagtctcgtgacgaattgtcaattttcctgcagcctggtgcccgccacatcggatattttcgtgagcttgcggaagcaaagggggaatcccttccgatttcaatcagtattggtgtggatccggcgattgaaattgcctcttgctttgaaccaccgacaactccgcttggatatgatgagctgcaagcagccggtgcgatccgtcatcacccagtcgaactcgtacagtgtcttactgttaatgaacgtgcgatcgctcatgcggaatacgtcatcgaaggggaaattctgccaaatgtccgtgtccgcgaggatcaaaattcaaataccggaaaagccatgcctgaattccccggctattgcggtcctgcaaaccagtctcttccgatcatcaaggtaaaggccgtcacaacacgaaaaaatccaatcatgcagacctgtatcgggccaagcgaagaacacgtctccatggccgggattcctacagaagccagtattctttccatgctggaaaaagcctatcccggaaaagtaaaaaatgtatactgtgcttcacccggcggcggaaaatatattgcagtcattcaattctgcaaaactgtcccctcagacgaagggcgtcagcggcaggcagcacttctggccttctctgcttttgccgaactcaagcatgtattccttgttgatgaagatgtagactgctttgatatgaatgatgtgatgtgggctatgacgacacgttttcaggcagatatcgatctgattccgcttccgggcgtacagtgccatccgctcgacccttcaaacagcccagaatacaatcccctcatccgtactcatggaatcgcctgcaaagccatcttcgactgcaccgtcccgttcgatcagaaggagcggtttgcacgcgcaaaatttatggatgtagatccacgaaaatgggtaccggaatccttgctttgacccacatcaaacaagacaagttccattctgatcgtggttatgaaacatcatagatggtacgtacctgcctgcaaaatctcgtaagaaattctgtttatgaggtgggtttcctcatctccctgcaaccagcgacattgattacgaatatccaaattaaaacagggggcagcagaaattttttcatttttctgctgcccccgttttttatatacgtttcattaagtaactgatctgccgacattctgtcttgaacaagcaatgatgcaaattgcaaatatccgctttgacttactgattcgccttatagatctccagcgcgatctccgccatcgtccgctcataagccgtcacatcggtttcatttccgcagaaacatacaacaaacggatgctctgcaaacacaatgccacagtcgtgtgtaataccgctatcctctccggtcttatgtgcgatcgccggaccgcccatcggtttgatgtaaaatggaattttatgattcagacgctgatttttcaggatctcaatcatctttgcgcttgccttttcactgatcagtgttccacgatacatcttttccagaagaagtcctgcttccttggcactaatgtaattctcaagcccctgagccgctttttcggaatcaaacattttccgcttcagaaccgtcttttcaaaaccaagcgagcgaatctgcgcgttaattgcatcgatgccaagcagatcgatcatcacgttcgtcgccgtgttgtcgcttagaatgatcatcagcgtaatcagatccataaccgtcacctgcacattatcatgcatgtagttgagggctccgcaggacggcacgcagtctgcgcgttttaccgtaatcatcgcatccgggttcagttttcctgcttcaattctcgcgaatgcctcagtcatcacaaaaagtttgattacactggccgccatcaacggctgatctgcctgatactcggcggtatcctcactgtccagggaacgataataaaaactgattttgcccggcagcttttttaatttctcaattgtctctttttcccagtttttcatgcttctttcctccttttttcactctgcccagttcatttttctaactaaatgataattttaagtcagatattcctgtttcactcccataaacttttcaagattatgcttaccacgctttccttcattgacagctctaacttttccccggatacttcctggacaggtcgatttttatcttcctacagaaaacaggttcctgaaatttcaggaacctgtaaactttattcggtcttcaattgattaaaccagctcaagaactacttccatagctccgtcacccttacgctgaccgatcttaacgattcttgtgtaaccaccgttacgatctgcgtacttcggagcgatctcgtcaaacagctttgctgtcagatcgatctcttttgtatttttcttcttgcctgctgcttccttcggaacctcagtaaccgggtacagcactttcagcatctgacgacgagcgtgcagtctgctcggctgatccttcttgatttccttctgaacttcatcgtatacggtaactttctttccgtctactacttcttttactctcttgccgtcagcatctttacgtgcaacctttgcagtaacggtaacggtgtcgaaattgtctttctctcttactgccattgcaataagaccctcggcaattttacgaacttccttcgccttctgctcagtagtaacgatcttgcctctgtagatcagagcggttacctggtttctgagcagagcctttctctgatcagctgttctgctgagttttctatatcctgccattttaaatttcctccatttcggaacgcctggacacgctcttcggtcttactgcccagccgctgtagtccttttactgctgttcatcgctcggattcagtgaaagtccaagctctttcagcttgcccaatacttcctcaagggacttacgaccaaggttacgtaccttcatcatatcctcagaagttctgttgcaaagctcttctacggtattgatgcctgcacgcttcagacagttgaaagaacgaacggaaagctccagctcatcgatgttcatctcaagaactttttccttctcgttgtcttccttctcgatcatgacttctgcagacttcgcattctcagaaagatcaatgaagagacctaaatgtgcgctcaatacttttgctgcaaggctgactgcctcatccggagccagtgttgcatttgtgtatacgtccagcgtcagcttatcgtagtcggtaacctgacccacacgggtattctcaatggtgaggttgacacgctctaccggtgtgtagattgcatcgactgcgatcacaccgatcggcatatccggtgtcttacccttgtctgcgctgatgtatccgcgtcccttggtgatcgtaagctccatgtagagcttgctgtctgcaccgccattcagatgtgcaataacctgatccggattcatgatctcgatatcctgatccacctgaatgtcagctgcggttacggtaccttcgccttcaaactcgatgtatgcgacctttgcctcattcgtctcgctgttgtttttgatcgccagcgatttgatattcataataatttctgtaacgtcttcttttacgccaggaatagagctgaactcatgaagcacgccctcgatcttaacctggcttacagcagcacccggcagggaagaaagcataattcttctcagggaatttccaagggttgtgccatagcctctctcgagtggttcaactacaaatcttccaaagcgtttatcttctgacatttctgcaatttcaatttttggtttgttgaaatcgaacactattcaggccctcctttgggtttgcttatggttgagggtgacgttaagcttacttagaatacaactcgacgataagcacttcgttaaccggaacatcgattacttctctcttcggaagttcttttacagttcccttcagtgcttcctgatctacttctacccactccggaaccagtcttcctgcggttacttccagaatgtctttgtatctctgagagcctttgcacttctctttgatttcgatcacatcgccagccttaataaggtaagacgggatgtttacctgcttgccgtttacaagaacatgcttgtgatctacgatctgacgagcctcttttcttgttcttgcaagacccatacggaatactacgttgtccagtctgctctccagaatggtcatcaggttctcacctgtctgtccctgcattctgtcggctttcttgtagtagttacggaacggcttctcaagtacgccgtaaatgaatttcgctttctgcttttcacgaagctgaaggccatactcgcttaccttacggtttgcgcgctttaactctctgttggattttttatcaattcctaaataaatcggatcaagaccaagtgatctgcatctcttcagaaccggaactctatttactgccatgttatttgacctccctcattagactcttctgcgttttggcggacggcatccgttgtgcggtaccggcgttacgtcgcggatacttactacttcaagaccatttgcagaaagtgcacgaattgctgcttctcttcctgatcccggtcccttaacgaatacgtcaactgttttcagaccatgtactaatgctgcctttgttgcagtttctgcagccatctgtgctgcatacggagtagatttccttgaacctctgaatccaagaccaccggcacttgcccatgataatgcatttccctgtgcatccgtcagtgtaacgattgtgttattgaaggatgactggatatgtgcctgtccacgttcaacgtttttcttaacgcgcttttttgtcacttttttggtaactttcttagctgctgccatatctaaactaacctactttcttcataattgtctgacatccgcttatccaaaaagcagatgaatcatgcgctcttttgcgctccttcagtattatttcttcttgttcgctacagttctcttcggaccctttctggttcttgcgttggtctttgtcttctgaccacgaaccggaaggccttttctgtgacggatacctctgtagcatccgatctcctgcagtctcttgatgttgagggctgtctctcttctgagatcaccttctactgtgaactgctcatcgatgatgtcacggattctcgcaacttcctcatctgttaaatctctgacacgtgtgtccggatttacattcgctgcagccagaatcttgtttgagcttgttctaccgattccgtagatataggtcaaaccgatttctgcacgtttttctcttggtaagtctacaccagcaatacgagccatgtaattgttcctccattttctttattgtctctaactggggcagtaagcgctgcccagccgcagcacacctgcggcctttccaacccattaagctgtgaatcgctcataaatgatcattcttgcaggacattctgccttcgcgaacagcggtttcacgcgaagccgtttactgtctcaatcctgggtcggtattaaaagccaatatcgcaacgaaataaaatccaactttcttaattcaatctatataattaaaagaattgtcttctcatttattccatcgttatattgaaaattttgacgaatggtaacccatcgtcctttccgccgattttgaaaattaaccctgtctctgtttgtgcttcgggttctcgcagatgatccggatgctgccctttctcttaatgaccttgcacttctcacagatcggttttactgatgatctaaccttcatttggttaatcctcctttcaccatttgttctctgcttcttgaacttttgggcataaaaagacacagagatagtgtctctccaaaagctcgatctatagtataacacctgtttttggaaaatgcaagcgttttttcactgtttttcgggattttatactttttcacctgcctgttttcacgataaacgccgcacaggactttcagatcccacgcggcgttcatttcttatttgttctattgttttatcagccttatttatctctccagataattctgcccttagtcagatcgtacggtgaaagttcgatcgttaccttgtcacccggaagaatacggatgaaattcatacgcagctttccgctgatgtgtgccagcactacgtgcttgttctccagttctacacggaacatcgcattcggaagcttctcgagtacggttccttctacttcaatcgcatctgtctttgacatatagacctcctgtgctcttctttctatttttacagggatttcgattcatttctgaatcttacttttttattctccctgtatccctggtttctgccagtattcaaacagattgctttttatatctcattgtttgaattctgactcttttcgtagagttttatggcttttcgcagatgtgcgtccagctcgatcgactgcagctgcgctgccacctcctgtggaagatgacggatcagctgtacatgtatcttttttttctttttcggtgattcgagccctctgcgctttccatccgccagccagaagtattcgttttcttctgccagcaccacgtacagagtgtctttgtcgtgacccgctcttgaaacagccagcagttctgcttgcagaggagcgccgctttccagtctggccttcagcgattcgctaatctgcgtggtacggggatgtgcattgatctgtttcttcatgcccgctccttactctgccagtgtcaggatctccggctcaccgtctgtgatcaggatcgtattctcataatgtgccgcaaggcttccgtcctctgtcactaccgtccagtcatcatccagccattctacatccggacgtccggctgtaatcatcggctcaatcgcaaatgtcattccttttacaatacgaaggcctctgtttctctgacggaaattcggaatctgcggatcctcgtgtaatgcatgcccgataccatgaccaaccagatcgcggacaacaccgt

SEQ ID NO: 4290 - DNA, 9844 bp, Unknown
  16S sequences of unknown bacteria
cgccttggccgccgcgaccccgacgccatccttgcgcagctcgtgcatgaccaggtcgcggccgcgcacctggtcgtcgttgcgcgtgatcttggagaagtacgcgcggatcttggagcgggcgcgcggcgacttgacgatgccgagccagtcgcgcgacggcgttgcgtttttctgcgtcaggatctcgacgcggtcgcccgtctgcagcgtgtacgtgagcggcacgatcgagccgttgaccttagctccgatgcagtggttgcccacctcggtgtggatcgcgtaggcaaagtcgagcggcgtcgaggacgcgcgcaggctgatgacctcgcctttgggcgtgaagcagaagacctcgctctcgaacaggtcgaccttgagcgactccatgaactcgtgggggtcgttggtctcctgctgccagtcgagcatctcgcgcagccacgtgagcttctggtcgaagtccaccgcatcgcgcttcttggagccgccgccttccttgtagcgccagtgcgcggcgatgccgtactcgttcatgcggtgcatctgctcggtgcggatctgaatctcgagcgggcgcgctgcaggtcccatgaccgtcgtgtgcagcgactggtacatgttgaacttgggcatcgcgatgtagtccttgaagcgtccgggaatcgggtgccacaggttgtgcacggccccgagcgagctgtagcactggggaatcgtgtcgacgatgatgcgcaggccgatcaggtcgtagatctcggagaagtccttgtcctttttcgacatcttctggtatatggagtacaggtgcttgggcctgcccgagatctttgcgtcctgcagcccgacctcgtcgagctctgcgcgcagggcgtccatggcttcggcgaggtacttctcgcgcgcctcgcgcgtctcgctcaccatcttctggacctgctggtactttgcgggctcgaggtagaagaacgacaggtcctcgagctcccacttgatcgagctcatgcccaggcggttggcgagcggcgcgtagatctccatcgtctcgcgcgccttgaagatgcgccggtcttctttgagcgccatgagggtgcgcatgttgtgcagacggtctgccagcttgacgacgatgacgcgaatgtcgcggctcatggccacgagcatcttgcgaagcgtgcgaacctgtgcctcgctcaaggactcgacctcgatcttgttgatcttcgtgacgccgtcgacgagctcggcaaccgtcgcgttgaagcgtttggtcaggtcgtccaaggtgacgtcggtgtcttcgaccgtgtcgtgcagaagcgccgcgcacagcgtgtcgacgtccatgtgcagctcggagaggatgatggcaacttccaccgggtgcatgatgtagggctcgccgctcttgcggaactgcccgttgtgcgatttcttggcaaactcgtacgcatccgtgatcgtgcgcatctcgtctgggtccaggtactcggagaccttgtcgagcaagacgtcgaagcgatccgacttttcgggctggcgcacgctcttgtcaacgccggcaatatgctgttcctgcgcgctcatgagaaaactcctcaggctctacggattaagttgtatggacgtatcctagcgcagacggggacaatacgcgccgcgacgtagcctttctgcaagacggcataccgcgaacataccctttcacgcccccgtgaggtcttccgggtggcgtgggaggataggacgattgaagcgcttgagcaggtcgtcttcacttgccccaagggcccacttcttaaacgacgcaaagtcgtcgcgctcttcttgaccctcacggtagcgcacggagtcggaaagctccatatgctgcgggccctcgaccatgcggatcctgcgcgcgacgcttttccccttcgtctccagaaacccgagctcgcgaaagaccgagatcccgcacgagacggcggattcgtccaggttcgcgccccggaccaggcgccgcgcctgctcggcgagctctgcgttgctgacggcaaagtcatcctgcccgagggccgcggcttcctttgcctgagcgcgcagggccttgtacagcgcgatcatctgctcgcgcaaaggcgccgacgaggagaggatcttctcgttgatgcgcgcatcgccgtacgagtacagcaggtgcacggtggcatcgcgtccgtcgcggccggcgcggcccgacatctggttgaactcgatgtcgttgaacgggaggtggaacagcgccacgtgctcgacatcggggatgtcgatgccctcgccgaaggcactagtggacacgatgacctgcagctccccgacgcgaaaggcgttctcgatgcgcttgcggtctgccttggatagaccagcgttgtagaacgccacgcgacaggcgagctcgggcaggcgcttgcgcagcatgcgcgtgagcttcatggactgctcgcgcgagttgacgtaggcgatgcacttcccgccgctcgccgcgatgcgcgcgaggtagttctcgcggtcgcgcaggtcgcgcttgtcgtcgatgtgcaggttctcgcgcaccgtggggtcgagcacgacccgctcaatgccgagcgtggagcagatggagcgcgcctcttcgtctccggcggtcgcggtgacggcgagcacgagcgggttgcccaactcgtcgagcgtcttcgacagccccgcgtaggcagggcggttgccggcgcgcgacaggcccacgtggtgtgcctcgtcgacgaccacgaacccgacgcgtccggtgcgcgcgaagcgctctgcatggatggagaggaactccggcgtggtcaagagcacgtcgacgctgccatcggcaagcccgccgaagacgcgcgtgcgctcctcctcgtcgctttcgcccgtgagcacgcagacctgcaggccgaacttcgagaaggccgtctgcaggtggaaggcctggtctgccacgagcgcgcgcagcgggtacatgaagatgctcgccttgccctgcttgagggccgtccgggcggcatgcaggtggaagatgagggactttccgcgtcccgttgccatgatggtgagcgtcgagtgcccctgggcgaggttctcgagcgtctttgcctgggcagcgtgcagctgatgcgagccgatgagggcctcgcgcagcctgtcgtcgagctcgtctgccgcgacttcgccccaggcgtccttcgtctgcgcgagctggagctgggagccgctcgcatccgcttggctcgcctcgtcgaggtcgtctctgcgcacgacgatgttcacgccgtagctgcggtccacgatgcccggatcgcgcacgcccaacgggccgggagcacgcacatcgtcgtggcccgaggcatgcgcggggcctcccgtgactgccgagacggccgcgctgtagggcacgccctcgtccatgacggcggcgaggcgcttggcgagcctgcggttgaggaacccgagctgggtcccgtccagcagctcgactgcgatcgcgttcgcgtcgaactcgttgtagggctgccgcacgagcgagagctccacgccggcctcgatgctggagagcaccgcctggcggttctcgaacgtgactcccacgatcttggtgttgaagcgggccatctgcgtgatgccggcgtaatcgcccacgtcggtgatctcgagcgcgtgctcgaacagctcgtcgacgcgttggctgatctcggtcttgggctcgacggcgggggcatgcacgaagatgtcgtgggtcatgagcttggcggtgaagcggccctgccactcgtcgaccgtcggctcgaacaggatgtcgcacgcggagtcgcaggccacgagctcgtcgatgttgtcgacgccaaagtagatgccggcaaccctgctcacgccgtcggtggcgacgtagcgcaggtggttgccctgcttgcccacggcggcgcgcttttccatgaagacgtcgggcgcggcgagaaccggcacggggttgtcgttgccgaacggctgcaagaactcgagctcgttgaagcccgccacgtcgcactccgccagatcgaccacggcatcgaccatgcgcggcttggggcgcgcctgctcgccgagggcggtgacggcgttgcagagcctctcgcgcagctcgggcaacttagccgccggaagcgtgatgccgattgcggcggcgtgcccgccgaacttcgtgcagagatcctcgctcgaggagctgaccaggtcgaacaggttgatgtcgttgtaggtgcggcccgaaccgcgcgcctcgtcgccctcgatggtgaagatgatggtggggcgcttgtacttgcgcgcgatgcgcgacgcgacgatgcccttcacgccctcgtgccatccctcgcccccgacgacgatgaccggctcgtcgtggaactcggactgaagcgcctcctcgactccctcggtgagctcggactcgacctcgcgccgctggttgttgacggtctcgaggcgcgcggcgaggtgctcggcctcttcgagctcgtcgctcatgagcaggtcgagcgcaatggacgcgtcccccatgcgtcccgcggcgttcaggcgcgggatcagcgagaacgagagcttggtggaggtgacctcctcggggagcacgttgcagatggagcacagcgcgagcaggcacatgcgcggatgctcgttgatctttctgatgccgtcggcgacgagcgcgcggttctcgcccttcaagaccatgaggtcggcgacggtgcccagagcggcgatgtccgtgaactcgcgccacaggtccggctgcccgagccgtgcaccgagcaggcataaaagcttcaaggcaacgccgaccccggcgaggttgcgcgaggggttgtcttcctcgagcttggggtctgccacggggacgccctgcgggacatgcccgccgtcttcatggtggtcagtgatcgcgatgtcgagcccctgctcgagcgcccaggccacctcctcatcgcacgagatgccgcagtcgaccgtgatgatgaggtcggggttgtagcccatggcgcgggtgagcgccttttcggaaagcgcgtagccttcctcgtagcggtgcgggatgagccccacgacgtccgcgcccagcgcgcgcagcccgcgcagcgagacggtggtggcgctgacgccgtcgacgtcgaagtcgccgaagacgaggatcctcttgtgggcccggatggcggcctctactttgtcggcgacctcttccagccccgggatgatcttcgggtcgagccaatcgcggtcgagcgagggcgtcaggaactcgttggccgcctcgggcgtcgtgaagccgcgcgacacgagaacccgtgccgtcaaaggcaaaagaccgcagttgacgacgatgccgttaactgcggtctcatcgatatccggaatgcagaaacttcttgcttcgtcagtctttttcatgccactgattgtggcacaaacctgagacaaagttttccggccctacaaactattcatccgcgctcttgcccgccgaagcggcgtctggattatcgcctgttgcgggctgctgctccttgctaacagcgttagatgccttgagctgggacttctcgtccttgcgcgcctgcctggcgtccacgcgcgcctgcagaagcatctctttggtaaacgtcgactggacgacctcgtacgggtacttcttctcgagacgcgcgtactcgggctggcggcatttccacagcgtgtagatgggagccgagatggcgatcgtcgagtatacgccgatcagcatgccgcagaacatcgcgaaggcgaagtcgcgcagcgtgtcggtgcccaagatgagcatgagcaagacggggaggatcgacgtgattgacgtgttgagcgagcgcacgatgatctcgttgaccgagcggttggcgcaggtcttcatgctgcacttcatctgcggcgaggcgttcttgttgatgcggtggaacacgacgatcgtgtcgtagagcgagtagccgatgatggcgagcagggcggcgatgacgtcggacgtgacctccatgtggaagaacatgcccgcccaggcatagacgccgatgatgatgaacatgtcgtggaacagcgtgatgagcgcgacgacgcccatacgcggctcgcggtagcggatcgcgatgacgatcaggatgccgacgcacgacaggaggaaggccaggatggagctgccgatgacggatgcaccccagctcgcgccgatcgtctcgatctgcacgttcgtgccgttgatgccgagctggctttcgacgttcatcatgatctggttggcatcggtcgagacggtgttggtcgtcttgacgatgaagccggggttgccgctcgcgtcggtcgaggtctgaatggacgaaatctgcgattcgatgccgagcgagtctgccgcagacgagaaggcatctttgacctggtcttgcgtgatgtcgcccgtgttggtgatctggatggacgtgccacccgagaactcggtgcccaaggtgagcgcagagcccgtggtgacaaggctcacgacgaggccgatggcggccagcgctataaggattccggagaggatgaagccgtacttccagagtccgacgaaattgaattgcctatgcggacgcagagatttcatggttacctcccctcctttgcatggaacgcgccttcgttgacatcatcgccaatcccccagaaccctgggtgcttgcggatgacgcccgggccgagcagacgcatgatcgggccggagaagaggaacatgatgacgaggtcgcagatgatgccgagcgcaagcgtcaggccgaagccgcgcacatcgcccatggcgacgaagtacaagatgagggcggacacgagcgtgaccacgtcggcgtcgatcgaggtgaagatgccctcgtggacgcccgagaccgaagcgctcttgaccgacttgccctgcctgatctgctcgtggaagcattccatgatgagaatcgaggagtctgctgccatgccgatgttgacgatgatgcccgcgatgccggggagcgtgaggctgaaccacccgagctgcgacagccccgcgagaagccccaggtacacaaccgacatgatgatgatggacacggccggcagcaaaccgaggccgttgtagaacacgagcatccagatgatgacgagcgcaaggccgatgagcgccgccatgatgccggagaacagcgcgttttggccgagcgtcgggccgacggtgctcgcctgctcgatgtgcagcgagacgggcagcgagccggagttgatgatggtcttgagctggtttgcctcttcggccgtgtagttgcccgtgatctggacctggccgttggtgatggccgcctggacggcaggcgcgctttccaccacgccgtcgagcaggatggcgatctggccatgcgtgctcacgagctcggaggtgaccttggcgaactggctcgtgccctcggagtcgaggtcgaggttgacggcgtagctggcagagccctggggcctgcccaccgtgacgttggagacgctgtcgcccgtcatgaacgcggtgtagctgacgccggactccttgaggttcatgcccgtgagcccctgctggatgtaggtgcggacgttctcgtcttggatgtcgttgacgttgacgaactcgaggatgccctggctggacagcgtgtcgaggatggcctgggagttttcctgggcgccggggatctgcaccaggaaggagttgctcccctgctgctggaccgtcgccgccgaggcacccgacgcgttgacgcggttggtgatgacctgctgcgcctggttcatctggtcgctcgtgatggccgagccgtcgttggtggacgcgctcaggttgacggagacgccgccttggatgtcgaggcccatggtgatcttgtcctgcgggggatacagtaggacaagcgatgcgatgagcgccgcgaggatgacgacgagggcgacgacgctgcccttcttgcgcccgctgcgcacctcggcgggcgtgctgtgcgcgggcttgtcggcgcctctgcgcgggctgcgctcgacgcttgcaaggccctccttgcgcatcgcctcctgcttggccttggagcgcgctgcggccttggccttcttctcggaacgcctacgctgcttctccatttccttcttgccgcgcgccttgagcttttcagcctcgcggcgctgcttctcgagatacttgggatcgcttttcagggcttcctggcgagcacgctcgtcggcggccttctggcgcgcctgcgctgccatcttctggtagcgttcggcgtcgcgctgctgccgtgccctgtccttttcccgcttcttggcggctttctcgcgctctttcgcgagttccgcgttcatcttctcggcttgggcgcgacggcgctcctcaccggcagatgacttgttgttcttcgccatcaaaactcccggatatgactggcattattctttgccgtgaatagctgctgcgtattgtagcgcagcagtcacgtgctgcattctacagcagagattgctgttgaccgcagatgttgcccagaaaggagcggcggtgcaactcgcacggccccagctcgtgcagggcctcgatatgcgcggcggagccgtagcccttgttgctgtcgaagtggtaggcaggatagctttgcgcgtactcgaccatgagcgcatcgcgcgtgacctttgcgacgatgcttgccgcggcaatgcacgccgccttgccatcccccttgacgatggtcttctcgttggcatggaggtggatgggattgccgtcgacgagcaccgcgtccgcgccgctcccgttgccccgcgcggcgatgtcgcgctcgcaggcggcaagcgccctgcccatgcacacgcgaagcgatgcggccatgccgcaggcgtctatctcgtcgggagggatatggcatatgcccacccccaaggcgacctcgcgaatctgcgcggccagcgcctcgcggcgtttgggggacagcttcttggaatcgtcgatgccgacgacctgcggctcgtcggggagcgcaacggcagcgaccgtgagcgggccggcaagggcgccacggcccacctcgtcgatgccgacgacgacgccggggcctcccacctcccgcataaaagagtaaagctccgacgtgtggatacgccggagctcctcgcgctcttttctggtgacgccgatggcctagaagcccttctcgcggatgcgagcagccttgccgaccttgtcgcgcaggtagtagagctttgcacgacggacagcaccgtggcggacgacctcgatcttctcgatcttgggagagtacaccgggaaggtgcgctcgacgccgacgccgaaggaaatcttgcgaaccgtgaaggtctcgcggctggaagcgccctgacgacggatgacgtcgccctcgaagacctgaatacgctcgcggttgccctctttgatgcggtagtgaaccttgacgtgagagccagcatcaaactgcggaacttccttgatctgctgctgctcaattgcgcggatgtaatccattgttgagtcccttttctctagagatgcgatgcgtttcgcgtgcgggctcatccccacggaggaaacgacacaagcagacagaatacagcaacagcggcgcgtccgcaatggcaagctgagcttttttagaacaggtcgaacgggtccacgtccacggcgacgcgcacgtcttccgccgacttcttccgctttgccagcagaggcgaaaggatgctcgagatgtccgcgttgaccggcgccttgatgaggatgtgccagcggaagtagcctctcagcttgccg

SEQ ID NO: 4291 - DNA, 32759 bp, Unknown
  16S sequences of unknown bacteria
gacgacggtggggctcaaagagatcatcacctcacccgaatttaccaacgccaagtcttcggcgctcatgttcggcatgggaaagaacatcgaagggcgcgcgatctcgggcgatatcgccaagatgaaacaccttctcgttgccggctccaccggctcgggtaagagcgtctgccttaattcgctgatcatcagccttttgtataaatacagtcccgaggaattgcgcataatacttgtagaccccaaacaggtcgaattcaatatatacgataaattgcctcacctgatgatcaacgagatcatctacgagcctgccaaagttatcaccgttctcaactgggcgatcgccgaaatggagcgccgttattcgctctttaaagaaaagaccagaaagggaacgctcgtccgccaggtcgacgaatataatgcgagccttcttcccgaggaagagcggctgccgaagatcgtgctcatcgtcgacgaacttgccgatctgatgatggtcgccaaaaaggatatcgaggaccgcatccagcgcctgacgcaaaaatcgcgcgcggcgggtatccatctggtgctcgcgacgcagcgtccgtccgtcgacgtcattacgggtatcatcaaatccaaccttcccacgcgtgtggcgttcaaggtcgtgcaggaggtcgactcccgtaccattctcgattccacgggtgcggaaaaattgctcggctacggcgatatgctgtacaagacggacaccatgactatgcctgcgcgcgtgcagggcgcgtttttgagttcgcaggaagtgcaggacgtggtcgagttcgttaaggaacacaacgaggcgtactacgacgacgcggtcgcgacctatatcaacaacagcgagcgcggcgaatcgtcgggcggcgagggcagcgacgacagtgtggaagcggtgtatatcgaggcgctgcgttacgtcgtatccgtgggacaggcgtctatatccatgatccagcgcaaatgctcggtcggctatccgaaggcgggcaagatcgtcgagtggatggaaaacatgggttatatttccgcgttcgacggcgccaaatcgcgcaaagtgctcctttcgcaggaagaattcgacgcgaagtacggcgattttggaaactgatatgttagaaaacaaaaaattcgggctgatttctctcggctgcgataaaaacagggtggatgccgagcggcttttgggcgagatcaagagccgcggctacgccgtcaccgacgagatggaagatgcaaatatcctcatcgtaaatacctgcgcttttttgcagtctgcgcgcgaggaagcgctcgacaccgtgctggaatgcaacgcgctgcgcggaaaaaatctggaaaagatcgtcgtgagcggctgtctacccgaaaaatatgtggcagaactgttccctgcgctcacggaggcggacgttttcctgggctgttcggacagcgacaaactgttggaaagcctggaacgctcttattccgaggggcgtatcaacgcggtggggcaggggaaagagagcgccgcggagcgcgttctgaccacgcccgcacactatgcttatctgaagatcgcggacgggtgcgacaacttctgtacctactgtctgatccccaagatccgcggccgctaccgttcggagcctatggaaaaactcgtcgaagaggcgcagggattgggtgacgtttccgaactcattttagtcgcgcaggacaccacgcgctacggtacggatcatggcgaaagccgtttcgtcgagttgatccgaaaactttcctcactcgaaaatatccgcagtatccggcttttatactgctatcccgatcaaatcgacgacgcgttgatcgccgaactgaaaaataatcccaaactcatcaaatatctggatattccctttcagcacagcgaggatcgcattctgaaactgatgaaccgcaaggggagccgcgaagattaccttgcgcttttgaaaaaactgcgcgaaaacgtggagggcattgccgtccgttcgactttcatcgcgggttttcccacggaaacggaagaggaagcggccgcgctgggtatgtttttgaaagaggcgaaattgaccaactgcggctttttcgcctactcgcgcgaacccgatacggcggcgtaccgtttaaaggggcagatccctgcccgcgtaaaacagcgccgcgtgaaagaactttacggcgttcaggcggaaatatcgcgcgcgttcttacatactttgctcggaaaaaaactgtccgtcgtctgcgacggcatcgattacgaacgaaaatgtttcgtgggacgggcgtatttcagcgcgcccgagatcgacggcaaagtgtatttcaacgcgcccgaggcaacgcagggcgaaacgtacgaaattatcgtcacggactgcggcgattacgatctatttggtcaaacggaggattttcaagcatgaatttacccaataaaattacgatcagccgcatttgcatgattcccgtattcggcgcgatcttctttatcgatttttcctaccattattttgtgtccgcgctcgtctttatcgtcgccgcgtgtacggatttcgtcgacgggcatatcgcgcgcaaatacaatctcgtcaccaatctcggaaaatttctcgatcccatcgcggataaagtgctcgtttccacggcgctgatctttattttggtcaagcccgagatcctcaccgtgctgtgggggggctggacgctcgtctttgcgggcgtgtgcgtcgccgtgattctggcgcgcgagttgatcgtcagcggattccgcatggtagcggcgtccacgggactggtgctcgcggcggataaagtcggaaaattgaaaaccacgtttcaggatatcgccatcgccatgctgctcgcgggcgcgaatttcttcggtattgcggcagcgggcgagatcatcaatgcgatcggtatcgtctgcctcggcatcgccaccgttctcaccatctggtcgggcgtatcctatatcgtgaaaaacagggcggttttcagtcaatccgaatcatgaaaaacgcgtgtatcgttttaagaaatatcaaaaatcccttttacggcgatgaattcgagccgtgcgcgagggctctttcggagggggggtattttctcgacaagattttcattctgggcgaggacgaaccttccgcgttcgcgcagacgctcatcgaggcgaaaaactttttcgataacgtgtttatcgtcattcccgagcatatctttgccgaaagcaaggtgcgcgttttcgaagtgctcaaagcgaaactctgcgatgggaacgcgatctcgttggacgcgaagacggtttttttaatgcacgcaggcgagcgcggggcggccgagatccgctcggaatacatcgatttattagacgcgaagtactctgtaaaacatgataaaatggtcgtccgcacggtcggcgtgccgcaggacagattgcagaacgtcctgtccgactgcaagcgtatcagcggagagaaacttttatacaacgtgtatcagtgcgacggggaaatgcgtctggaacttttgtacgacagcaattccccgaaaatgctcatcgacgacgtgatgcgcgtcgccgtacaggggctcaacgattatatctacgcggtcgaagatacgccgctcaacgagcgcgtcttcgagatcctgaaactgaggggattaaaactcggaattgccgaatcctttacgggcggtggcgtcgcaaaaaaactcatcgaagtccccggcgtgagttccgtgcttttcgaaagcgtggttgcctacgacaatctcgccaaagaaaaacgtctgggcgtgcaaaaattcacgctcatgcaccacggcgcggtttctgacgaaacggcgtatgaaatggctgcgggacttctggcaggcggaaattgcaacgtatccgttgcgacgacgggcatcgcggggccgaaatcggataatacgaacaagcctgtgggactgtgttatatcgcagtagggcgcaaagaaaacgtgttcgtatataaatatatatttcacggcgatcgggaacaaatcacccgccgcgccgtcaatcaggcactgtttctgctttacaagcaaatcaaataaaaggaaaagaggtcatcaatgaacaacgacaaactgaaagcgctcgatcaggtgcttttgcagatcgaaaagcactacggcaaaggcgccatcatgaaattgggcgacgcggcgggaagcgtggatatcgaagtcattcccacgggttgtctttcgctggatatcgcgctcggtatcggcgggataccccgcggcaggatcgtggagatctacggccccgaatcttcgggtaagacgacggtcgctctgcacgccatcgcggaaacgcagaaggcgggcggaatcgccgcgttcgtggacgcggaacacgcgctcgatcccgtctatgcaaaaaaactcggcgtgaacctggacgatttgtacgtatcgcagcccgatacgggcgaacaggctctcgatattgccgatgcgctcgtgcgcagcggcgcggtggatctgatcgtcatcgactccgtggcggcgctcacgcccaaagcggagatcgaaggtgaaatgggcgattcgcacgtcggcttgcaggcgcgcctgatgtcgcaggcccttcgcaaattgacgggatttatcaataagagcaactgctgcgtcatcttcatcaaccagttgcgcgaaaaagtcggcgtcatgttcggcaaccccgaagtcacgcccggcggcaaagcattgaaattttacgcgagcgtgcgtatcgacgtgcgcaaagcggacgccctgaaagacgcagaggggatcatgggcaataagacgcgcgcgaaagtcgtgaaaaacaaacttgcgcctcccttcaagaccgcggaattcgatattctgtacggcgagggcatttcgcaggaaggctgcctcatcgatctgggtaccgcgtgcgacgtgatcacaaagagcggcgcatggttctcttatgaaggggaaaaagtggcgcagggccgcgaaaagatgcgcgattatctgaaaaacaatcccgaaaaagcgaaagagatcgaaaataagatccgcgcggtgtacaagcccgcggaagaaaaggaagaggaggagcccgaagaggctcccgaagaataaggatttatggaatacggatttgtgaaagtcgccgcggctacgcccgagatcagggttgccgatgcgaaatacaacgcggagcagatcatccgcctcatacgcgccgcggaaagcgagaacgtgcaactgctggtctttcccgaactgtgcgtcacgggctacacctgcggcgagttgttctcgcagagcgtcctcgtcgagggggcgaaagacgcgctcaaaaagatcgtagacgccacggcgggcacgaaaacgctcgtctttgtcggcgtgccgtatctcgcacacggcgcgctgtataactgcgcggcggcgatcagcgggggcaggctgcttgcgctcgttccaaagacgtatcttccgaattacgcggagttttacgaacgccgcaattttgtttccttcgacggcgcgatgcgcaccgtagagtgggaaggtcaaaccgtgcccttcggcgcgcgggtggtgtttcgtgccgccaaccagaagaattttaccgtttccgccgagatctgcgaagatctgtgggttcccgcgccgccatcggtttcgcacgcgcttgcaggcgcacatatcatcgtcaatctttccgccagcagcgaaacggcggggaaagcggattacaggcggttgctcgtcaaggcgcagtctgccaaaaccgtctgcggctacgtatatgcggatgcgggcgaaggggagagcacgaccgacctcgtcttttccggtcacgatctcatcgtcgaggatggggaaattctcgccgaaagcgcgctgtttcaaagcggactgacggtttcggagatcgacgtggataagatctgtttcgaacgccgccgcgtcaatactttttccgattcgcgcgcgccttccgattatgtagaggtttctttcgaaacgctcacggcgcccgcgcccttgaccagaaacatttccgcgcatcctttccttcccgaaaagaatgcggacgagcgcgccgaattgatcctgtccatgcaggcggcagggctgaaaaagcgcttgaaacatacgaacagcgccacggcagtcatcggcatctcgggcgggctggacagttctctcgccctcctcgtgaccgtgcgcgcttttcaggcgctcggcaaagatccgaaagatatcgtcgccgtcaccatgccgtgtttcgggacgacggataaaacgctgcaaaattctctgaaactgatggaagcgctcggcgtgacctcgcgcaccgtccccgtaaaggacgctgttttgcagcatttcaaagatatttcccacgatgaaaacaataaaaacacggcgtacgagaacgcgcaggcgagaatgcgcactttggtgctcatggatatcgcaaacgatgcaaacggcatcgtcatagggacgggcgatctgagcgaactggcgctcggttgggcgacgtacaacggcgaccatatgtcgatgtacggcgtcaacgcgtcggttccgaaaacgctcgtaagacatctgatcgcctacgaaggaaagcggctgggcggcgctgcgggggccgtgctcgaagatattctgcataccgagatcagccccgaacttcttccgcccgaagacggcaagatcgcgcagaagacggaggagttggtcggtccttacgaactgcacgacttttatctgtatcatgccgtccgctggggctttccgcccgaaaaggtgctgtatctcgcaaaggcggcgttcaaagaaaaatattccgacgatacgctccggaaatggctgaaaaatttttaccgccgtttcttctcgcagcagttcaagcgttcgtgcctgcccgacggggtaaagatcggttcggtgtctctgtcgccgcgcggggattggcgcatgccgtcggacgcggagtctcggctgtggctggaaaaactggaagaaaaaccttaaaaaaaacgatcggaccggcgggcgtgcgaaaaaaagcgcgtccgtcattttttattcgctccgaaactgttaatttaaaaaattacattgacttttctatgcgtttcatgtataataaatgagatataaaatcacacattttaaagcgtatttgtatcatttttttcattttaaatacaggaggcttttatggtaaccaaaacgataagctccctgtttcttgccggcacggttgaaattacggtcattgccgtactcgccgtcgcggttgtagcagttggtgtgctttgctttttcctcggccgccgcatgtacaagaatgcgaccgataaaaagttgggcgaagtcaatcaaagaatttcaaaaatgctcgaagacgccgaaggcgaatgcaaagcattaaaaaaggaagctatcttagaggcgaaggaacaggacttaaaactacgcaacgaatttgaacgtgacacaaaagaaaagaaaaacgaacttcaaaaactcgaacagagattgatccagaaagaggacaacctcgacaaaaaagaggacgccctgcaaaagaagaacgacgcactcgagcagcagcagaaaaatctcgttcgccaggaaggcgaagtcaaaaagatgcaggaaaagatcaatcatcagcacgatctgatgattcaggaactggaaaaagtcgcccagctcacaaaggatgaggcgaagcggcttctgaccgaaaacattatggacgagacccgtcacgacgtggctctgcaagtgcgcaacatcgagcagcaggccaaggacgaggcggacacaaatgcgaaaaaaatcatcagcctcgccattcagaagtgcgcgagcgaccacgcttcggagatcaccgtatccgtcgtacctcttcccaacgacgatatgaaagcgaggatcatcggcagggaaggaagaaatatccgcgcgctggaaaacgccacgggtatcgaactcatcatcgacgatacgcccgaagtcgtcattctttcgggctttgaccccgtccgccgcgaagtggcgaggatctctttggaaaaactcatcggcgacggcaggatccatcccgccaggatcgaagagacggtggaaaaggtcaaaaaagaaatggaccagcagatcaaggaaaacggcgagagcgccatgttcgaagtcggtattttcggtctgcaccccgagatcatcaaacttttggggcggctcaaatacaggaccagttacggccagaacgtatataaacattccatcgaagtcgcgcaacttgcgggcatgatggcggcggaactggggctggacgtcaatcttgccaaacgggcgggacttctgcacgatatcggaaaagcggtcgaccacgaacaggaaggcacgcacattcagatcggcgcggatatcgccaaaaaatataaagagagcaataacgtcatcaacgcgatacaggcgcaccacggcgacgtggagcccaagaccatcgaggcggtgttggtacaggcagccgacgcgatctcgggcgcaaggcccggcgcaaggcgcgaaacgagcaccaactacgtcaagcgtctggaacaactcgaaggcatcgcgtcgggattcaaaggcgtggataaatgctacgcgattcaggcggggcgcgaagtgcgcgtcatcgtcaaacccgaacagatcgacgatgcgcagactctcttcctcgccaaggatatcgccaagaagatcgagcaggaactcgaatatcccgggcagatcaaagtcaacgtcatccgcgaattccgcagcgtggagtttgcaaaataatttttgtttccgaaaggggacggcaggatatgccgtccctttttttatgctttcgcgtcatagtcgcgcttgtccgcacatataataaggcattgaggaggacaagttatgttggattttttaaatcaaaaatacatagacgcgctgtcctatctcaacgaaaagtacttgtacgaactgcgtcttcgggcgggcaaacccgtcgtggtcaactataaggggaaatattcgtacctgtgcgaaagggggctgagcgaaacggcggcgggttctctgaccgcggcgtgcgcggaattggaagagatcgtctttcgcgcgagcgagttttccgtgtattcggtcacggaacaactgcggcagggatttttgacgggaaacttaggcgagcggatcgggcttgcgggcgcgtttgtctacgaggacggcaaaacttttacggtcaaggagatcacttcgctcaatatccgtattccgcacgaagtgctcggctgcgcggataccgtttacgcccgatgcttgcaaaacggcttgcaaaatattctgctgatctccgcgccggggcggggcaagacgaccattctgcgcgatctttccaggcagatctgccaaaaacagatcgtcaacgtgctcatcaacgacgagcgcaacgagatcgccgccgcctcgcgcgactttacgctcgatacgggggcgttctgcgacgtggtccgctattcctataaacgggacgcgttgaccgcggcggtgcgcgcgatgcgtcccgacgtgatcattaccgacgagatcgcgggtgccgaggatatcgcggcggtcatcgactgcgcgagaagcggcgtgcacgtcatcgcaagcgcgcatatgaaggatatcggcagcctccgctcttcggagattttcagatcgctgctgacggaaggcatattcgaacgctacgtcgcgttggatttcgacgagatcggcaaagttgcggccatttacgacgcggcgctgcaatgcgtgtatcggggctgatatgctgaaaatattcttatgcgtcgcgttggtggcgctgtgttcccttgcggggttcgcgctcacgcggaaatataaacttcggaaaactttcatgtacgatctgcacaacttcaacgagcggttcatcggagaggtgagttatacgcgtattccgctttcggcatttttcgataagtatgaatacggaacggattttacggccgtactcgcggagatcaaagcgaagaatttcaagcccgtccgcatcgaatttccctatctgacagaaacggaaaaacggctcgcgcaggattatttttccatgataggcaaaagcgacgcaaaatcgcaggggaattatctgggcgccgtgcgcgcggaactggaaaaggaaaagacggattcggaggcggaatataaaaaatatttcgcgctttataccaagctcggctttttgttcgggctgatcgtagccattttactcgtttaggaggaaagcatggatatcagtatcattttcaaattagcagcggtcggtatcgtcatcaccatcgtgtgtcaggtcctgaaaaaatcggagagggaagacatcgcaacgctggtcagcctcgcggggctgatcatcgtcatgaccgtcgtcatcggcatggtggcggatttattcgattcgatcaaaagtatcttcgatttgttctgagccatggagttggcgaaaatcatcggcgtcggtctggtcacggcaattgcggcgctcattttaaaatcttccaagcccgaactcgcttttgccgtgactattgcgggcggcgtcatcatcctcattttcgcgctggatatgctcggcgcgtctttgcggatctttacggacattgccgaaaagacgggcatagaccaatctctcgtcaagattattttaaagatcgtggcgatcggctatctggtcgagttcagtgctggcatcgtggaagatttcggcagtaaaagcatcgcggacaagctggttctggcgggaaagatcatcatatttaccgtttccattcccatcattcagagcctgatcacgcttatcggcaatattttggagctgatatgaagaaaagaagaaaactccgcctgctcgtcgtcgccgtcctttttatatttctgctcttggcgttttcgcccgtcgcggcttttgccgaagattccgacaacggcagcggactagcggagagtatcgacgaacttttgggaaaactcgatttggaggaactggaacaatacctgaaaacgctgaccgacgaagaaaaagattttttcggaaagggttcaatcacagataaaatttcttccatcgtcagcggcgatttccgcatggattacgacagttttttagcggcgatcggcggtctcgttttcggcggcgtgaaagatatgctcccggtgttcgccgtcatctgcgcgatcgcgatcctgtgcggtctgctgcatatgtttcaatcgtcgttcatgagcgcgggaacctccaaactgatttatttcgtcggctatgccgccatactcgtattgattctcacctcgatgatcgacgtcgtgggcgactgttacggcgctgtccgatcgatgcagaaacagatgcaggcagtctttccgattcttttgacgctcatcgcgacgagcggggggagtgtttccgtagcggtatatcagcccgctgtcgtgtttttgagcgagatcatcgtcaatatcatctctactgtggtgcttcccgtcgctgtcatgctcgtcgttatctgcatggtgggaaacatgagcgaggaaataaaactcaacaactttgccgctctcttcaagagtatcaacaaatgggttttgggcatttctcttaccgcctttacggtctttctgacggtgcagggcattacctcggcaacgtacgacgggctgtcgtttaaagccgccaaatatgccatcagcaattccgtgccgatcatcggcggttttttgagcggcggtttcgatctgatgatcgcgggcagcgtcctcatcaaaaacgcgctcggctcatgcagtttgctgctgctcgtgtccgcgattttggtaccgttcgtgcagttggtcgttttcagtctctttctgaaactgaccgccgcagtcacggaacccgtcggagacggcaagatcagcggctttctgacctcgctctccggcacggtcaactatttcatcgcgggcattctggcggtcgcgttcatgtacttcattacgctgctgctattgatctgttcgtccaacacactcttttgaggaaacaatcgtgagcgcatatatattgagtatctgcggcgcggtcattctgtcggcgctcgtcaccatcatcatgcccgaggggaagatcggaaaattcatcaacggagtcctgaaaatactatgcgtgtttatcatgctcgttcccttggtaaattgggtttcggatctgaaattcgaagggaaaggggaagggaatgaaaccgaggtttctctggatgaagattacctcgattactttttcgggaaacaggcggagagtttatcggaggaactgaaaaagattgtcgaaaaagagttttccataaaggttttgatcgtaaccgattgggaatgcgcggattatgcgttttcggtgcgaaaagttcaaataaatataaaagatttcggaatgaacggaaatgacgagcatataatgattatagagcaactccgaacgcgggtttccgagatcgcaaaaatcgataaggaggccgtaacggtgtatgaaggaacaggaaacgaagaaaggactgctggctaaattacaatcgggtaaacttttggaagtactcgtgatcttaattcttgcgatcattgtcataattatcctttataatgcattttataaagacaaagaggatgtgagcgcgagcggaaagggagattacgccacggagcaggaagcgaaactcgtttccgtgctctccaaactcgacggcgtgggcaaagtgcaggtaatgatcagccttgccgacgagggcgaaacggtgatcgcttacgaaaccgtgcaaaaagcggacggcacgatcgtcacgacgcccgtgctcgtaaacggcgaggtggtcgttctggaaaagcggccgcccgagattgcgggggtactgatcgtggcggaaggcgcggaaaatctggcggtcaggttcaacctgatcgacgccgcggcatccgttttaaatatcaacaaaagcataatcaaggtatacgaaaacggcagcggaaaataaaataaaggagtattgaaaaatgtcgagaacgaagaaaatcattatcatgtcaggacttgtgctgttgctcgccgtaacggcggtgttcaatttcgtgcttgcgggcgcgaccgagaacattgacggcgacggagtgaccactgcgaattatttcgcgacctacagaacggaacgggtgaccaagcgcaacgaagaactcttgcagttggatgccattctcgcctccgccgaagcggagagcaccgcctataccgaggcgatggcgatgaaactgaagatcgttgagatcatggaaaaagaacttttgctcgaaacgtacatcaaagcgcaggggtatgacgacgcggtcgtttccatcggtatggattccgacaacgtgaacgtgtttgtggacgcgaacgaactcaaatacgaggacttcttatccatctatacggtgctgacggaagaagcaggctgcaatcccgcgaacgtaaatattatgccgataaattcggaaagttaataaaaattactatctaaaacttgaaaaatatgttataatgtacataagaattccttggagtaaagaaaaaatggcgttttttaaacgagttccctccgacggacaaaagggtaaagtttcttataattccggtatcgtgagcggcatcgtgcaacttgccgtcgcggaagtggagggcgtggctcttcccgccaataaaaaaaggtggctcaaactgtatttcgaaaaagacggtatcatcgccgagatctccgtttcggtcgattacggatacaacgtgcccgacgtcgctttcaagatacagcagacggtcaaacacaacgtcgaggcgatgaccgaatacaaagtttccaaggtcaacgtacacgttgtgggcgtcgagttttcggaagaacatttttcggaataaaactgaacaaaaattcgtatttccccttaaagtttttaaggggaaatattggcttgtaaaaggaatacgttatgagaaccaacgcaagagaatgtgcgtacaaaattatttttgccaatttgtttcatcccgcggacgacgcaacgaaacgcagcgtctataaagcgaacgaactttccgaagaggacgccgcctttgccgacaaactcgtggacgaagtgtcggcgcatctgacggaactttgcgagatcatcgataaatacgcgatcggcttttcgaacgagcgtatgtttcccgcggacaagagcgcgttgcttttagcgctcgcggagatcaattatgtggaagacgtgcccgatatcgtggccgtggacgaggcggtagggctttccaagcgctattcgaccgaaaagagcacgggctttatcaacggcattcttgccgcctaccttgcaaacgaaaagaaaggaaattaaggtatgacgaaaatcatggacggaaaagcgctcgccgcaaaactgcgcgccgagttaaaggaaaaggtcgccgctcttaaagaaggcgggaaagagatcgggcttgccgtcgtcctcatcggggacgatcaggcgtctaaggtctatgtccgaaacaagatcaaaggctgtgaagaagtggggatccgctcgtattctttcaatcttcccgcttccgcctcgcagcgtgatgcggaaaatttagtgaaagagttggtcgcctcagataatatccacggcattctggtgcagttgcctctcccttcgcatctcgacgaacaggctattttaaaactgatcccgcccgccaaagacgtggacggtttctgtgcgcagaacgtgggcaatcttgccatgaaccgcgagaccatcgtcgcatgcacgcccttcggcgtcatgaaacttttagaggagtacggcgtcgatccccgcggcaagaacgcggtcgttctcggccgctccaatatcgtgggaaaacccatggcgatgctgcttttgaacgcggacgcgacggtgaccgtctgccacagcaagacgaagaatctgaaagaagtatgcgcgggtgcggatattttggtcgttgccatcggtagagcgaaattcgttaccgcggatatggtcaaagagggcgccgttgtcgtagacgtgggcatggaccgcgacgaaaacggaaaactctgcggcgacgtggatttcgaaagcgtgaaggacaaggtttccatgatcacgcccgtgccgggcggcgtgggaccgatgacgatcaccatgctattgtataacacgtatattactgcaatgagaggttgagtttggaaaaccaatttgaagagcggctgcgtttcttcgtcgatgaattcgaaaaaattttaaacgaatatctgggcggactgcaattgaaacccgacgttttaaatgaaagcgtgcgttacagtttacaggtcggcggcaagcgcgtccggcccgcgctcatgttcgcgtccgcgcagatgctgggtggaaagatcgcagatgtgtcgaactttgcgctcgcgttggaactgatccatacctattcgctgatacacgacgatctgcccgccatggacaacgacgatttccgccgcggaaagccgtccaatcataaggtgtacggggaagggcaggcgatccttgcgggcgacgcgcttttgaacgaggcgtaccgcatttgcttttcggaatgcggcaagggaaaatcgtatatcgcggcggcgcgcctgatctgcgaaaatgcaggcgtgacgggcatgatcgcgggacaagccgcagatctctattatcagggaaaagagggcgtcaacgatcaaattctgactttcatcatgcagaataagacggcgaaaatgctcacttccgcggtggtcgttcccgccgaagtgtacggtgtcgacgaaaatctcatcgcgatcttaaaagaattcggcaaaaatctcggcattttgttccagatcaccgacgatatactagacgtgacgggcgatttcgaaaaaatggggaagacgctcggcaaggatgcggatgacggcaaactctccgccgtatccctgtacggcatggaggcgagccgcgaaaaggcggactaccatttcgggctgtgcctgaaactgttggacgaactgccttacgaatgtacgttcctttccgaactgacccgctttgtccgcgagcggaatttatgatcatgagactggataaatatttaagcgagggcgctttctcttcccgcacaaaggctgcgcgggcaatcgaaaggggcctcgttcttttaaacggaaaaaccgcaaaaccttccgacgaggtgaaatcgtccgacgtcgtcaccgtattggaatcgaaagaaaactatgtttcggaaggcggtttcaagttggcgaaagccttttccgagttcggctcggacgttcgcggaaaagtttttgcggatatcggcgcgagtacgggcgggtttaccgacgtgttgctgcgaaacggcgcgcggcgcgtgtttgccgtggacgtgggcgaatgtcagctcgatgagaaactcgccgccgatccgcgcgttgcggtaatggacggcgtaaacgcgcgtgggttgcaaaagaatagtttttcggaagcgctcgacgggatcgttacggatatcagttttatttcgctgacctacgtactgcccgtattttcggaaattctcggcgagggcgggtgcgtatatgcgctcgttaaaccgcaattcgaatgcggccccgcggctttggataagcacggcatcgtcaaggatgcgaaacggcgccgcgcggcgatcggtaaaatttacgactgcgcgctgtcctgcggattggctcctttacaaatttgcacggctcccgaacacgaacgcaaaaacaaagaattcgtgatgtttttgcgaaaaggcgcaacgccttgcaaaaaggaaaaaatactatccatcgaaaaataaagagcacggcaagccgtgctcttttcgttattgtttatttctgttgtagttataaaagatcgcgaacagcggaatattgaaagcaaaaacgcaagggaagatcgcgtatttgagaatatccgtgaacgtaggcgaaatttcgttgtagacgatgatgagatatgcgatcaggcatatgatgagaacgaggttcgcaaagaggatcaggcttgcggaaacgtaggatttcgcctgcgtcttgcggctgtttctgccgtagccttttaaatagaggaacatgaacacgcccagcatgacgaaactcgctacaaacggcagaacgacgtatgccgcgtttgttttcaaaactcctttcaaacagatggatacgatggattcgatgatcgcgataataaaaacgtacagcgcggtcgtaaacagtacttttcccttgtcgtaagtattgcctaccgtctttacctgcgttctcgtgcgcgaactgtttgcggtgttgaccttgagcccgtcgttctccgccttttcgcggacatcgtagaactcgatggtactcgccgtattcgcggcgggcgcgtcgtaaacggggttttgaggctgtacgggcggctctgcggcggcagggcgcgcgttttggaacatggtctgctgcggctcgtaagcgggctgagcggcgctctcggcaacgcgctcttcgaaatacgattcgtcgtactcgctttcgtcgggatagcgctgagtgttgtcgtacaatttcgcgagtaactgtttgtagttgcgctcggcgggcgacttgttggaatataaaagttcgctggcgatcgcgttgttttcaagatacgtcgcgtcctgttcgggcgtctgcggcgccgtgtaggctgtttcgtttgtcggcaggtcggctggattttcgggcgcggcctcttcgcttgccgcgccgctttgacgctgttgctcgaaacgctgttgctgcgtcatgtgcgaatagtaatacgcggtcgcgtcgttttcttcgcccatcagtaatttgtaattctcgtggatgcgctgcttctcttcctccgataggggagagggctcgtccgcaggcggttcgctctgcgccgcgttctgttcgcgcatgaattcgttcacgtcggaatcgttcaaggttctcggctcgtccgcgggttcgggttcgattgctttttccgcagaaaacggctcgtctttcgccttttccgtaaaatcaaaactgagatcgatatcttcttcgtcttcgccttttacgccgcgtacgcgcgtggtcgattttttcagtaaattgaagtcaacggcggcaggggcgggtttattgaagtcgaattcccgctcggagatcaggttatcgatgaccgttctcgaatattcccattcggcgaggttgtgttcggcgacgattttacccttttcggtcaactgaaaatatttgcgtctgccgccgttggatacgccgccccaataagaagttacgaagtcctgtgtttccagccgtttgagcgcgctgtacagagtgggctgtttcagcgtatattgccccttgctcttttcttcgatttcattgatgatttcataaccgtatttgtccccgtcgtagagggtacgcaagataatcgtattgatgtgcccgcggatcagatcgctgctgatggaagcggattcgttattttctttttctttatcattcgagtcaaaatccatttatctcaacctcctgttggcagtattatacaatatatggcggattttgtcaatatattaagtaatatgtctgatataatttaaaggatggcaacgagatggggaaaaagaaagtctgtgcaagttatagactttttcttcgttttggtgtaaaataatggagagaaaaagaggagtgcaaaaccgatatccatgtcttacgaaaaatacgaatgcgagcataaactcgttacttccgacaccgactttaaacaagaattaaagccctccgcaatcttgaatttttttcaggaaacggcggggatcaatagcagtttgctgggagtcggctatcccgacctgcgcccgcgagggcttttttgggtgttatccaaaatttatgtggaattgaccgagccggtgtattacggcgatacggtgcagattgcgacctggccgcacgagccaaataaagccattttcgagcgcagttttctggtgtgtaaaaataacgaaccgcgcgtgcgcgcgctttcgcgttggtgtctgttggactctgtaacggggcggatcgcgcccgcttccgccatcaatcagaaaacggagcgattcattgaagaacgcgcagtggatttttgcgattggcgaattcctttcgttgaggacaaaatcgaaccttcgtttacgctgaaaatcgcgcattccgaatatgatttgaattatcacgtcaacaatatcaaatatgccgattatgtattcaactgtttttccatcgaagaactgactgcgcggcgcgtaaaaagttttcagatcaactacgtaaaacagacgcatgaaaaggacgttttgaatttttatcgggatcagatctcgaaggatgtctttatcgtagaaggcgtaaaaaacggtgaagaatcggtgatttcggcaagggtgtgttttgcttgattttgaatacactgtaatgcgctcgtccagacgttctctcgggattaccgttcgcgacggaagggtgatcgtccgcgtgccgatgcgtttttcaaacgagagcctttgtcggtttttaggcgaacacagcgactggatacaaaagaaacttgccgagcaggagcaatcgcgtcaacgctttgcttcggtaaaggaatatcgaacggttttaatttgcggcaccgaaaagaaattgttgctcggcgcggcgaaaaattccgaaagcaccgatactgtctgcttaaaagagattgcttatcttcgtaaatggctggaaaagaattattcctcctgcatcgaggaagacgtttaccgtctgggaaagaagatcggagttatgcctgaagacctgcaagtgcgggattttaaagcgaagtggggcagttgcgattcccgcggcctgatcaaaataaattggcgcatcctgtttttgcgcccgccgctacgtgaatatattttggtacacgaactctgtcacttaaagtttctcaaccattcggctgacttttgggcggaagtggaacagttttgcccttcataccgcaaattgaggaaagagttaaaagatatggcatttttgacggaattatatagataatttcaatatgaatagtactatgtgtgacataaacggaggtaaaggtatgaaaatcaatgttaaaccctctacggatctggcacccgtatcggtggttatggtgtcctgcggagatatggaagcatcggatatcgttacgattgcctggacgggtacggtgaattccgagccgccgatgctttcgatttccgtgcgccccagccgctattcttatgaattgatcagaaagacgggtgagtttgtcgtcaatctggttacgaaagagttgctgcccgtgtgcgacgggtgcggcgtagtgtcggggcgattggtggacaaattcgataagttttctttgacgaaagaggcgtgcgaaaaagtgcgcgctccccggatcgcggaaagtcccgttgctttggaatgtgtcgtgaaaaatacggtcgaactggggacgcacgtcatgtttgtagcggagatcgtcaatgtcgcggtttccgaaaaatatgtatccgataataagcgtctgtttattcccgacggtgatttggtcgcttacgtgcaaaatcgttatgtggcgacagggaaaactttgggaacctacggtttttctgtcaaaaaagagtagctgcggggtgcgcaaaaaagagaggcggaaagggtgtcaccattagggaaacaggcgtaggcgaaaaacttacgcctgttttcttgtcttttacggcaactctatttcgcctacgtgggttaaaaatattgttactgttcttttgaatccgttttcagtttttaccttttcggaaacaataattttgtctattaacaaccttactatttcgggagtaagtttatttatccttcccgttttgacgacaaccgaaacgaaattatttatatgtttttttctgtgaccataatcgttttacctccttgaaaatagtccacataaattttagtaaattattgaagaaagaaaatacgtttagggacagcgcactctcaattagtgataaaaacgatagcaaaatttcgataactaatgaaaatattagcgattttctatgttttatgattttgttttggacttctatgcgctcgtcaattttatcaatgaaccccgatattttttgttgctcctcgatggttgggtatgcaataaaaatctttttcagttcatctgcttgcaaatggactattgattttccttgtgctattcgtgcaatatcatattttctgaccgaatttatttgattgctcaaaaatgcaccgtctaaatcgctgcgaataacggttaaatcgccacccagtaaaatatcgtcgtaaggaatgcagactgacgtcgcaatatcttcggctgtttcaccggaacaaggaataattacatcgttctttttgctgtgaaataacgtagttggatctaaactcgttttgctttttattctttttgcgattgcggttttatacgtcgtataaagttctccatatagaatgcacggagttccgtcacttgacaaattttcctttgaaatgccgtatcctttacggaaagtgcagaccttgcccatagacgaaacttgccattcgccactgtaattaggaaatctcaaagttggaacttttgagaaattatgtttgttatgttccaactttgagattcaaatcgtttgagcaagaatgggaatattcaaccataggaaaatgctcaatatctcttgaatacggaatgaatgcggctgcggtaaaatatgacggaaaacataaatatatccgaataacagatatcgacgaagaaacgagtgcttttatacctaatccattatcttcacccgatggcgaatttgagcaaaaatatcttgtaaaagaaaacgacatcctttttgcaagaacaggtgcaagcgttggaaaaagttacttatataaccctaacgatggcgaattatatttcgcaggatttttgattcgcgcgagaataaaaccagaatataacggaactttcatttattatcaaaccaaaagcaaaaagtatgatagatgggttaaattaacgtctatgaggtcaggacaacccggcataaattcgcaagaatattcaggttacccgattgcaattacaggcaaagtcgaacaggataaaattgctgattttcttcaactgattgataatagaatcgctgtccaaaacaaaatcattagtgatttgaaggtcttaaagaaagaactttgtaacagatatttcaaatcggttcacaatgacacgtcgctaagttatgtaacacttaaagatattttgaccgaacgaaaggaatatcgtagtaaagacggcacatatactcacggaactttatcaaaggacggagtttcaccaaaaacagagcgatacgacagggattttctcgtcaaaaacgaagataagcagtataaagtaacgcactttaacgatatttgttataatccagcaaatttgaaatttggtgtgatatgtcgcaatacttatggcgatttaatattctcgccgatatatgtaacgtttgagatagccggtacgatgtatcccgcttatattgaactgtttttaacaaatgcaaattttataggcagaataagacgttacgagcaaggcactgtttatgagagaatggctgtatcaccggaagatttcttgtcgtatgaaacacgtatgccaacatacgaagaacaagtaaaatttgccgataaaatacagcgcattcaagacaaaatagagttgtttttattgaacccatcacccgaaatgtactctgcggatataaatctctctactccttgaaaattttgcataatattttccgtggaaacatagtttttcttttcggtagtcctacggattttcctatattcacaaacatttttaagagttgtactttgccaatttgttgtaaattcgttgaatctcaaagttggaacattaggggttgtttcgttgcttttcgacataattagtcctccaaaattccgagttctttcaggtatttgtcaatctccgcgtcaagacttgcacgttggctttcaaggtcttttatttccgccataacggctttgatatcaatttcttcttcctcttcaaacgtatcaacgtaacggggtatgttaaggttataatcgttactttcgatttcttccatagtcgcaacgtggcagaatttatctatatctttacgctcaacgtaggcatttacgatacggtcgatatcgtcagaagaaagttggttcatatttttgcccggcgtaaaatacttacttgcgtcgataaagcaaatgttgccggcgttgccgttacggtatttacgcaaaacaaggcagcatacgggaatacccgtgccgtggaaaaggtttgcgggtaaaccgattacggcatcgagaacgttcaaatcctttatcaaatatctgcggatagtatcttcacttccgccacggaacaaaacgccatgcggcagaagaaccgcaacacgtccgtcatcgtccatatgataaaccatatgttcaacaaaagcgaagtccgctttgcttgacggagcaagttttcctgcgccgctgaaacgtggatcgtcaaggaatgaagatgctgccgaccactttgccgagtagggcggatttgcaacctgaacggtaaatttagtcgtgccgaaattatccttttcaagtgtgttgtcgttgaaaagattgaagtattgatacggaacgtcgtgcattaacatattcatacgagcaaggttgtaagttgttccgttgagttcttgtccgtagtaatgacctacggcgtgttctgccgttccaccgtttgcgataactgctttgcgaacttccaaaagcatagaagccgagccgcaagtgggatcgcaaacacttttaacggatttcagtccgacggtcgcaagtttactgcaaagttcggaaacagcactcggcgtaaagaattcgccgccttttttaccgctgtcggaggcaaaaagaccaatcaaaatcatataagccgttccgagaacgtcaaattgagcgtcatcgtaggaaaactcaatatcgtttacacggtttataacctttgcaatttgctttgtgcggtcggaaacttctttgcccaagtctttatctttcaaatccattgcgtcgaaaataccgtcaaatgcggcttccgatttctgaccgagagtagattgctgaatagacgcgatggctttttcgagatagtcaaccgaaaatactttgccgtcgtatttacccgcaatcatattgacgatatagccgaaactatattcggggcgaatgatataaccaagactgtcaagagaatacttgtcgagagcggcaagcaattcttcattgttggacgcgagagcgtcggcataagtcataccgtcgtttttaagtatttcttccatatacttttccgtcttttcggaaaggaaacggtagaagatgatgccgagaatatagtccttaaatttgctcgcgtccatagtgccacgcaaatcgtttgcgatagcccaaagtttattagaaagttcctgtgcttgttgtttatgaagttggatatctgttgccataattttatactccttcggctctgaatttttcgtattgttctttaacaaattcttctatttcggacgacaatttgattgttttaagtagtccgtatcctttttgacttaatctctttcggatatcttcaagactgataacgtgcttgaactgatattccgacataaatgacttgatggtatcgacgtcaatgcctgtttcttctgcaaacatttcgatatccatattctgctgttgaacttcaaattcttcatatgcttttacgatatcttcgtccggcgaaagactgaaaaacttttccgtaacgaaacgctttaacatttcctgttttgctctcaatctctcgttgtctgaacgttcgatttctcgcaaaatcaagtcaatagagcgttttttctcgttttcgtctttcttgattacgtcttttaacaggttgagaatgtaaacgacgttgattttatccgtgcggataagttcgatattgaagtcgatatcgacaagcgttgttttgacgtttttctctctatctttctttgctaaatcgtagtagtagagataccacgatttatatcccaagaactcgtcttcgtccaggacgtttacaaggtcgttccactcgaattttgagaatgtttttaacgtagaaagcgtttgcgcaaccaaacggaaagcaacgataaactttctttggtcgtcttcggattgcaatctgcccgcaatatcgtaagacggtgcaatgttacgcaagactgcaactctgtcggcatattcggcaacgtaataatcgtaattttcaagcaaatatgcgttcggattgccatcgcccgaaaacagtttaagggctttgtcctgttcgtctttgatattacggaatgtgattatttgcccgtactgctttgtttctttgtaaatacggttcgtgcggctgtatgcctgaacgagagaatgccagaataaaggcttatccaaatataacgtgttaagcggctttgagtcaaatcccgttaagaacatatttacaacaagcaaaatatcaatctgcggaacttctttttgtttcaaacgtttcgcaatatccttgcggtaagcgtcgaacgtatcaagaccgaaagacagtttttctttaccgtcagagaacatttcgttgtagtccttgatacattgttccaaaaactctctcgattgcggtgtgtctgcgccttcgtccatatcttcgtttgccgcataagtaaatattgccgcaatcttcaagccttttttgttcaacttcttgaaagcagtgtaatacttttgaagaagcggtactgactgaattgcaaagagcgacgtataggtgtccgtaccgattttcgtatgcttttcgtaatgttccaaaatgttatttgtaacgagttcgatacgttgctggtcgctataaatgtttgaaatatcaatattgttacgcttgcagtattcttcgagattgaaattcggattattgctttgctcgtgaacgatacgccttaccgtcatatcggctgcgtttgtcgtaacaatgttgaatgtgttttgatattcgacagagaatttcaaaacgttgccgtctgcgatggcttccttgataagatacttatgcaaacaagcgtccatattgccggcgttaaatatatctgccgttgtctgacctgttgctcctttgttttcttcaaaaataggtgttcccgtaaagccgataaagttagcgttctggaaatttctgcgaatatcaccgtgcattttaccgaactgacttctatgacattcgtcgataacaaacacacattttttcgtcttgtacgtttccataatagccttatatttctcgttacgaagtgcgcaagcgagtttctgaatggtcgtaacaagcattttttcgccgctgtttttcaaacgcttaatgagttccgcggttgaatcggtgttatcgacgcaatcttcttcaaatgagttgtattcgtcaacggtctggtcgtccaagtctttgcggtcaaccaaaaagaaaactttatcaattctgccgttatcacggagaagggacgcgcacttgaaagaagtaagtgttttacctgaaccggttgtatgccaaacatagccgtttcggttttcttccaacacacgacgtaaaactgcttttgttgcgtaaatctgatacggacgcattacgataatgtttttcatcgtgtcttgtaacacggtatagtccgtcaataaagcagttatattgaatttcgtgaagaaatcgtccgtgaactcgttgagttgattgatacgctcgttatttgcgtccgtccagaagaaagcaagacttttcagtatggctttgtatgtaccgtccgcattcgtttcgttttcattagcaaaatatttcgtctgaatagagtttgaaacgacgaaacattgaatgaaatggaacagccctctgaacgaatacctacgatagcggtttatctgattgattgcttcgttgatttcaacaccggggcgtttcaattcaatctgaacaagcggtaaaccgttaatgagaaccgtaacgtcgtaacgatttttataaacgacttcattcatatggtctttatccatcgttacttggtgcgtaacctgataaatattgcggtctatgtctttcgacaaaaactcaatatagatacgcttgccgttgtctaattccaaaacctgcttatcgcgcaaaatttttgccgactcgtaaacggttttgttttcaatttgtgtgcgaagtctgtcaaattcagcaatcgacagttctgcaacgcctttgcccttgatgatttcttctttattgaactcttcaagttgtgtcttgaagttcagcataacttcggtgtagttctttaattcgacatatttgtaaccgatagtccctaatctttcaataaagagattttcaacttcatactcgcttatcgccattttgcaactccttttcaaatattttcattaactgttgtgttaaaatgtccgtttttttcgtttctattgaatgtgtcagtctatcccgctgccgtttcagttcgcttatcttaccgattgttcgttgcgtttcgataggtagtagcgttacttcaaaacttttcagcatacttaacggaataatagatacggcggttgtggcttgttttaacttttttaattgtttaagtgccgctgtattattgttgataaaccaacataaatagtagggatcaacttccgacatatcatttattcgtataatagcaagatttgaaagaatgagtttgtcagcacgatttctttcaatcacgattgctttgcccgaactcaatccgacaactacgtcgtattcttttgttaaagaatacgtcccgattttatcgccttgaacggttatatattttgcgataggcaaatcgtctgaaacgttaacaatgtagttaagttcttgcattgtaatcgtttcaatggattgacctgttgtaacttctattcgtgtcggaatgttaccttgaattatatttgcgagagattgtagttccacttgacacacatccttttttgaaatttacataaatatcataccacaagaaaattgatttgtcaaggacttttaatgttaaaattttgaaatttaattaaatttcctttttgcgacgctatttagcataacaaaagactcgaagttgtgaaacttcgagtcttttgccacttgcaggtgtccccattaaattaattgattattttataatccctaatggggacacgaaaaaagcctctctttttttaatcaagaatatcgtccagaattttatcgtaattttgtttgctttttgtgtagacggtagggagtacgacgctcttgccgtatacgagatcgccttcggagtttttcacgtaaggggtcactgtatacgtatactttttgtttttcactgtatttctgtctgtaaaatgttcttgatattttccgtcataaattgtttcagttttaccgtcatattgtctttttattaaatatgaatagtactctgcatgacataaatcaattattacattgccgtctttatatcggatcgagggcgtctggatctgcgggcttgtaaagcgcgcggaactttcctgcgggatcttatcggatttgaaaagatcggtgacgacgtattccgtcggcgcgtattcgtcggcgagcacgatgcgatgattgttttcatattcgaatttatcgagttttaaagatacgagttcgccaggtacttcaaaacggctcggcgcgctgtcggcataaatttttttgtgcagaagatatgcgtagtgacagggcagtccgccgcccgtgacgtcggtcacggtgttgtcgtaattgcccatccagacggcaaccgtgtcttccggggtgtaggaaatcgtgtaggaatccgtgtttcctttttccgtgccgcacgttcccgtttttgcgcagacgggaaagggaaggttcgaaagttttttcgccgttcccgttttggctgtttcgtataaaatatcgttgatcatgccgacggtatccttgccgaaaacttttcgcgatgcgatctccgccgtgtagagcacgttcccccgactgtcttcgagttttttaataaagcgcggctgagcgaaaaaaccttcgtttgcaaagacggtgtacgcgcccgcgagttgcgtcagggtgtagccgcggctcatgccgcccagcgccagggcgaggtgtttatcttcgtcttttaacggcagattcatttcccgcagataatgttcgcttttttcgatgcctaaatcgttcagaatttttacggcgggcacgttcaggctgcgggaaagcgcggcgcgcgcgctcacgtaaccgttgtaaacgtcgttgtaattggacggggaataaccgccgaaatcaattttttcgtccagaatcggggttgcgggcacgatcctgttttcttcgaatgcgggcgcgtacacggcgagcggcttgatgatggaaccgggctgtctgctgctgttgccttcggtagaataaaatgctttgacgccgcgcgtcttgttgtcgagaattacgatgcttttgcccgaacggtcggctgtggttttcagttcttccgcgtatttttgcaggggggcatccatgtaagtgtaaattctgcacccgtccagaatggcgtacggggaaacgctgagaacgttttccagttcgtcgtacacgctctgtatatacgtctgcgatttgatggcgttgtccgacttttcggggataggactttccttggcgatttttgcctcgctctcgctgaggtatccgtattcctgcatcttcgtcagaacaaggttgcgcctttgcagacatttttcgggatgattgaaaggggaatacgtgttgggcgctttgatgagcgcggcgaggagcgcggattccgcgactgtcagatctttcgcctctttatcgaaataaaaatcggcggcgctggcgatcccgaaacaactgtgcccgaaataaatggtattgagatacatttccatgatctcgtctttggaatactttttttccagtttgacggtcagtttgatctctttgagttttctggaaatggtcttttcgttggtgaggtgagtatttttgatcaattgctgactgatggtggacgcgccttccttgtaggagcggcttttcaggttgttgaaaaaagcctttcccattcttgcgacgtccaggccgtggtgcttataaaaatttttatcttcgatggatacgaaggcgtttttcagatgatcggaaagcgcctctatttttacgcttttattcgccttgttcgcggagatctgtgcgatctcgtttccgccgttgtcgcagatcacgatattgttttcggataaagtcagcttttcttcgttgagtttgctgtctttggtcgtgatcagaaaaaaagccgcggccacagccgtcagaacgagcagcgaacacaggccgatgataaatattttcctcaaaactttcatagtcaacccttttacgttagtataagaaaaaaaataaaaattatttaaccattctatttttgaataacttgaaaaatttccgaaaaaaagttataatggaatctgaaatatcattgcttacggaaaattatgaacgagaaacattatcatatcattacatacggctgtcagatgaacgtgcacgaatcggaaaaaatcgcgggcacgctgaaaaagatgggctacgagcctgttgctgacagcgaagacgcggatatcgtcgtctttaatacctgctgtatccgcgaaaacgcggaaaatcacgcttatggaaacatcggcgccctgaaaaaactcaaaaaatccaaaaaagatcttttgatcgcggtgggcggctgtatgacgcagcagccgggcaaggcggaagaactgaaaaagaagtttcctttcgtcgatatcgtattcgggacgcacaatctcgacgaattgcagaaactcgtcgagttgaaattgaaacgcaaaaaatccgtcgtggacgtgtgggaaaaggaaggggagatttccgaaaaagacaagcctttccgcaccagttacccgaacgcctgggtgaatatcatgtacggctgcaataatttctgcacctattgcatcgtgccgtatgtgcgcggaagggaacgcagccgccgtcccgaacatatcgttgcggaagtgagatccttgctcgacgaagggtataaggagattacgctgttggggcagaacgtcaactcgtacgggaacgacgcggacggcgctttcaatttccccgatttgttgcgggaaatctgccaagacaagcgtaagttccgactcaggtttatgacgagcaaccccaaagatttcaccgaagatctcgtcgccgccattgccgaaaacccgcagatatgccgcctcgtgcatcttcccgtgcaggcgggctccgaccgtatcctgcaaaaaatgaaccgtaaatacacattcgacgaatatctcgataaagtaaaaatgttgcggaaacgcattcccgattgtcagatcacgaccgatattatggtcggctttcccacggaaacggaggaggactttcaaaagacgctggatctcgtcgatgccgccgatttttccacggcgttcacctttgtgtattcccgtcggtcgggcaccgttgccgcagaaatggaaggccagatcccggaagacgtgcaaaaagacaggatcatgcgtctcgtttctctggtgaattcgaaaacgcgtgaaaaatccaaagaatatttgggtaagatcgtggaaattctctgcgaggattacgacgggaaaaagggtgtttatctcgggcgcgacgaatacgggcgcatgggttattttccttcgtccgaaaacgtggtgggcaaattcgtaaacgtgaaaattactgaagcatcgggcgtatcgcttacgggcgagatcgtccgataaaggaaagaggttcaaaagatgagcggattatctccgatgatgaggcattaccttcagatcaaagaccaatacaaagactgcgtcctgttttatcgcctgggcgacttttacgagatgtttttcgacgacgccaaggaagtgtccgcgctcctcgatctcactttgacggggcgcgactgcggtctcgaagagcgcgcgcccatgtgcggtattccgtttcacgccgcggatacatatatcgcccgcctcgtcgcgctcggaaaaaaggtcgccatctgcgagcaactctccgatcctgccacgagtaaaggcatggtggacagagacgtggtgcgcgtcgtttcggcgggtacgctcatcgaagatgaacttttagacgagcgctccaacaatttcattgcctgtgcttataaaagc

SEQ ID NO: 4292 - DNA, 2908 bp, Unknown
  16S sequences of unknown bacteria
aaagcgcggctgaaagcttcggcggaaataaaaagaaaaccgcggttgttttcacggtaacggcgttaataacaatgacggcgctgctctgttttttcggagcgtcggcgagggcggtgcgcgggagcgtgatgtgtattattatgctgtacgcgtgcttgcaggacattaaaaaacgggaatgcgacgacagtctttccgtaatgctctgtattacgggcattgcgggtgctgtgccaaaagaaatgttttcgtcccttgccgcaggagccgggataattttaatactgctgttgcctgccgttattacaaaaaacggaataggcggcggagatatcaaatttgcaggcgcggcggcgcttgtgttaggattctttaataccgccgcagcgttggtattaggcttactcgcggcagtggtaataaacaagcttagaaaacaaaagagctttccgctgctgccgtatttagcgccggcatttatgacggcatattttatgacttgaaaggcgcgacttaatccaaacagcgtgccgcttaatattaagttatataaaacagcagtaagcgacaagacacaaaaaaggaggaattgtatagatgcgtaatagaacaatattgggtattgtctgcatatttttaagtcttttaattacattcggcttttcgccactaataaacagactgttgggcggagatatgacggttatacggctgtcacgggatgtaagacagggtgaggaaataacggtagactgtaccgaaagcgtaaaggtaaaaaagtccaccgtgccaagcggagtaattctgaatttaaaggatataaaggggaagtacgctttatccgacctgtacgcgggggattatctgaaaaaagaaaagctgtcgggtacgggcaatagtgtaaaggaagcgttcgcaagccttgacggagataaaaacgccgtcagctttacggtcaaaagccttgccgcaggactttcgggcaagataaccgccggggacattataaccttgcttattacagacaaaaacggcaaaaccaaaataccgccggagcttaaatatctgaaggtcataaccaccacaacaggcgacggcaccgacgcggataaagccaaggcaaacgaaaacggagtaaagccgaccgccgctgccgtgaccgtgctttgcaattcggcacaggcaaagcttattgccgaatatgaaaacagcggtaatatacaggtatctttagcttacagaggtaaagcagaaaacgcaaatgtctttttagaggcgcaggaaaaatatttcggagggaaataaaagaatgagtaaattaacacttctttgcggtccgccccaaagcggcaagaccgcagtaggaattaaaatagcgcaggaaatatattaccactttaagggcagcgtaatatatatttccgccgacaccgtaacgccgtttatgggattggttttccctaacgcaagtgacaaacagattttttctttgggcgaggcgcttgagcatacaagcattacaaaagagaatgttttgcggcatacagtgccgcttccgaaagcggataatttcggatttttgggatacaaggcgggagaaaacagatatacatattcccgccctaccaaggataaaaccgcagagttttttgaggtgtgcaagtcccttgcagactatgtgtttttggattgcacatcatcgcttgacgacccgctatccgtttacggtatggcggcagcagataaagccgtgcagcttgtaacgccggatatccgctcggcggcatattacgcttcttttgagaaaacatatgagcagatcaagggcaaaagtataggcgtaataaatataacggataaagacctgtatttacccgtaggcgaagtgaaagcggggtttgcaaacgctaaatatatactgccttacagtatgtatttaaagcagcaatatataacgggcgagctgacccacaaaatacccgatcagaaattcagcgctgtgtgccgcggcattgcgggggcggtgctgtgaacgggcaggaattttcggagctgcttaaagggacgcagcggcatatttccgcagtatattcgggtgctgtgaacggcaacaaaaaagaacagctgcgagcatatattgagcagtatttaaggcaaagcgggtataccgacgaaacggagcttaaagcgctgacggacaggctgtattccgaaatggcggagtattcggtgcttaccaaatatctcggcagaaaagatatagaggaagtcaatgtaaacggctgggacgatatagccgtcacctaccgaaacggcataacggaaaaagcggacgagcatttcttaagcccgcggcacgcggaagatattataaagcggcttttacaccattccggcatgataatagacaacgcctctcccatagcccagggacatctgcccggcaacacacgaataaccgcagttaaaagccctgttgtcgatgaggacagagggatagccgcctcaataaggctcttacacaattcagatattacaacagaaaagatagtaaccgtcggtacggcgacaaataagatggtggattttctttgtatgtgcctgcgttacggcgtttcctttcttgtggcaggcgctacatcttcgggcaagaccacattgcttaacgctttgttggataccgtacccgacggcaaaagaatttttacgattgaatcgggttcaagggaattatctttagtaaagcgaaaggacggcaaggtggtaaacaatgttgtgcatacgctttcccgcccgtctgaggatgaggggcttaatatagcgcaggaggatcttgttgtggcttcactccgctttgaccccgacattgtagtggtcggagaaattcgcgacagcgaggcgtatt

SEQ ID NO: 4293 - DNA, 32759 bp, Unknown
  16S sequences of unknown bacteria
tggatgcctcctacaaaattcagagaggcatccatgtgcacctaattcaattttttatgtgtccagaattctgggtacatatcatttttacatgctccgctttttttgcactgttgtggaaaaatagggaaaatcaaaggatcatagctgccagaagcatttcgatcaaacgggcataaatcggttctaactcggtaatgggaagcggatttttcccccgaccgatttcaatggtaaaaccagggcggtgaaattcctcaatgaaccagtccttgagtcctccatggctggcggtgccggtgggacgagccagcgtatatccgctggaggaggccagtacctgggcgatcaaaggcgctctgggaggagtatgttcgccgtattggtaataaatttcctctccctgtgaatgaaaagcgtatagctgacgtaccggttgcgtacgaataaaccggcaaatggaccgtgtttccggttcactttccggccgttcaccgccgtattttcccggaccaggacccagaatgccggcggattgttccgcttgcttgcaaagttcgaaccccgcgtcaaaattatggttgaggtctactccccgggcatttgcctgccagcgggaaaaatctccgccgcacaaggcactaacctgctgctccataccaggcgcaccggcggccccttccagcgcaatggagatgccatcggggtttagtgcgggcactacaaccagtccctgatgatccaaagcttttttgacttggatatcggcaaggggatgattttgtgctatactagaaaacagatcatccagaaagcgaaacagcagaagaaccgttagccattcctggccatggacgccgccgacaaacagagaaaaacggcgggaattgcctaggcggacggcgtaaatgccacggcccagcagtgaacgcccgatgggaaaaaccgcggcgctgcgcccgttacagagagtctggtaagtacgcattttttcccggatgcggggaaaagcaggcggcagcgtataaaaggatggttccataacaatcacctcacagcattttctttttactatatgagccgaacaaggccctatatttcaaaaaatccgcaaaaacaagcctttttgggcagtttttccgcaagagaggagcaatgtcatgtcccatacagaaaagaccattgattctacccgtatttttgaaggaaaggtcgtccgcctgcgtcgagataccgtggaactggaaaacggcaaacagacgtttcgagaggtcatcgaccatccgggcggggttagtattttggcaatggatgaagaaggaaaaatcttttttgtccggcagttccgctatccatttggcaaaatgctgctggaactgcctgctggaaagctggagccgggagaagatcctgcccagagcggacgcagagaactgcgggaggaaaccggctgcaccgcaggtcggtttgaatccatgggcagtctgatccctacctgcgcatacgataccgaggtgatccatttgttttttgcttcggacctgacccgtggggagcaggatttggatgaaaacgaatttttatcagtggagcgctatacgctggatgaggcgctgcaaatggtgctcagcggagaaatcgttgacgcaaaaacccagatcgggctgttcaaataccaggctttgcacaatgcgggccgcatttgacaaatccgttttttcaagaggtaatctatggaaaaaaagcaatcgtttggactgcgaaaaaaagatttagccgtcattggtgcgctgttgctgctggctgtcagctgctggctggcttatcgtctctcctaccggccgcctgaaaaacaaaatctggcggttatcatggttgacggtcaggaagtgatgcggctgaatctgctggaggaaaaggacaggatattctccctggaggaggattacggggtgccggtatcgtttcaaattgaaaatcataaaatccggtttattcaggtcacctgccccgatcacatctgtgaaaacgcgggatttttgtcgatggaggggcaaagcgcagtatgtatgcccaaccgtacctcgttaagtatttatggagaagaaggataacggtgcctgtgaaaaacagctgggtcggaggatattttctctggattttgtatatttaaccaaaaaaaatgagaaaaataaagtgaagatgtggaatttttgttcttctattcccttttgacaagaaacgtgttacaatatgacctggataggtgcatttcgccaaaaaggatgaaaaagtttacaatggaaaaaagaggaacgattttgatggccgcctccggaaaaggcggagtcggaaaatcctgtctgacagttattttagggcgggagttggctcgattggggtgcagaactctgttaattgaaatggagcccggccttggcgcatttgacctgatgatgaatttggagcggggtgtatgttgcctttcggattttttgtctgggcgatgcgcggcgaaagactgtatgataccagtgccggatgagcctggcttatgggcggttttggcaccgaatgaaagagaatttttctatgatccgccggtgtttgcagaaaaaacagacgagctggccggatcttttgattttgttttgatagaaacgccgccgggttttggatcgtgttttgaggcggcacagaatgcggtggatgcggcagtgattattgccacgcctgacttaccatgcctgcgagatggacgcgcggtatctgaccggctggacgaacggcctcaaattcgtcagtggctggtaattaaccggttggatacaaaacaattttgccgccgccggccgattccgcatttggattttgccattgatacggtaggcgcacagcttttggggattgtgccggaggatcaggagctaccttatcgtttaggagcaggaatggttctgccgcagcaaagcagcgcacgggccgcctgccgcaatattgccctgcggcttttggggcaaacggtagagttgggtgtataagaaatagagaaaggatgatctacatgacaatcgcgctgacggcgcatgatgcaaaaaaagaactgatggtccaattttgcattgcttactgcggaattttaagccatcattctttgtgcggaactggtacgacctgtaaaatggtagcagaggccacgggattggagatcgtccgttttttaagcggagagcagggcggcgatcagcagattgcagccaggattgcctgcaatgagattgacctgcttttgtttttccgggaccctctgacccagaaagaagcggagagtgaccacgcgcagctgctgcgcttatgtgacgtgcataatatcccggtggcaaccaatatcgctacggcagaggcattgatccacgcattggaacgcggcgacctggattggcgaaatattgtccatgcaggataagcatggggaaaaagcggaattttctgattttcccttgcaaaaaaggaaaaatcgtattataattttaaatcaatccggtaacaaaagcttgccggtttagacgaaaaatgtggattcgacgggagatttcggtcaggctcggtacagagaagcgcttcttaggctggaaaggcgctgccggcggcatggcgaaacagacacccgtgcggcaggtagagggaacgcccaatttggatgggctggtagttctgcccgtgtagctggcgttaacggccgaaagcggggggcatgaaacaggccctcaaacaagggtggcaccgcggatatgctccgtcccttccggcgcggaaggaacggggctttttattttggagctgccgaaagtactttagataaccgcctttggcggacggcaaagataggaggaacaaagatggcgattttaaccaaaggacccagaggaacccaggatgtgctgccggcccagagctataaatggcagtacctggagaaaaaagtcatggaaatcgcggggctgtacggtttccgggagattcgtgtccccacctttgagcataccgagctgtttaaccggtcggtgggagataccactgatgtggtgcagaaagaaatgtatacctttgaggataagggcggccgttccattaccctgcggccggagggtacggctggaacgctgcgcagcgccatcgagcatggacttttaggcgatgcgctgccggtaaaagcggcatatctgctggctgcgttccgctacgaaaaaccccaggcgggccgtctgcgggaatttcaccagtttggcgtagagatgctcggctctcccgctgctgccagcgatgcggaagtgatctccatggtgttccacatgttccgggagctggggatcgaggcacagctggagctaaactccattggatgtcccacctgccgcgccaaataccaaaaggcgctgcatgaccattttgccgctcgccgcgaggaactgtgcgatacctgtaaagatcgtctggagcgcaatcccatgcggcttttggactgcaaaagtcccatttgccaggaaatcggcaagggcgcgcccatgatgctggactttttgtgcgaggaatgtaccgatcactttgagcaggtcaaggcccggttggacgccatggacatcccctatgtgattaaccctaagatcgttcgcggcttggattattacaccaaaaccgtgtttgaatttgtcaccgataaaattggcgcgcagagcaccatctgtgcaggcggccggtacgacggactcattgagcagctgggcggcccggcactgccaggtattggtttcgccatgggtttagagcgaatcctcatgaccatggaagcctgcggcagcgcatttccccaacagccggaatgcgctgcgtttatcggcagcatgggcgataaagccggtgccaaggcggcgcagctggtgacgcagctgcgggatgaaggattctgggctgagtgcgacaccatgggccggtcggtcaaggcacagatgaagtttgccaataagctgggcgcgcgattttcggccattatcggcgacagcgagctggaagctggaacggtgaaactcaaaaagatggatgatgggtcggttaccgaaatccggctggacgcaaaaccctcggatccggacagtttggtgcaggtagtttacgcaagccatctggaagagattgccggcgcactgaagaatcagtaacaaaaatgaaagcgacggtttcgaaatatctagaaattttgatagagtcggtcaattacattatcatcaattatgctctttccaatatggcgttgctgtttcggagcaatccgctttttatcctgttttttgcatctgaaatatggatgttcggaaattattggaaaaagatggaccggctgaccgcaaacaaagccatttcttcctttttgctcattgtctgctttttcattcacatcggtgcgatatactggatcggccgagtttcgggcgatgttattcctttttgggaatgaccgcgcaataacgcaataaaaaatttaagttttttgctgctgttaacagaaaaaatatgccgggtttccggcaaacaacaggaattgataggagttggagcaataccatgatgcagtcaagaacccatacctgcggccagttgcggctggaacaggttggccagaccgtgacgctggcaggatttatggaaaatgttcgtgaggtgggcggaagcctggctttcgttgtcctgcgcgatttttacggcaccacccagctggtagtggaggacgccgagctgttggcgctggtcaagagccttaacaaggaaacgactttacaggtcatcggcgttgtgcgggagcgctccagcaaaaacccgaagcagcctaccggagacattgaagtggtgccgtcccagatcaaggtgctgggccgctgccgccacaacgagcttccgtttgagatcaaccgcagccgagaggcggacgagacccagcggctgcgctaccgctatctggatctgcgcaacccggcgatcaaacagaacatcgtgctgcgctgcaacgtggtagccgctttgcgcaaagccatgatggaacacgattttctggagatcaccaccccgattctgaccgcttcctcccccgaaggtgcacgggactatttggtgccggcccgcaagcatccggggatgttttacgcgctgccccaggcgccgcagcagtttaagcagcttttgatgacctccggctttgaccgctattttcagatcgccccctgttttcgagacgaagatgcccgcggcgaccgctctcccggcgaattttatcagctggatatggagatggctttcgccacccaggaggatgtgttctcggtcatcgaggatgtgttcccaccgattttcgcccagtacggaacctatcataccgcttccaaagcaccgttccggcgcatttcgtttaacgacgccatggagacctacggctccgacaaaccggatctgcgtattgatttgaccgtgcaggacgcgacgaagctgctgtccggctgcggttttggcccctttgagggcaatgtggtcaaggccattgtggtcaccgattttgccggtacccgcaagcagatcgacggactgtgcgccgaggtggaggtgcagtccggcaacaagggatactggttccgctatgacgaaaacggcgaaatcgtgggaggcattgccaaatttgtggcgcccatcaaagatgaggccgtaaaggcgttgggtcttgttcccggctgctttgtgggcctgaccgccggcaaaaagctggcagcgcagaaaactgccggcgtgttccgcaacaagctgggcgcgttctgccccaaccatatggataaggaaaaatacaagttctgctggatcgtggacttccccatgtacgaaattggagaagaaagcggagaactggaattctgccacaacccgttctccatgccccccggcggactggagattctggaaaaagcgcacaacggcgaaatcgatcctttgaccattacggcggatcagtacgatttggtggtcaacggcgtggagctttcctccggcgcggtgcgcaaccacgatccggaaatcatgatccgggcctttgagctggtgggtctgggcgaagaggatgtaaaatccaaattcccggccatgtataacgcctttacctacggcgcgccgccccatgcgggcatcgcccccggtgtggaccggattgtgatgcttttggcaggcgaagagtccatccgggagattattccgttcccgatgaacaaaaacgcccaggatgtcatgatgggcgcacctggaaaagtaagcgaaaaacagctggaagagctgcatatcaaactggatatcgaggaagagtagcatctgtcagaaaaagccgccctgtctcctttttaggaaacgggacggcttttttatctgtcagcgtcttcataggaaatgatttcggcaaacaagaagctgcttgatcgcagcaaaaaaaggattcagagctggcggaaaaaacggaaccttaagccggcggtctttttctctcatcaaagaaaaaaagctgcaaagaaagcaccacggcctggaacagaacaattcccagactgacagcggtaaagctggcgaacagcatccaggatgctgcattggccagaatactcagcccaaggcaggtcaaaatagcaggacgaaccctaggggcaaaaagtaaaaatgccgcgccgatggcgctcaaaaggatggaagccgcgggaaacaggtttccatagcctaacggtatcctgctgaaaaaagggtaaaaacatttgattgtctctcctggaccggaggcaaaagtcatggcgaccccttccggcaggagcatcaagatcagggaaatcaaaatgccgaccagacagatccatcttttcattttcatccctctttcttctgcctttttgtttttatcataccatacttgcgttggcccggcaagaaagagtgcgtagcgttttctttccttgacattttgggaaaagttgtgttagaataactctcgttcatcaaaggcagatcattcccaggaaatgacgagccggataagatggcggcctgagatgtccgctgcttatccggtttttttgaggaaagacagaaaaagggagatgcaaaaatggaaaataccaatcattttacgaggggaaaggttctttcccctctgatccggtttgcattgccgattctatttgccatttttttgcagacaatgtacggcgcagtagatatgctgatcgttggacaattcagccacgccggggaagtttcagccgtatccactgggagctggattatgcagacagtcacctcttttattaccgggctggctatgggaaccactgttttgctgggaaaccgtatcggtgcgggaaaagcacaggagggcggacgagtagtaggcgccagcatcctgctgtttttggcgatcggtgcggtattgactgtggctttggagctgtttgccgttccctttgcccggatgatgcaggcgccgccggaagcttttgatagtaccgtgcagtatgtgcgaatctgcggcgcgggaactctttttatcattgcttttaacgtgctgggcggtgtgtttcggggaatcggcaacgcaaagctgccgctgatttcggtagccattgcctgtgtgaccaatattgtgggggatttgctgctcgtcggcggattgggctggggcgcggccggtgcggcagctgctactgtatttgctcaggcagtgagcgtggtgatatcgatcctgattatccgccggatggagctgcctttttctttttcccgccaggaatttcgctgggagaaacacaccgtgggacaggtggtgcggctggggctgcccattgcaacccaggatcttctggtctgcatttcctttttggcgattacagccattgtcaatgccctgggggttatcccatcagccggtgttggagtggcagagaaaatttgcggttttgttttgatggttccatcggcctatatgcaggcgatgagtgcctttgtggcgcagaatatgggtgctgggcggcctgaccgggcgaaaaaagcactgattggcgccatcagcacttctttggccgtcggcgtgattttgtcgtatttctcgttttttcacggcggattgctggcgcagctgtttgcccgggacgcaacggttatcgcggctgcggcggaatacctcaaagcttatgcggtcgactgtttgctcgtgtcttttctattttgcatcatgggctactttaacggctgcggtcgaactgcttttgtcatgattcaggggattgcaggcgcatttcttgtgcggattccggtttcctggatgatgagccgggtgcagccagtctctttgttcggcgtagggttggcaacgccggcttctactgttgtgcagcttttactgtgtgcaggctattttgtatggatgcatcatcgggaaaaaaagatgccggcagtgccgtttgtggtagaataacaccttttgaaaagaaatgcccggatgaatcatccgggcatttcttttatttgattgccttaaggcttaggtatccccagccggtctgggggtggatgattcccttttgagaaaaaacgatcaggagaagcagggcaatgcaggcccagtcatatagatccgatttggcgtggcgctggctgtgtaccgccatttcatcttttttctctactccccgtttcttttccaatacaatcatccataaaaacaggagaattgctgtacagactgccgcgatgcctatccagtcaagccagccgggacgagggtctccccataaatccagaaagccaaagagcaaaaacaggccgcttcccaaaaacttattgacgataaactgacattgaaacgagagcacagagattccttcaatagtgatatatttatctcttttatgagaaatatatcatatctaaaaaagaaatcaagaaaaggtggaccgaaaaaagcggatgctgtcgcacccgcttttttgaaatatcaaagagttgtcaaaaacctttccagccggtccagacactgtcgcagctcatcgtctgcatagcagtaagacaggcgtatatatccgtccgccccaaaacaggagccgggtactgccgccagtttggcctcttgaatcatccgcagacagaacgtttcggaatccatgccgtatttttgaatggacgggaacagataaaaagcgccctgtggcttctgcacttccatccccatctcaaccagacggccatacacatagtccctgcggcggcggtaggtctcaaccatcggggacggatcatagtccagcgcggccgcacagcctttttgcaaaaaagagaccgcagaaaccacggtataagaatgcagttttgccaactgctcgatcaccgggcggtctgcgcataaatatcccatgcgccagccagtcatggcgtatggcttggaaaaactctggatgaggatgattttttcccggatgtcctgataccgggaaaaactttgataaggcccatagaccagctgtgcgtacacgtcgtcacaaaggacaaagagatttttctccttcgctacctgatagaccgcgtccagcgactcgggggtatagaccgcgccggtaggattgttgggcgaattgaggaggattgctttgctttttgcggtgatatgctgcgccagattttgcggggtgatctggaaatgatccgcgcaggtatccatagggacatatacgccgctggataaggcaaccagcggctcgtacaaaccaaaagcgggagtgggaacgatgacctcatcaccgggatttaaaattccgcgcagcgcaagatagagcccttcagtggctccatcgacaacaagaatttcttccggagaataggacacgccgttttgctcctgctcaaaccgggagattctctcccgcagatacagctcccccgctccgggcggataatgggtcaaattttgatccaatgcggttttggtggcctctttaattggctccggcgtggaaaaatctggctcgccgatggtaagaaacaggcagcccggttctgcttttgccagagcggtaaaccggcggatgccactgggctggcagcccagcaaagcggcgttcatgctttccaccatgaagatcccctccttttgaaaaagcccgccgttttccacggcaggtaaaaaattggtggaaaatcaaagctgtaaaagtgtttgatataaagctacgccctgttccagcacgctttcgtcaaagcaaaaccggtcggaatgaagcggttgatcggaaccggtgccgaggaaaaagaacaggccgggaagctcctgctggtaaaaagaaaaatcttcggcaataagggcaggctctttgagcggcaccaatcggtccggggccagtagggcggctgcctgttcgtacagtgcaggatcgttgtaaaccggcggatacccttgactgaagcgtaccgagatttggcagcctgtctctttttgcacatcttggccgatttcagcggcccggcgggttatgtgatcaaacacctcgtcctggaaggtgcgaagggttccctccagtacggtataggcgctgaccgcgttgcgcaccgttccactttgcatgtggccgaatttaaatacccggaactggtccggcggcagttccgaatcggccatgctataggaccggcgaacaaattccacccctgctgccagcgcatcggccccctcccgccatctggcgatgtgggcacttttgccgttgatttctaccgtcatctcgctggaacgggccatcatcggcccgctgcgggtgctgacagttccggcaggcagatccggccaaagatggatcccgaagatatggcggacgtttaactggcgaaaaataccggtttgacagatgctttgggcgccgcctgtggtctcctccgccggctgaaagaccagcagcacgttgcgggccagctgatccaaatgtccgctgatccattgggccagacataaaagcatggccatatgcccgtcgtgaccgcaggcgtgcatccgcccgggatgcgccgaacagaaagagacgccgcttttctcttctatgggcaacgcatccatatcactgcgaaaagcggcggtatccggtttgcccgcgtcaaaataggccaacacggcacagcggcccggcgtaatgattcggcagcgcagcggcgacagccgatccagcagataggcctgagtttccggcagctggtcgtccagctccggaatccggtgcagagcccgtcggtggatggtgagttgttccagcatgaaaaagatccctccccggtttttagggttattatacgccggcaagacgggggatgcaaatattttttgctgtgcagggcagcgatttttttactgggtgcaaccgggatttggaagttatttggcatatttcctgcaacttaaatgaaatcaaaaagaaaatcatgggattctttgtataaaacctctttttgcagaaaaaggttgcctttttggaaaaaccgtgttattatgcaccttaaattgatagaggcgcaaaaacgacaatccgtttcggagccggcaggcgatgaggagatggaaaagcaattttgccgaactggtctaaggcaggcatgtcgggccggtgggcttgcggaaaacatccgtaagactgtctgcaatccaatgcaggagtgctatctttacgtcttatacaaaaaaggccgtttttctcttttccgggggaaaatcagcctgctgtatcaggtcggtaaggggcgctcccctgaccggcctttttgttttgccgaaagacaggatgattttgccttatcgacgcatacaatgacaaaaagaccagcgaaattttgaatggggagagactttatgaacagaatcgacttcctctttgcgcagggggtgatggcggcgggcagtagcgccggcaattttggcgtatctgcccggataaaactgcaccgtctgattcccgatttttcgtgtgaaggaggaattttagatgctgccggcgagcaaatatcatggctgcggcaatgactttatcatcctgcgggaggaagatgccgcggggtatgatttgaaaacgctgattccggcggtgtgtgaccggcatactggccttggtgccgacggatttattctggtgaggacctgtccgctgaccatgattttctataactgcgacgggtcccgcgcccctatgtgcggcaacggcatccgctgctttgcaaaattttgtctggacgagggcttggtagacggagaatgccttgcagtagaaactttggcgggacccaagatggtgacggtggccagccgggatccttttctggcacaggtagccatgggaaaagcggatttttcgccggagtcgataggcgtggaacactccggtccggcattggattttccggtgccggtagaagggaaaaaaattttggtggacagcttttttatgtccactgtacatacagtctggttcgtaaaagatccggaggactcccaaacccagcggatcgcgggtttgatctgtgaaagtccgctgtatcgggaaaaaaccaacgtcaacatggtgcgggtgctgaatcggcacaccatccagatgcgcacttgggagcggggcgttgggatgacgctggcctgcggcaccggggcctgtgcggcggcgctggatgcgtaccgcaggggatactgcgaaaatgaagtggaaatacggctgccaaaaggtcgtctcaccgtccaaattgacagagatggtagtgtgtggatgagcggaccggcaaaaaggattggaaaaggagaatatgagatatgaaactgcaaggatccattgtggcgctgataacgcctttttacgaagatggaacggtgaattttgaacgactgggtgaaatcctggattggtatatcgcccagggaactgacggcattctggtgctgggcacaacgggagaatcttctaccatgagccatgaagaggacgacgcggtatgccgctttaccatcggccgggtagcaggccgcgtccccgtcatcgcgggcagcgggtccaactccacggaaacccagttggagaaaagcaaaaaatatgcggccatgggagccgatgcccttttgtgcattactccctactacatcaaggccaatgccgaaggcatgtaccgtcactttgccaatgtggccgacgcggtagatgtaccggtgattttgtataatgttccggggcgcaccggttgttccattccggtggagacggtggctcgtctggcccggcatcccaatatatgcggcatcaaagaagccagcggcgatatttcttacgcggtaaagatagcccggtatctgtccgatgattttcagatgttctgcggcaatgacgacattaccctgccgcttttgtccctgggtgccagtggggtgatttcagtttgggccaatatcatgcccgctgcctgtcatcagatggtcacggattatctggagggccggcgcgaacaggcgttaaaggcgcagctaaaatatctggatctcattaacgggctgttcatggaggttaaccctatcccggtcaaagaagcgatgaacctcatggggatgaatgtgggcggctaccggctcccgctatgtcccatgagctcagagtaccgggaaaaattggctggtatcatgagacaggccggattggacgtaaaataaaacagcccaaagggcgtaaaggaggggcagcgatgaaaattttgattacaggatatggaaaaatgggccgaatggtcgaggagctggcccagcagaagggatgggagatcctggctgcgctggacggtcaggatgcaaagctgctgcggcagcttaaaaaagcggatgcggcggttgatttttcccatccagccatgctggattcattggccaattatatccgccgtactggtacgccgctgatcagcggaaccactggatacagtgaagagcagatggatgtcctgcggcagctgggcaaatcagcggcggttttgtattcggccaattacagcctaggcgttgcccttctgcggcggatattggaaaattttgggccgatgctgctggcagattttgatgtggaactggtagaaaagcaccacaatcagaaagcagatgccccaagcggtaccgccaaaatgctggctgacgccttggacccccaccggcgacttcgccggatcagcggcagagagggcttctgcggggccagagaccgcgatgaaatgggcatgtttgccctgcgtggcggcacagtggccggcgagcatacgctgtatttcttcggtgaagatgagaccctctctttttctcacagcgcggcaagccgccggattttcgcagcaggtgcggtaaaagcggcagagttgctggcgggtaaagatccaggattttatacattggatgaaatcctgttttccacggtagatacagaaaggatggattaagcatggacgcttatcagatcattgaatatatccgcacctcccccaaaaagacgccggtgcgggtctggctgcaaacgtcgcagccggtagcatttcccgccgcacagcagttttccggcggcaacggcttttcagtcgttttcggagactgggaggatatccggccggtgctggaagaaaaccgggaaaaaattctatcccagcaggtggagaacgatgccagaaactcggcaattcccctgttggacaaaaaggatatccatgcccggattgaaccgggagctattatccgcgagcaggtacaaatcggcgacaatgcagtaattatgatgggagcggttatcaatatcggcgcggtaatcggagaaggtaccatgattgatatgggcgcggtgctgggcggccgggcaatggtggggaaacgatgccacatcggtgccggcgctgtgctggcaggcgtggtggagccgccttctgcaacgccggtagtcgtagaggacaatgtgctcatcggcgccaacgcggtagttatcgagggagtgcggattggcgagggctccgttgtagccgccggatcagtagtcatcgaagatgtggcgcccggtatggtggtagcgggtgttccggcacgggtcgtcaagaaaaaagatgaaaaatccgcgcagaaaacggaattgattgacgcgctgcgagagctgaaccgataaagtcgaacttcgaaaatcccggcgaaatacagtctggcaaagattgtgtttactggagcgattctgctgtgcaaaagcatggcaaaaacggccatgtgcgcccttagacagccctgccgcgcaatctcagtgcataggacggacagcccggaagtctaaacggaatacgccgtcaactttttatggttacgatttgctttaacggcatgagattttatgcacgcaaaaaaagacaacacagtctcattttgtcaggatgaaagatttttggctgtcaaggttgttgcgagcgctgtaaagaaggaggatattctcaatggaggatatcctcttttttgctggccgggataaaagaaacacttaataattccctcgctaccttcggagatattttcccttgctgaaatatccccacccggctattcaagcaggcggtcaacctctccaaataggcgaaggccattgaagccacgctggacggtatcaatccgatcaacgctgggaagaagaaagaggaagctcttgccatgctgaaaaagtggttcccacaaatggagaacttctccggccaactgaaaaagtacacaaggtcacgataaaagaccttttggaagaaaatcaaaagttggaagcaagggcaaaagccagcgaaagcggcaaaatgaaagaccgcatggaacgggcgaagctggaaagcgaattacagaacattcaaaggctggctgaccgtatcccgccggacgtgctggcggaactaaagcggcagcagcgatacacaaaggaacggtgattgagtataagcagaatttcacaccgcctctgtagcggcaatgtaccttgacaactgaatagagaaaggcgatatatggcaaaaaagcaaccggatacaaatattcccaacatgaaatagaagcctttgcccggtgcttacttcctgaaatccaaaaattctttgaaagcccaggggggcagaaagaatttgaagaatggaaagtgcagagagcaaaggaaacagagaagaaaaggagcgtatgacaaaagcggcggtatcgtgagggataccgccgcttttgctttagcactaaagatatactaaaaatccgaagccgttcccgattggaaccgggttcggattatcattatctggtgcgggagatgggacttgaacccacacaccgaggtactggctcctaagaccagcgcgtctgccattccgccactcccgcatttatcagcggcaggatcaccctgccgctgtttgttatatcaaaattttgcgctgagatgacagcgcctgatttctgcgtctctgccgattccgcatatatcggtaaggacacacaatttttttccgccacttttgtccgcacaaaaagaatatcatgacgcagcctttttgtcaattctccaagcttaaaacgccgtcctccagcatggtctgagccgcaagcagaatacccgttttaccggtaaagtaggttaacccgccttgcagccaaacggcatagggctcccggattggaccgtcagcagacagttcaatggaagcgcccagatgaaatgcccccgccgccatgatgactttgctttcataaccaggcatatcccagggctccggcaccacaaaggaatcgaccggtgcgccgcgctgtacgcccttgcaaaaggctaccattcccttttcattgccaagctctatcgactggatgatatcggtacgcggctcacggcaggaaggattgacacggtaccccaaacactcgaacagcgcagcagcgaaaatcgccgtttttacagcgttgcaaaccacattcggcgctaaaaacagccctaaaaacatattccgcagttcgcccaacgtacatccgatctccttgccctgccctggcgtggttagacggtaagcgcactgttcaatcaaatcccgccggccggcgatgtatccaccggtgcgggcaatcccgccgccggcgtttttgatcagagagcctacaattaaatcagcgcccagctgggtcggttctgtcttttcggtaaaaattccatagcagttatccaccatgaaaatcgccttgggattgtttttccgcaccgtctgaatcagctttcccatcatgtccatgttgatggagggccgcagggaatagccgcgggagcgctgtacatacgccactttgacacggggatcctttaccgcttcggcaatggcttcgagatccggcgtgccgtctggcagcagatctacctggcggtattcgatgtcgaactcttttagcgaaccgcagttttcgccggtaatgccaatcaccggctgaatggtgtcataaggcagcccggtgatggagagcatcacatcgccggggcgcagaacgccgaacagcgccgttgtcagcgtgtgggttccggacacaaaattgtgccgcatcagcgcgtcctcactgccggtgatttctgccatcaccgcctctagggtttcccggccgcggtcatcgtagccatagccggtactcccggcaaaatgggactcgcttacaccgttgtgaagaaaggccgccaacactttcctgctgttatattcgccgatttcctccgtccgagcaaatgcctgggcgcaatcgagctgtgcctgttcccccaatttttccagtcttgggtcaatgtcaaaaaaattctgttccattggaatggattctccttgtcttgtccgcgccactggccgcggcgctcttgtgatatcagggtgcctgcttgtttttatacgccagcagatttttattctgccagcccatcccgcaggcaaagccattcttcgccccacggagtaaatcccacccgctcgtatacccgaacagcttgtgcgttttggcagatgacaaatggtattctaccgctttcctgcgcgcgggccgccagcagaaacaccagcgccgccgcatatccgcgcttgcgaaaagccggatgagtcgctaccgacccaatcagagccgcttgtttgttttgatgatagattcctgccgtagcaatgatctgcccttcctcccgtacgcccagcaaggttccctgctgatggcgcagcttgtgggaaacctcgcagtaccagggagcaaaatccgcttccggcagatcaaataccccctgcagcagcggatagacctcccggggagaaggttcgcaaattcccggcgggataggggttgggcgcaacacgccaacagcgcttagaatctgcctggactgaatgggccagttcagccgggctgccgtttctgccagtgccgaagcaggtccgcgcagtgttttggcaccacagatggcgcaaaatgccgccagctcctccgaatcggagaaacggccggatagtaccaacgtatcgccggacagggacaaaaccccatcggcctttggcgtgagccaaaagcggggcggtcccgttccccgaccgtaaagctcccacctcgccgtgtggattgccccataagggtccggcccggctgccgacggggcaaagaggctgtcgccgggaagtactgccctaatcacagattgcgtacacctgcgacagcttcatcagcagatcataggtggcggtaatatcctcctcctgcagcacgcaggactgggtgtgcagatagcggcagggcatggaaatccccaccgggcgaacgccgcccactgcctgatgcatggaacctgcattgttgccgccgaatacgcccagctttggctgcgccttgattttatactctttggcggtgtccaacgccagctgatacagccgtttgtcgtaaatggtccctttgtccataaaggagatcaccgggcccttgcccaaaaaacagacccgtttttccggcgctacgccgccgatatccgcagcagtggtggtctcaatggccaccgcaatgtccggtttgacggtgtaggttgctgtctgagcgcccataccgccaacttcctcccgggtggtaaaggaaaaataggtatcgtattccaaatcggactgaatcattttaatcagcactgcgcagccggcccggtcgtccagcgctttggattttaaaaatccgtcgccaaagcgtacaaacggagagtcaaaggatacccgatctcccacgctgaccagaccttccgcttcttcccggttccggcagccgatgtcgatcgaaagatccgccgctttgatggggtcatcccggtggtcccggtcgatcagatgaatgggtttggagctgatgatgccatagaccttgtttttgcctaccaccaccggtttgccttggatgacccggttatcaatgccgccaactgtggcaaagcgcagaaacccctcctcggtaatataggtgataataaagccaacttcgtccatatgcgcatcgaacatcacctggttgcggggatgctttgcgccttttttaaaggcgatgacatcgcccagaggcgttacttcatattcacagtagtccttgatctgctcgatgatggcggcggccacatcctgctcgtcgccggaaacgccgttgatggcgcagagattttcaatcagacggatcatttgcggttcccctcctttttcacataggcggccagcagccgggcggtattttcaatatcctccggcagaattttttctaccggcgtgtgcatataaccttgcggaatggagagtacgccggttttcacgccgccccgggtaatgagaatactgtcggcgttggtgccggtgccgcctcccatcgcttccgtttgataaggaatatcttcttccttggcagcttcaatcagcgtgcgggacatttccccgtccaacagggaaccaaatccgataacgggaccgcctccaaaagcacggcactgttctttcttgcagtcaggcgtccagccaaagcccacgtccaccgttatcgcatgagtgggatttaccgtataggctgccgcctgcgcgcccatgccgcccacttcctcacgggtcgtcagggtgaccgacaatccgtagggcttgtcctcgcttccgagaagctccgccgcccgcatcaccgccacgcagctggagcggttgtcaatggccttgccggtgataaacccgccgtgcatttcccgggtgggggtgacgaaagtagcgatatctccaggctgtacccgtttctcggcttcttccttgctgtaaccgatatcgatataaatatcttcgaatttgggatttttcgcctcaccgttctgcaggtggggcggaatggaacagataaacccgggcagatccccctgggccgtatgtacggatacctgcgaggccaaaagcaggctgcggtcaaaaccgcccactggagaaacctttaaaaacccttcgtcgtcaatccaggtaacaatcatgccgatttcgtccacatgggcatccagcataaaatttttctgtcccttttccggctggcggatggtgcagattaaatcgcccagcgggctaatcgacacctcacccagcgtccgcagttcttcggcagccatcgccactacggagccttcccgtccggaaacacctaccgcgctggacaaacgcatcagtaaatctttgcagttcatggttttcatcctttctcttcgccgggtaaaccggcagcctttatgggtaggaggaatcctcccctgttacggctttaaggctgctaccagccttttgaaatgctcgccccgcttttcaaaattcggatacaggtcaaaactggcgctggcgggggacaaggctacaatgtcgccgctgcctgccagaccgtccgcggtctgtaccgcctgctccattgattcggcccagtgcagtgccggatgctgcccgtcgtaatccgggcaggcttccagcgcctgctggatcttggggccggtagcgcccatcagaatcaggtgcgataccttttcgcacaaatacggcgccagcggctcataggggatttttttatcatatccgccggcaatcagaataatcttctgtccaaaggctttgagtcccgcaatggtgcgggtggggctggtgccgatggaatcgttgtaccattttacgccgcccagctcccgaaccagctccatccggtgttccacaccgccgaattcctgggcggtccgggccatgatttccactggcacatcgccccatacagcgctgtatgcggccagaaagttttccacgttatgcagcccgggcagccgaatctgctccatgggcaaaatctcggtttctgcaccgtgacagcgcatgcacagcatgccgtcctgccgcagataagcaccaaaacgaggggcctcctgccgggaaaacgtcagcagctccccgcggacaagccctgtcatgtctcgggtgatggcattatcccgattcagcaccgtgcgggaaaacccgtcctgatgcaggatcagatttttcttgctgtcgatatattcctgcatatcccggtgtacatccagatgattgggcgctacgttggtgatgaccgccacatccgggctttggcgcatggagatcagctgaaagctggaaagctccaccacggcggcatcgtcagaggagacctcttcgaccaccggcagcagagcgcggccgatgttgccgcccttgtagaccttttttcccgatgctttgagcatttccgcaatgagcgttgtggtcgtggttttgccgtcggatccggtaactgcatacgtcttacagggacacaggcggaaaaaaagctccatttcggaggtgatgaccgctccctcctgccgggctttttccagcgcgggatgatgaaaatacatccccggcgcgcgaaataccgcgtcatagccggtcagaccgtccagatagccgtctcccagcaccagccggatgccgctttgttcaaattcatcggctagagcccccagctgttcccggcttttgcggtccagtaccgacacctccgcaccttttttggcaaacaggcggatacaatcggtattggttacccccacaccgataaacgcaatttttttcccttttacccatcggaaaaactccgttgcattccaaccattcatggttcaatccccttttcgatcttctaccgcttattatacccactcggcgggaaaatagcaatcattggaagcgaataccggccaaacttttccgcattcagaatcctgccctgtggaaaatcatcgggtacaatcccagcgccacaaaaacaagtagcgcatatcgtgccgcatccagccagagaagcggcgggaacagcagcttcagcaaaaattgcaccccgcccaaaaggggaagacccagcaaaagccgcagtcccttttttccttttgatacctggttggaaaagccgacaaaccgccgttcaaacatcatgccggcccaaaagccggccagcaggccgaatgctttgtataaatcccgctgccccagcaatagcgtcggcaaaaagcaggccgctgtcatgattgcgagcattttttcatggtgaaaccggttccacaaaaatgggcagacaaaaaccgctgcaattcccagcgccagccccacggctacatccttggggtaatgcacccccaggtacaaccgggacagtcctaccagcaaactgaccgcgccagcggcagcccagcgccatccgccgcggcggcgagccggaaaaaaataaagcgttgctgcgttttggctgtgtccgctgggaaaagagtatccagtggccgtatgcgcccacagagtgcgaatgccttcttgtccgatcggccgttcaaaacggaacacaccttttaaaatattgttgcaaagcccgctgatcagcagggtaaaggcaaactcttcacccatgtttttgtcaatcacccaataagacagcgctaaggccagtacaactgcccattgttctcccagcatggtaatcagctggaacagaccatccaaaaaaggggaggaaaaggactgaatccactttaacagtgcaagttccatctttttgtaccctttctctttccagtaaaatgttgtgtcaaaaaccgtgaaaaacaaaagcagggatttctccctgcatgattgtatgtagtaaaaagccggtttacaactaaaactgcggtgcttttatgctggcgtttttctccaggccggctgtaggcttcaactcctgatccgcatctaccaaccgggccattaccacaaatcggccccttgcttccccgccgacatagccgtattttgccgtgcaggtggaaagcgtcaaaatcttgtcattgataggatctacctctacatcgtaaaggaattccgagcgcgctttgccctcactgacaagcgtatcgatttggttgtcgatcatctcgatatatcggaatttggtatcggtatacatcaccgcaaaaatttcccaaaccatatcttcttctccggtggagaaaaagatataagggtgagacgccgcaaattcttcatcggtaaaccgcagcagttgggcaaaatccagaccgttggggtcatcctggctgacggctgtattatgcccgtaaataatggtgttgcggctttgggtttcccgggttccaaccttgcactcatagtctacccaataacatccctgaaagctgtattttccctcgtaattcaagcgcaggtatttggaattgttagtggtttgcaccaccggctggttgatatcggttcccggcacctgcagccagccgacaatctcccgatttacttcctctgctttttgcttgacctgttcggtcagttccggcgcttctaccgcctgcatggcgttgtcgtccggctccttcagcgtgttgacaaacggataaacggaaggtttttcctctggcagggaagaagcactgttgtccgtacagccggtaacagatagcagcatcatcaatgccagaatcagcgcgctgatttttttataagagcatttcatggtcattctcctttaaaggtcaatcctaaactacctttcaatatatatgaaaattgccgctaaatcaactggaaaagatcttttttgctgtattttcctgtctttttccgctgttttgggcggtaaaaatcacattaacggtgcgaacgctttcagaatggcccggcccagacggcgcagcagcgggacccgttcatccgggttgggatgaatttcctgggaaatctccattgttttaaggatgtcctgtttgaccgattggattaccgaactgcggaaaaatgcgacgccgcactcaaaatgcagatagaagctgcggtagtccatattggcggtgccaaccactcctacctcgtcgtctgccacaaacattttagaatggataaagcccggtgtgtattcataaatgcgtacccctgcctcgatcagctgacggtaggaggaacgggtcaccgcatggacataccatttgtccggaatatgcggcgtgataatcctcacatctacgccgctttctgccgcaatggtcagtgcggtggtcatctcgttgtccaaaatcagataaggggtggtgatatacacatactttttggcgcagttgataatctgcagatagatattctccgccacgttaaattcgtcgatggggctgtccccatagggctggatataaccgtcgtccccgtactgccggccggagggccggtactcgtgatagtcggcattctttccgtcccggtagctccacagctgcaaaaacatgatggtcaggttccaggtgccatctccccggagcatcaccgccgtatctttccaatggccgtgtttttcataggcattgatatattcgtccgccaggttcagtcccccgcagaagcccacatccccgtcaatgacagtgattttccgatgatcgcggtaattgaacatggaattgagacgcgggcgaaaggggttgaatacggcgcatttgatgcctgcctcctccatctggcggtaataatggggcggcagtgtctggattgtgccaagatcatcgtacatcagccgcacatccacgccggcggcagccttttccttcataatatccagtacggcattccacatttttccttcctggataataaaatattccatgaaaataaacttctccgctttccgaagctcccgcagcagcgccgcccaaaagtcctctcccagaggaaaatattccacctgagtatttttccaaatagtgtacagcccaacattgctgatataatcactttgccgtttcaggtggggcgcttctttctccagggattccccaatgtctgcgccgatcacctgatggctctcctccacctgtttataggcataatcccggatgcgctgggcctgctttttgtccatggttttattgccgaataccagataaaaaatgccgccgaagaaagggaaaatcaaaatggcgataatccaggcaattttatacgaggggttgtcccgtttggtgacaatccaaaggaccacaactaggctgatcagctgcaagctgacataagcataaagcccataagtggaaagcttgagcacgataaacagcaaaaaacaaaactgcaccaaaatcgccagtgtgacgattaccaggcggctgcataaaaatttcagaacttttttcatctttttgtcccttcctccgtcggcgcggcagatttgccgctcttggtccgcgttacttcacgcttacggctgagccgcctttttgcagcgcaatggttccagtacgcatcacttcttggatattgtaagatttcagcagctcctccagcaaatccagccggtccggcaaatcgcagatctccagtgtcatggtagttttggtcagatccacaatattggcatccatgatttttgcaatatccagtatctcactgcgggtgcggccggtggcggtgcatttaatgagcatcagttcccggctgatcaagtcctgctgggggatggtgcgcaccttgatcacatccaccactttgttcagctgtttttccagctgttctaccgtataagcgtccccctccacgacgatggtcatgcgggatacggtcttatcctccgtaacccccaccgccaaagaatcaatgttaaacccacggcgggaaaaaaggccggtgattctggacaggacacccgcatggttttccaccagaacggaaatggtatgcttcatctttctccctccttacaccgcagcctcgtccggggacaccagacactgaagcagaaagcttttttccccggccaacagcgcctgtacggcttcgtcaatttcgtcgttgtccgaaatggtcatggcccgaatgccgtacacctgtgccagtgctgcaaaatccgggctcccggcaagatctaccgcttcataacgctctgcgtaatcctgcttttgaatctggcggaccagccccaggcaatcgttgcgcagtacggccattttgaccggaatgtcatgctggcacagggtggccagctcctgcatggacatttgaaaaccgccgtctcccatgactgccaccacctgccgtgcagtggtggccagcctcgcgcccatcgccgcgggcagagcataacccatggtccccatgccgccgctggttaaaaagcgaccgtcttttatattggctgagcgggcagaccagatctggttgagccccacatccgccacatacaccgcatcgctgtccagcgctttggtcaaggcggcgatcagacggtggggattgacaaaagaaggacggtcagaaaacggcgcgccgacgccctgcttttcccgcagctccgccagccacatgccggtatccgtggcctggcaggtctcgcacagttcctctaaaaccagccgcgcatccgccaccagagggatattcgcctccatattcttgcggatttctgccgggtcgatatcaatatgaatgatccgcgtctggcgttctaaaacgccgggctggcgcatagcccggtcaccagcccgggtgccgattaaaatcagaaggtccgaatggtgaattgcgtagttggccgcgctgcatccgaaagaacccagcatgcccaaatacagcggatgggatgagggcatcagccccagacccatcatggtcgtgaccaccgggatgcggaagcgctcagcaaagcgttgcatctgcgcgcgcgcgccggcgctgaatacaccgccccctgcgcagatgaccgggcggcgcgccaaagcaatggcctcggatacccgccgcatttgcagagggttggcgcgggtactgggatggtatccgcggatagaaaccgattccggataggcaaaatctagctcctgattctgcacatccacaggcacatcaatcagtacagggcccggccggccggttcccgccagataaaacgcctcctttatgatccgcgggatgtccgctgcgttttttaccaaaaaactgtgcttggtaaaaggttccgccgcgccggtgatgtccgcttcctgaaatacgtcgcggcccagctggtcgctgggaacctgaccggtgatggccaccagcggcaccgaatccatataggcggtagccagtgcggtcaaaaggttcagcgcaccgggaccggaggtggcgatacacacgccgggccgcccgctgatccggccataggccgcagccgcgtgtcctgcgttttgctcctgccgaacgagaatatggcagattgggctgtcggacaggcagtcgtacaccgggcagatcgccgcgccaggatagccgaaaactgtggtcacgccctcctgctccaatgatgcgacgatggcttttgcaccggtcatgtccagtccccctttcagcctttttaacaggcagtatcgtatttttttattataaaatggcaaggcttttccgtcaatagaaaacggcttgttcgccgggaaaagcctgctagaaaacacactgggaaaaagcggcgtttctatcggttagaaccggattttaaatccagattcccgcaggaaaaatccttgctgatctgctcggcagaaatggcgccggctcggacaagtctgcgctttcggtagaagctggtggccggaggattggggtctgccgcaaaaaggtggcctttttcggcatcttccgcaaaatcacatcagggttgtgccatccctaatttgggtgccgtcgcggttcatcttttaaatggttctttcatacatcctgtgtttgctgcggcagattactctggtctgcctgacgaaacgccatcagtttcctcctggcctgccttggcagcctaaaaatagtatatattatagctttatatttcccatttgacaagggttggccgccgcgatacaataaaaaaaacaaaaatagatgggggattttatgaaacaaaaacgaattttgccctttttgctggcggcggcgctgcttttggggcttaccggctgcggcgactcgtccgacagctcctctttgccggaagaagaaccggaaaatctggaatatccggtttccattggggacgaaacgattcctgccaggccggaaaaggtagtctccctttctccggcgctgaccgagctttgctttgatatgggttacggcgaccagatcaccggggtgagtgattactgcgattggccggaatctgcccggagcctgccgcagctgggtaccgcccagctgcctgatctggatgcgatccgggcggaggagccggatgttgtcatcacccataccaacctttcggaaaacgacctgattgcgttgcagcaggcggatattccggtggtggttctttcccgcgcccggctgccggaggatctgaaagacctgtacgtaaatctgggccggctgctggagggagagcaggctggttctgaggccggcaaagctttttacaatgaacagataggccgggtggagagcattcagcagaaggtggaggcttatgtccgcggcggcggaaaacagctgtcggcggtttatttgcggatgctggatttcaccgttgccaccggggacacgtttgaaggagcaatgctggaagccgtcgggtttgaaaatgttgccggcgcttatggcggatgggactatccgctggatttcgttggacagtacgacccggatgtgattttctgcaatgaagatatcaccattcccatgctggaacagaatgccaactataaaggattgcaggcaaccattcacgataccgtttactcctatgattttaccgcctttgagcggcagggaaagcgcatgttcgatatcttggaggatatggcaaaaaaagcgtatcctgatgcctttgccgaaacggctgtgaatcaggagacttcctccgaagcggcttagaaagctacgctggaaaatcctcgttctgaaaaggggaaaggggttcttccactggcgtggaagaagctccttcccggttgggcaaaacttacaaaagtctctgcggaaaaccagcccgcagagacttttttcgcaaatttccccgtttttttcaaagtaaacgtttttatcaggaaacgcttcttgcccgcttgatgcctatatgctaaaatgatgatgcttttggcgccgtatccttctgacgcgggtatttgcgggcattcgcctgcgaagctgacagagggatctgtccaaagatcatcaacagccgtaaatacggcgggagaggctggctcaacatgcataataaaaaagaagtatcccggcaaatttaccggatgctgatccccatgattttggaaaacgttttgaccacttccgcttcgctggtcaccaccgctatggtaggacgtttgactgcgctggaaatttctgcacagggcgttggcggccggattaccaacacttatttgtctttgttcaaagggctggccatcggcgtaacggtagtggcggcgctgtatttcggagaaggccgccgggacaaatgccgccgtactgtggaacaggcttttgccaccgcggttcctttggggctgatgatcaccggactagtggcagtttttccccgctggtttatccggctttttacctctgatgcagacattatgtcctatgcggtgggatatttgcagattttgactgtcgggctgccttttgtggccattacctgttttgtcaccgctgccttccaatctcagggcaacaccaaaactcccatgatgattgcaggaattgtcaatgttgtcaatatcgtattgggctggcttttgatcttcggcaatctgggactgccctccatgggactgaccggagccggtatcgcactggttagcgctcagatcgtcggtgcgctgatcgggctgctgcttttatatcacaagcgtattggcctgttccacggcgcggaacacggcaagagatttttcgctttggaaggggtttacctaaaagacatttacactaccgggctgcccgcctcctgtgaaaatttgttgtggcagtttgccacgattatcatcagccgggtgattctctcttacggcaccaacagttacgccgcttaccagcttgggctgcaggcggaaggggtgtgcgatatgctgtcagtcggctttatcaccgcttctactacattggcggccagggccattggccagcgggatgacgcgctgtataaaatgtactttaagcagctgattcgtatttctatgaccatcagcatttttacctgtgcggtgctgttcttctgcccacggtttttgatgggcctgctgaccgataaacaggacttgatcgaaatcggcatgaagtatgtatttattatgggctttgcccagatcccgcagaatttgtccaaaatttttaacggcaccatccgggcggcgggccataagtacaccccgatgatcatttccttcactgggatctggctggtgcgggtcgtgctgtgctgcctgtccggctgggtattccactgggatatcatcgctctgtggtgggccattgcgctggatcagatagtgagaattgccttcagcgcgattttcttctggaaaaagcgggtttaccacacggtgcagacgctgccgcctcttcacgaggaaaaagcaccagcacaagcatagaaaatacggtttaaaaacccggccgcaggccgggttttttgttcttatcaggatcgaaaagagatcatcctttttcaaaaaaacagtgaatattaacaaatttagaaaggaaaacgtttaagcgccggtcggcctttaaaagtctattgacaacggctcactcccccgggtatattggaaactgcccgaaaaaagggcagttttgtgtgggaaggcaggtgttccccatggcacgggaaaataagaaaaaaacggtgctgcaatctttgcgggaactgcggggaaacgcacgggttgcggtttttcacgaaccgttctggtcgattccttatggattttacagcttttatctgagcctatatatgaaaagccagggggttaccgatgtccagatcggctttttgatttctttaaactttattgtcggcaccattatggcgctgtttgccggcgtaatggtagataagatcggacggcgcagaacgactatcc

SEQ ID NO: 4294 - DNA, 3465 bp, Unknown
  16S sequences of unknown bacteria
cgcgataaataaggaggatcggcaatgtattcttatgatgaggtaatgacctttgttgaggaagaggacgtaaaatttatacgccttgcgttctgcgatattcacggcaggcagaaaaatatttccataatgccgtcggaattaaagcgtgcctttacctacggcgtttcttttgacgcgtcggcggtagcgggcttcggcgatgtggtgagatcggatctgtttttacaccccgacccgtccaccctttcggttttgccgtggcgtccttccaacggcagggttgtgcgaatgttctgcgatattaaataccccgacggcaggcgctttgaaaaggacggaagatatattttaatgcaggcggtccaaaaggcaaggcaagccggtatttcctgctttttcggcgcggagtttgaattttatttattcaatcttgacgataacggcgagccgaccgacactccgtttgacaaggcaggatatatggatatagcgccggacgataagggcgaaaatgtccgccgtgagatatgctttaatctgcttgaaatgggaatcttccccgaaagctcgcatcatgaggagggccccggtcagaatgagatagatttccgctacagcactccgctgaacgctgcggacaatgcggtcacctttaaatcggttgttcagacgattgcccgccgaaacggacttttcgcggatttttctccgaagcccttaatgcacgaaagcggaaacggacttcatataaatgtctccgtaaaggcggaaagcggcgaggatgtgacagaaagctttatggccggcgtgcttgagcacacggttgagatgacggcgtttttcaaccccgttgcggcgtcatataagcggctaggcgagaagaaggcgccgaaatatgttacctggtcgcatgagaaccgttcgcaattaatacgcatacctgcggtcaaaagcgaaagccaccgccgcatggagctgcgctccccggatcctgccgccaacccttatattgtctatgcgcttataatctatgcggggcttgacggaataaagcggaatttaaagcccgcagcgccgtgcaactgcaatctgttcaccgccgattcgtctgttacggattcacttaccaatttacccgacacgattgaaaaggcacgcaacattgcgaaaaacagcgagtttataaaacgcgttttgccggagggctacgccgaaagcatttaaaagggggcataacgggtgtaccgagataaaacaacactcagcgcacttatagtttcctcctcgcaaaaggctgccgattatctgcgcgatatattatcgaagctgcggttttcgcccgtggcggaggcggtaagcattgcggacgcaaagcggcggcagctggaaaatcagtttgatctggttttgataaacgccccactgcccgatgatttcggaattgaattcgcggaatcgctctgtacggacagttctgtgggagtcctgctttttgtaaaggcggagttgcttgagcaggtaagctacaaggtcgaggattacggcgttttaaccttccctcggccgggcacgcggcagagcatcacaagcgcaatacggcttgccgcagcaacgcacaaccgcttatcggcatttgaaaggcgagcagtcaagctcgaatcgaaaatgaaagagatacggcttgtaaaccgtgcaaaatggctgctcatagaccgctacaacatgagtgaagaggaagcgcacaaatacatagaaaaaaccgccatggataactgcgcgacgcgcggcgaaatagcggaaaatataataagaacatacgaaagttagaaagaggccgtaaaaatggaaagttcgtataaaaaaacaaagtatattttcgtgaccggaggagttgtttcggggctcggcaagggcattacagccgccagtctcggcagacttttaaaggcgcgcgggcttaaagtcgcgtcgcaaaagcttgacccatatattaatgttgaccccggcaccatgagtccctatcagcacggcgaggtttatgtaaccgaggacggcgccgaaaccgaccttgatctcggtcactacgaaagatttatagacgaggacctaaacaaatactcaaaccttacaaccggcaaggtatactggaatgttttgaacaaggagcgccgcggcgaatatctcggcgagaccgtgcaggtaatacctcacattacgaacgaaatcaaggaatttatttactccgtaggtaaaaaatccaacgccgatatagtaataaccgaaatcggcggcacaacgggcgatatcgaaagccagccgtttttggaggctatccgtcaggtagggcttgaggtaggtaaagaaaactcgctttatatccatgtaacgcttgtccccttccttcgcggctcggacgagcataaaacaaagccgacacagcattcggtcaaggaattgcagggaatgggaatcagcccggatataatagtgcttcgctgcgatgaaccgcttgaggacaacatattcaaaaaaattgcgcttttctgcaatgtaaaacccgattgtgttattgaaaacatgaccattcccgtgctttacgaagcgcccataatgctcgaaaaaaatcatttttccgatatagtctgccgcgagctcggaatatacacgggcgagccggagctcaccgactggaacgaaatgctcgaccgcattaaaaaccgcaacaaaaaggtaacgataggtcttgtcggcaagtatgttcagctgcatgacgcttatttatcggtagccgaggcgctgcgccatgcgggctatgtttacggtgcaagagtgcagataaagtggatagactccgaaaccgtaaacgataaaaacgccgctgagacccttgcgggctgcgacggaattttagtacccgggggattcggcaaccgcggaattgagggtatgattgcaaccgcacggtacgcgagaacaaacaacgttccctatctcgggatatgcctcggtatgcagattgccgttattgaatttgcaagaagcgttttgggactaaacgatgccaactccggtgaattcgacgaaaactcaagccacaaggtaatagacttcatgcccgaccagagcaatgagatgaacaagggcggaaccatgcggctcggcgcgtacccctgcaaaatagcggcaggcaccaaaatggcggaatgctataaggcggaggaaattaaggagcgtcaccgccaccgctacgaattcaacaacgattaccgcgacgatatgaccgcaaagggtcttgttataagcggaacctcgcccgataaccacattgtggaaacggtggaaattcccgaaaacgatttctatgtgggcgttcagttccaccccgaattcaaatcccgcccgaacaaggcgcatccgctgtttatggggcttgtaagggcaggactcgataaacaaacgcgc

SEQ ID NO: 4295 - DNA, 11314 bp, Unknown
  16S sequences of unknown bacteria
cggttagcgacccgcaggtgtgtcacgaaacgagcggggactacggcagtagtcctccgcgacgattgagtggcagcagtgcctcctgcacctccacttttttgacactctgcaaaaggcaaaacttctccgcaccaaagaaaacttttcgtcctttccgttcgtcatgtataatggaagtcccaaaaccctgcgcagggagccaggacccattcaccagcaaaagaggaggatcgttatggatgcgaacaccttccaggcggaggcggaaaaatacgaacggctgatgttccagatcagctggtccatgctgcgcaacagcgaggattgcgccgacgccgtacaggacgcgctcataaaggcatggcagaagcgggatacattgcacgatgaggagcgcttcaagccgtggctgatgcgcatcctgcacaacacctgcaaggacatgctccgccgccgaaagaaggtgcgctttgtgtcctacgaagaacagaccctgaccgttcagcccccggaagtgcccatgcccgtaaacgaggccattgagcggctacagccggagtaccgcgtactgatcactttgtactatctgggcggctttgatatgaaggatctggcgtccatgttctccgtgcctgtgacgacgatcaaatcacggatcacccgtgccaaaaaacaactcagccttctgctcaaacaggatggggaggaagaagccttatgaaagaacaggaaatgaagcggctgatcgaagaaaatattcccgaaacgccggaagccttccacgaccgaatgaatcagaccctgaacagcatcgtggtgcaggaacgctgccagcggatgctggaaaccaaggacgtacccgtgcgccgggccagacggctcagcttcgccctgacggcggcgctcagtctggtgctggtggcggcggtggccgtggcggccatccattggaacgtgttcgaccatctgttcggaaatacgcctgaaaacgcggatcaggtgatgcagtcggtcgtgtgccggcaaacgatcaacaatgtagagatcaccgtggacgaggccggctacgacggcaagaccctgtacctgcagtggcgctatcggatgctggacgtggaccgcacactgggcgaccccgacgagagcggcctgtatcccgacgacctgcagctcctggacgaacacaacgtgggctggtggatcgaccatatctggatcaacggcaaggccatcgacatgcccgccaattccgccggggacgagcggggcagcagcgtacccggcgagatcatcgaaagctggtcctaccggctggacaacgaagacctgtatctgccggacggcaagatcgagatttctctgcccattggcgaacgccagccccttgacgactacagcctgctgaaccatcccgaagtttacgatgaagatggcaccttgaagctgccggagaagggcatggtcacgttccagctcaagaccgacatgcgcagcaaggtaaaggtggaaaagcccgagcagtggacagaaatgcccgacctgcgcgcctgcgtcagcgaagcggactatacacccatcatgatgtatgtgaccctgaaactggagggaaacccggacagcctggccaaattcatcgaggaaaacggcgagggctatctggacgagaacggcgagctgctgtggccctacagcggtatggacgtgtacggcgaatgggcgtccggcctgacgctggtggacggcgacggcaaggaagtgttccccggcatgcaggaagaatacggcttcgtgtacggctgcaacggccacggcgacaactgggctgagtatctgttcccctatcgggagagctaccccgccgaaatgtggctcgcacccatggaaaacggcacggcggacatgacgaaggccgtgcgggtgcgctgagcctgaacaggaggatcgaccatgaaacgcagtattgtgaccttgctgaccgcgctggcgctgacctgcgccctgtgccttcccgccggagcagagacccttgcggagctccggcaagagacggcgggcggctggcatgagactttgacggacaaaaacggagcgtcggtcgttatcgacgcggatattgacattcggcccggggcggaggaggtctccgccctccgggtcagcgccggtcagccggtgccggaaagcaaactggatatcttcgacggcaactatagcggccgcatgaacgaaaaagggatgctcagccagctttcgcccacgatgattcaaggcttggaagaactgggcgcctttcttggggcggaaccgcagggccgaaaaatccccgacgtgaccgccaagggcggcctttcctatgaggcggcgttgaaaacggcggatgagatcgtgaaccatcttttcggcacaagcatgaaagactacgaactggaatccgtagagatcgctcactgggaaaatcgggatacctgccggtatgaattttcgccggtggtcggcggtctgccgctgggcagcgcgcctttcgatctggacgtccgttctcaggaagactggggcgtgagcttcgtcctctacacggtggacggggtggaaacgcccgacttggagctggctcccttcgccaaagtgcaggagacgctgaaagccgctttggcgaaggcagacgtgcagacggtgctggggcttttcccggaggaaaccctgacctccattgaaaatatccggctggaatacctggcctttgcggacgggaagggcggcgttgtccttcggcccgcatgggtgatggacgtttactccgaaaacgaaggcccacaggtcagaagcctgtgcttctccgcccagaccggccaaaagctggaagtgaaggacgggctgtatcggtagaaactgtaagggaaaacgaaagggaagtccgaaattggacttcccttttttatctccgatttacagccctatcggcatagccatgccgctgtgggcggcagcgtcccgattcagcgtatcgccgtccagaatcagctggccgttgacaaagaccttttcgatgccgaaggatttttcctgatcggggacggccgccctgagcaatgcctcgtcaaagacggtcacgtcggcgtagcaaccctcccggaggtagccgcgatcccgcagctggaaacgatccgccgcagcgccagtcatccggcgaaccgttttttccatggaatcgccaacgccaagcgccgcgtcccggagaaacttgggaaaacagtcgtaaatggcggggttttgaacgccgtgatcctccacccatgcgtcggtcatgaacaggcacagatcgtccttttcaaaggcgtgaatgatctcttccgtggtatagggccccatattgacccggccctgaaagttagactcccggcaaaggcgcaggtacatgtccagatcgctgacgccacgctcctttgccagctgatgaacggttttgccctcgtattcctcgtagccggggccgatgtaggcgatctcaatgtcgcgaaaatcaaaacccagcagcaggatggaagcccgcaccagcaagcggagtttcagccggttcaggggtttgcaccgttcttcctcgctcatgccctggtaccatgccggcagaatgaccgtgatgacggacacgcctttggtttcgtggtaaatatcgaactgaacctgaacgccctctcgccgcatccgttggatgatggccatagcttttggcctatcggaaaaggtgttgcgaccgacgaaaataaaatgggaatactgcagcttgagattcgtgcctttggcaatgtgctccagctcgtccagcgccctcagcagatgagaacggcccagcagctggggataggccatcgagaccttggactccgcccgggggtgtacggtcaggggccggtcgtatttcacgcacagcgcggcgacttttttcagctcttcttcatcggcgtaaagaccgggcgagtacatcagccccagcgatatgcccgccgcgccctgtttcaggttttcttccagaatggccagcatctgttgctcttcttccggggtcagtttgcggttttcaccgcccgcaacgctggcccgggcgctgcaatggccggccagcaccgcgatattgcagggcatgtttccatcgacagcttcaaacaggctttgggcatccgggtaaacgccggtggtctgtccccggtagccgaacagcccgccgcctatctggttggtatagggcgtttctttttcaaaaccgatggcggacaggccgcagttgcctgtgacaaacgaagtaatgccctgccggatgaacggttcgaagcagggcaggcagtttggacggatggcgaaccagtcgttgtgggaatgactgtcgataaagccgggggcaacggattttccttgcaggtcatagattttgtccgctgcagcgtcgatccgaggcgcaacgcgggcgatgcggtcatctttcagcagcaggtcgccctgaaagggcggagcggcagtcccgtcgtagattttggcatttttcaacagaatggtcataggattcctcgctttccgatgtagggttggataagtgcagaataacgaccttattatacgttattttttcaaaaataccaatttttgatttttcctcggcagagagcgaaactttccccctctcccaagcgtcctatagggtgaaagcgcttatcccatgcgcccggcggaaaaacggcgggccgaaaggaaatatgctacaaatgaaacggcttctgtcattgctgttgacggcaatgcttgtgtttttggtgcccttttccgccttggcggaggagccgctgcttcggctgacggtgatggcggcgggagaaagcgactgtatgctgctggaatcgggtggcgaagccatgctggtggacggcggcagcaacaagtaccgcgaacggctggtgaaaatgctggaaagccggggactggcccggctcaagtatctgtataactcccatccccatgacgaccacatcgacggcctgtaccgggcgatgcagcaggggatcaccgccgaagcgtttttaacgcccttcgggccgggactgcccagcgagctgcacagccgcactttgaaaacggccaagcggcgggaaattcccgtgcgggtgctggaaaacggcgagagcttttcactgggcagcgccaggctgaccctgctgcgctggatggcgggatgcactctcaacgaccagagtgggatgctccgggtggaggtgggggagacggcgctgcttttgtgcgccgatgtgaccggcaaggcacagaaagcactgctccgcagccttccgccggaacttttgcgggcggatgtggtcaaagcgccccatcatggcctgacgccttttgtcagcgaatttctggacgcggtggagccgcagatgatcgttgtcaccaatacgccgcgccgcgcgcccaagctggccggtcaggcgaagcatcggcagctgcccctgtatttcagcggagcaaaaacgctggtgctggaaacggacggcatgaattggacggttcgggaggaaaaaccatgagcgggaaacgaatgatctggctcctttgcgcggcatttttactggcgctgatggttctgcccgccctggcagagacggacgagatcgtgctgaccttcggcggggactgcgtgctgggcacccgggaacaatggaaaaagaagaaaaacacctttgacaccgtcgttgccgatcagggcatggagtggtgctttgaaaagattcgggagccattcgaaacggacgatctttccaccgtcaatctggaagtggtgctgcagaagggcagcaaggggcacgaacggagcaagcagttcaccttccggggcgacccgtcctacacggaaatcctgtccgccgcgtccatcgagcatgtgaatttggccaacaatcactatatcgacttcggcagacccggccgggccagcacggtggcggcgctggaggcgggcggcattgcctacagcggctacacctatcgttatgtgacggagatccgcggccacaagattggtttcggcggctgccgggagacggtctggcggcagaagccggagatcatgcgggaggacctgcaggccctgcgggaggaaggctgcgaggtgatcgtctactcctgccactggggcaaggaatatgccgcccggcataacgagcggcaggaaaaaatggcccgggaggcgatcgacggcggggccgatctggtgatcggaacccatcctcatgtggtgcagggcgtcgacgcgcaggacggcgcggtgatcgtctatagtctgggcaatctggtgtttggcggcacccacaaaatgaaaaccttcgacggtctgctggttcaggcggcgctgcggtttgacgagcagggctacgcgggcgtgtcgctgcgactgctgccggtgctgacctccggctctgcgccggaaaacgacttccgtccggtattcgcgcagggcgaggacgcggcgcgtattttgagcgccgttcagaaggacagccccttcgccgtttcctccgaaatgtggttccccgcccgctgacccttgcatggccctctcaaacgtggcatactaataaggggagacgatggggcctgtgcggccccaaaccccgcagttaagggcttcgcccttagcaatcccgacattggccgtgctatgcacggtcaaaaatgggccaagggcatagcccttggcagggtgcaggggcggcagcccatgcagcagcgttgaaacggaggaaagaaacaatgaaagtgatgcttttgaacggaagcccccacgaaaagggctgtacgtataccgcgctggaggaagtgcagcgggaattgaaaaagtgcggcgtggattcggagattctccacgtgggtcacgaggacatccacggctgtattggctgcggttattgcggccgggagggacgctgcgtgttcgacgacgcggtggaccgtatcggcgcaaggctggatgagttcgacggctatgtgttcggtacgccggtgtactacgcgggcatttccggccagctgaaatcctttatggaccggctgttctacgcctataagaaccatatgcagtataagcccgcggcggcggtggtcagcgcccgccgtggaggctgcgtgtccacctttgacgatatcaaccgcttcttcaccatttcctgtatgcctgtggtgccttcccagtactggaatcaggtgcacggcgcaaagcccgaggacgtgcggaaggacgaagaaggcctgcagatcatgcgcacgctggcccagaatatggcgtggatgctgaagttgatcgaactgggaaagaaaaacggcctgccccatccggagcgagagccgtttatgagaaccaattttattcgataacgtccggcagttcgccgccgtggcgaatgatggcgcgccatacgtccaatacgtggtcgcatttgcggatgcccggcttccaaagcccggcgtccgcttttgccatcaggaagggatgaccgacctcggccagcatactttcgtcgttgtagttgtcgccgaacgcggcggcctccgcgggggaaatgttcagcgtccgcatcaggtctttcagccccatgcccttgttggacaggttgaaatcgcaccattcctcgccggagcgggccacgttcaccgcggagccccatttcgactgcagcttgtccatgaaggggtcgatggtgccgggatgataggccgccagcttgatgaaatcatcgtcgatctgggaaaaatcgtccacgatggtcatggtgttgcgcagggtatagaccatgctgtcgcagaagggacggtcgctggccagcgtatagcagcagcgaacgccgcttaaaagaatactcaatccaagcccttgcagggtctgggtaatgcccagcgcagcggcgcgatccatggggtggatgctgacgatctctcggcccaccgcgttcaggccgccgttttcgcacacgaagcccatttcccgggcgatgggctgaaacttccggcgcaggttgtcatactgccgcccactggccgccaccagcagaatgccgagctttttcagatcctccgccacgtcgtaaaagccctccggcagcgcgccgcctttttccagcagcgttccgtccaaatctgtcgcgatgagtcgaatcatagcagcctcccgttttttgcgtattcaaacgaaagggattataccagaaaacgcggggctttgtcacccctttcccggccgtttgttctttcgctgcactttgcttgcaaagcggggatgcacctcttacaataggaaggaaagaaaacgcccgctcgggggctcggtttcggaggaaaggattttgcaatgacgaaagcaaagattgccatgaaaacgccgctggtggagatggacggcgatgaaatgacccggatcctctggcagatgatcaaagaaaagctgattctgccctatgtggatctgaaaacggaatattacgacctgggcctgaagcatcgggatgagaccgacgataaggtgacggcggacagcgccaacgcggccctgcggctgggcgtggccgtcaagtgcgccaccattacgcccaacgcccagcgagtggaggaatacggcctgaaaaagatgtggaaaagccccaacggcaccatccgcgccatgatggacggcaccgtgttccgcacgcccattctggtgccgggtatttcgccctgcgtccgcaactggaaaaagcccatcaccatcgcccgtcatgcctacggcgacgtgtacaagaacacggagatccgcgtgcccggcccgggcaaggccgagctgtgcttcacggacgaggacggccgtgagacccgggagaccatcatggatttcggcggcagcggcatcattcagggcatccataacacggataagagcattctttcctttgcccacagctgcttccgccgggcgctggatatgaagcaggatctctggttctccgccaaggacaccatttccaagacctacgaccaccgcttcaaggatatttttgcggaggtgtacgaggcagactataagcgcgcctttgaggaggcgggcattacctacttctatacgctgatcgacgacgcagtggcgcgggtcatccgcagcgagggcggcttcatctgggctctgaagaactacgacggcgacgtgatgagcgatatgctggccacggccttcggcagtctggccatgatgaccagtgtgctggtagcgcccaccggccagtatgagtacgaggcggcccatggcaccgtgacccggcattattaccgctacctgaagggcgaggacaccagcaccaacccggtggcgaccatcttcgcgtggacgggcgcactgcgcaagcggggtgagctggacggaacacccgacctgtgcgcctttgccgaccggctggataaagccacgctggacaccatcgcaggcggtcagatgaccggcgatctggcccgcctgtacgagggcgaagcccagacgctgaccagtgcccagtttatggacgcgatcgcggcgagaatgtaaaaccatagacaaaagcccgctccgatctcggggcgggctttgctgtgttgctcttattcctttaccgtcagaacgctgacgccgtcggggatgaccaccacactggcgtgttcgcccttgagccggtaggcgatctccagtgcttcgtccggggtggaggcggggatcatattggctttgcgcacttcgtcgtggctcaggaaggtggtgaccagaatgaccggatgcttccgcagcacgcggacgcagacctgcgtacaccactgctccgggatggtcttctccggcgggatagaggacagatagcggtcgatctcgtctggcgtgccccgctggatcagctggccgaaatgcgcgccgcccatgccgtcgcagcagctgcagcacatgatgatcacgccgtcctcgcccgcacaggcttccgccgtggccatggccttgggactctggtacaggttttgatccagaggatagccgccgttgctggtgatgacgatgtcccccgtgaccaccgggcactgagaccactggcggatgaacgccaccccggcttcgtgggccttttccagatcgcctgcccacgccgccacgatcttcttttcgccgtccagcgccacgttgaagatgaactgcacattgaccgccttggcggcgcagagcatatccgcgtgaatggggttgtccttcagcattcccgagttggagcgagggtgggacacggccttatagctgtggttttcattgaccgtccgttcggaacaaatgccgggcaggatgctcttgcgtcccccggaaaaaccggcgaaaaaatggggctccacaaagccttccgtcaccagcaggtcgcattcggcggccagccggttcacctgaaacaccgcgccggagggaagagtacacagctcgacaaactgctccggggcgaaggcgttgttgatggcgatcttctcatgatcgacgatcgcgtcgccgaacatgcggcgctgttcctcctccgtggtgggacggtgcaggccggtggcgatgagaatggtaatgtccgcgtcgggattgcccgagcgaatttccttcagcagcaggggcagggtgatcttgctgggcacggcccgggtatggtcgctggtgacgatgacgatttttcgcttgccttccgccagcgtccgcagacggggcgaaccgacgggatgctccagcgcgtccagcaccagctgttcctgacttttttcggcatgaaagccgtgcattttggccgtcagtacggccttgaggttttcctcctccacatgaagagccagtgtggaggtatagtaggggatagggatcgtccgttgcatgggcgcggcctcctgtgcctgtttttgggggaactttttttctatgtgccatgataccaaagaaggccggagaatgtcaatacagaggaaaacggcgctatttgggtggcttcgggtggaaaaatctccgagaaccgggagatttggaacttgacagcccttagaacaagttttttgattttgtcaagtcacaactatgcgcgattacgcatagtttttgagccgtgaaagaaggccaaaaaggaggaaaaccgcccggaaaacgcatcgcaaaaaagacgaaaatcgttgaaaataaagagaataatgtgctttataacaaatgaaataataatatagagtccgctccgcaaccaccaaaacataagaaaaccaacatgtgaacggcccg

SEQ ID NO: 4296 - DNA, 8859 bp, Unknown
  16S sequences of unknown bacteria
ttgcttttatcaaaaatgtacttgtccatataataaatcctccagtataatatattcgcacatgcgtcaccgttctccgattgccacattctgttatatcctgttatcagatttttttgcctttgtgtttgcccttatcaacttcccagggaagaataaatacaagtgaaatcgtataataagttaaggtgaatattttgcgagaaatcctttatttcccttcagaatccaaatattattttatagaagagtacttaaattctgatagataagcattttcctactatgaggctaaaggaactcttatatcttttcctccgaaatagataaaagcatgtctgctgccgtagctgcaattatgaaaaatatgatgaaatcggtgccttcggcactacagaatacgaaaacgatgatgcatcagcaaaagctcggaaacaaaaagtcattataaagctcatcgctgttccgctatattttctcataatgtacggctacctgtttattctttataaatagtaatgttttttggaaaaaggacggctgcctgtaattcaagacagccgtctttttatcataaaccgtattctgttatttatgatacttctcgcccctgttaattttaaaggcgcggtagatctgctcgagcaggatgacgcgcatcatctgatgcgggaatgtcatcggcgaaaacgaaagcttcatatcggcgcgcgccgatacggcaggcgaaaggccgagcgagccgcctattataaacacgacattactgcgccccgaaacgccaagctcctgcacgtgcgccgccagctgctccgaactgagctcttttccttttatttcgaggcttatgacatatgcgtccctgtctatgcggcgcagtatctccctgccctcggcttcctttactgcttcttcctcggcagatcccgcattgtccggaaggcgcgcttccttcacctcgtctattttaagcgtgcagtatggcgagagcctttttgcatactcgcaaaccgcatccgtccagtatttctctttaagcttgcctacgcagagcaccgttatgttcatcatttttcaaacctttcttttgcagctcgttagcctgcctcacaactgcgcggcttcacacaattcaaagtacagctacttgccaagtgtaaatacagggctcagctcgtctctcttcataatatgtagattaaggtgtttccctatatatatttcgtgctcctcaagcagatttttaaccgtttgatacgccatttccggaaagttattttctttggacaaatgcgcaagaagcacctctctgtactctcccgtctcttcgcatatgcggcatatctcgcttgccgcggcgtcatttgaaagatgtccaagctcgccgagaatgcgccgtttcacactgtacgggtaacggcagaactccagcatatgcacgtcgtgattcgcttctatcaccagcagctccgaatcccttatagcctcgtgtatttcttcagtaataatgcccgtgtcagtaacgatactgagcttacttgttcccgcggcaaaagaatagcctgtaggctcagccgcatcatgcgaaagagaaaagggcgtcactattatatcgcctattttaaatatacgtttagcagcaatttcaccgcaccgcgcggattccagacatttcctcagttcgccggccgcattccatgtgccagcactcgcaaaaaaattcgcgttttcaagcttctttgcgagcatctgcacgctttttatatgatctatgtgctcgtgtgttattaacacgccgtctacatcttcctgatttataccgagggccgcaagtcctgcgaatatccgcctgccgcttattcccgcgtctacaagaattgccgtactttctgtacgcaccagataacagttcccgctgctgccgctcgcaagtgaacaaaagctcagcttcatccttgctctccttatcttttaaatgcttctatatacgcaggattaccgcttgcaaacgttatcctccaagtcggcagcgccgtgtcagtcacagcttccatgctgtcatacgacgccgaatttacccagtatacaagttctatctccgaaatatgcacttcctcgtctccctctttttccgacatatacgcaatcagcgccgctgccgcggatatggtttcttgctttttggcagaaaattcgcccggctctaaccaataactgtcaaagcccgtgatttcttcgcccgtgaatgtacatatcataaagctgccgtcaagttttaacttatcaacttcacatccaaacacaacctttaccgtatctccaccgccttctgcatttttatccgctttcgtttcagagctatcatctccgctgccgccatcctgcgcgcgcacaaccttcgcctcggaaatatattcactctgcataccaagatagcttataaaatcactggccgcttctatatacgcctcatcgctgccgcccgctgctcttatatctgtactttcaatgagcgccgctatgtcttcctctgctacccctttgtactcaactgacagagccggcatacttctgtgctttctcggtattttttgtgcatccacataaatattattaccctcaagcacagccgcgagcgcttcttcattgcccgtttcttcggtattatatttgctgccatatgtcgcgatgagaaaaatatctgttacgatcagcgctattattaaaattgtctttgcttttgtccaatccattttctattccaccaaaaaatacagcttaatttgcgtatgatgcaccccgtccctcggagaaattattaaagccgagaagctccgccgtataaatatcaaaatatactgccaaattgccgcgagccatactaatcacatagcagggtaccagctcattttcttcctctttatataaatacccgctgctcatgtcgcatatagagcctgtaacatagttaaagcgctcatctgaattatacaaaataccttgggcacctctttcttcttcagacaattcatatccatgcaccgtacttctgagtatcgtgtatatattctcataattacccgcaattacatttaacgccgatgccgtttcagaaaaactgttcgtatgagccttctgctcatcaaaattgagaaaatacctcttaaaatatgttacttgaccgccgcaaacttctatctcaagcggactgccgttttcaaaatatacgttttcaccgcccgcggcaaagccaaattcaaatctgtacccaccgccgtcaagctccccggcatacgcaatatacggattcaactcctgatctgtgctcgtagcaaatccaccctgatcagcaatagctacaagcgccttttcaagcgctgcaaaataggtatctgcgctgctgccattaccacttttttcaggctgcgccctgtacacaaagctgccgttggtatttgccgtaaaggttttctctccgtacccgtacatatatattatcctgccgctcttttcctctatttttcgtacaaaatcaaaattcccggaaaaaaagcttctggctgcttcctctgccgttttttcgtcctcttcgccaaaatcctgcgatacgttaagcggcgcaagatccgtttcgagaatagacggaataaatattctttccgcaaagtcatttcctacatactgattaagcggataatacgtctgattttcttcagctgcgagcacgctcgcctgctctaaaagcgtctccgatgaaaaatcagatacaacacggaaatacttatcgcttttgccgtcatatataaacagactgtccgtactgccctgcgaaaatcccagctcgcttatgctctcgatagcatccgtcgcgctggagttatcaggcgcaataaaactgcagtactcattaaaaggcaaaaaatattcaaacactgcccgaagcgatacaaagctcattatttgttcatactgttcttttgttatctcttccgtataagtatcctgtgaggaaataactgatttaactgctgcaaacactgacatatcactgccattccaatatttctctttgtttgccgatatcttcgtataggtctcgtttccaaagcatatgtcgatgtggctcggcactgtgatatcatctatggcaataacattttcctttccgtcactgaagcgaaggtcagcaagcgaaaattctttcagctcctcatctttccaaaaaaaatataaaagtagtatcgtaaacaaaaacaatactactaaaacaacattcttaattttttcttttattgtgcttctaccctgagtcattttgttttcctaattgccgaaaattgattttaacagtgattgcaggaaattgtttaccgttcccgagctgttgcttgagaatacttcggcttcactttctttttctgcaactgtaacgctgcgcgaagtctgatacagcaccttgccgtcgcttcctattgtatctactcgtacaatataattgccctgcgcaacgttttcaagcttttttgtgtaaaagctgaggtttgtcgtcgtggtaaagttctctgattcaaataccgaattccatgtcaccgttcttgtttccgacaccgtgccgtccgccgccactgtgctctgagtagtcacagtctccttgagtacggttgtctttatagtctgcggtctcattattttaacagaaatcaggagacttgttgaatttacaggcgtatcggctaccggattgacgattgtaatgtttggatccgcttccgccgcaaaaactgtgctgcaggcaccgaaaatcattattaccgcaacaagaaagattgctacaattctcttcaacgctatatctcctttccgcaaatttcttttttaatggcattataaaccaagatactgttttaagtatacattaccaatgttacaggcatattacaaaggatttaagaggcatttacatttgacttttaagctcttaaatttgataaacggcatattgtcacgcgatatagcaacgcttgaaaaagcgctgaattatcactatttcttatatccgggatttgacaatgactccctctatgaagaatttattatatatggcagcaatcagtccgatatttaaaaaatctataatatttgcctttcatttatctttgtttttatgaattatcacaaaatttcgacgcattttacgatttttttgttgtttttttacaaaaaattttaaatgtttttattgacaagcaacatctttatatgtataatcatatcagcataaaatgcaccttgcaaaatgtgcattttttattatttatagactcccccctgtatacgcaggaatttaggggttttctgtctataatttagatatattatatatcatatattaagaaagggaaggtaaaaaaaaatgacaagaacaacaagaagaatgctatcacttctgatggcggttatgatgctcttcgcgcttgcagcatgcgggggagagacacaggacaatgaaaacggtgatgatactaatgttacagcaacaggcgttgaagacggcgtcctcacagttggtatggaatgtcagtatgcaccgtacaactggactcagatgacagacgaaaacggcgccgtggccatcgccaacaatccgggctcgtacgcgaacggctacgatgtaatgattgcaaagaaaatatgtgaagcaaatggttgggaccttgaaattatggccatcgactggggcggacttactcctgcacttgaaagcggacagatagatatggttatcgcaggacagtctatgacagaagacagaatggcagaagtagatatggcgggtccttatttttatgcttcgattgtatgcgttacaaaggctgacagcccgcttgcaaacgccaatggcatctccgagcttacaggtacctgcacagctcaaagcggaaccatctggtacgactcgtgtctcggacagattgaaggcgctgacattcaggctgcttccgaaacagctcccgctatgattatggccgtagagtcaggcactgttgatttcatctgcaccgatatgcctacagctatgggcgcggtagcgacatacccagatctcacaatcttggacttcacaggacaggacgataactttgttgtagacgaaggcgaaatcaatatcggtatctcggtggcaaagggaaacactacactctttgacgctgcaaacgatgtacttggcactatgacagcagaagattttgaatcaataatgaacgatgctcttgcagttcagccggagatctaaacataactaacgaattacagaggttttaaagaaatggaacgaattattgacttggggcacgatatggcccgcatatgggcgcagtactaccctgcctatatgacaggtgtacgcaacaccctcatacttgcctttatcgccactcttgcaggcggtatcatcggatttatctgcggaattcttaataccattccgtattctaaaaacgatccggcagtcaaacgaggttttatagcgttcatacgcgccatagtgcgcatatatgtggaattcttccgcggcacgcctatggtgctccaggcagttttcattttctacggactgccgtattttacttttaacagagttcaattcacgggaaacagcggtatttggattgcctcgctcattatcgtctcgataaacacaggcgcatatatggccgaatccgtccgcggaggcattctttccatagacagaggccagaccgaaggagctatggcgataggtatgaatcacatacagacgatgaccagcgttatcatgccgcaggccttaagaaacattatgccgcaggtagcgaacaactttataataaatataaaggacacctccgtaatgttcatcatcggttttatggatctctttgcccagcacaggaacatagtcggcataaactacgcctttttcccgtcggcagcgatagagatgcttatataccttgcaatgacgttcacagcttcgtgtcttctgcgtttcattgaaaaacgcatggacggaaatgacaactacgagcttgtgcttgcggatatagcaacggccgcgggaaattacaacttcccgaacaaaggcactccgtttgatgagcaaaaccgcgaggtagcgcatatggaaaatgaagaacgcataaattcggaatacgttgcggaaaaccatggcatttctcaaacgccaagcgcggaacagacggaaacgatcggaaagggggcgcagtaaaatgacagagcctattttgaaaataaatcatttgtcaaaatccttcggcaatcacgaaattctgcgcgacatcgatttcaatgtttacaaaggtgatgtaacgagcatcatcggtatgtccggctccggaaaatccacactcctgcgctgtataaacctgctcgaaacaccgacaagcggcgacataatatttaacggcgaaaatataacatcaggcgctatgagccctacgacatatcgcgcaaaggtaggtatggtatttcagtcatttaacttgttcgccaatatgacagtactcgaaaactgtatggcaggacagataaaagtactgaaaaagagtaaagatgaggcacgcgcctgcgctctccattacctcgaccaggtaggtatggcgccttacataaacgccaaaccgcgccagatatccggaggccagaagcagcgtgtcgcaatcgcacgcgcccttgcaatgtcacccgaggtactgctttttgacgagccgacttccgcactcgatcccgaaatggtcggagaagtgctctccgttatgaaaaagcttgccaacgacggtatgacaatgcttgtagtaacgcacgaaatggcatttgcacacgatataagcagcaaggtcgtgtttatgaacaaaggcgttatctgcgaggagggctctccttatgagctattcggaaacccgaaaaagcaggaaacaaaagattttctcgcgcggtttatagagcgttagatgagaaaaaaacactcttggcaaaagaaaagcaaaatatgaatttaaaaagaccgcctttagcggtcttttaatttattttctatacgttcctgcgattgtaagcaatccgttttcaatcgctatttttttcatttgatcaactgcattgcgcttttttgctgaaaaatcttgccgatcgcaggcaaaatcgacaagagctttaattaaatctgcatctgaaaaatcagataaatctattatgctctctgatccatcaatctcatcagttgttgctgccttgaagcttctgaataattttttatccagtaataaatcagacagattatccggctcttctgaatttatcaataattgactaagtaagcgaacggctttgcccggtgtatttaaaatttcttgtgtatacaaagtcacaacaagggttgtctttgttaattgtatatcatcttcacccttctcacccaacccgatatgctttggattaattaatgagcgcgttgatttttcgttaaaaatcttaatttgagatattataaaagcttttctttcatcaagacccttatcgttaacacctatgttttttacaagagctaatcctattttatattcatacataaattttcttgtcctatcaataatttatttatattttaattatagtgcctttttcagtaattgtcaagaatgagtgaaaaatatttcgcttgacacttttacaaaaattagctataatacaatcagaaatcagcgaataatttttcactcgtttctacaatagcgtttatttaataaaaaataaaaacagtaatatataggaggatatctaatgaatatcaatattgtt

SEQ ID NO: 4297 - DNA, 29151 bp, Unknown
  16S sequences of unknown bacteria
ttgctgtggaggggaaagcccacacgcttcataaaaaatgccctgaccttgccggaaaacgagtttcccgcatgggtaaaagtgggcgcgatgagcacaccgtcgtccttcagcacccggcggatctcggcaagggccttctccggctgcggcacgatgtgcagtgcgttggacacgatcaccacgtcgaaggactccttcgcatagggcaggcagaacatatcctgcacggaaaagtacagctttgctgagcgattatcccgctttgcctcggcgatcatctctgcggaggcgtccgtcgcctcgatgtgcgccgccgcgtttacgatgtgctttgcaatcagccccgtgccggtggcaagctccagcactgtttttgctttcaccaccggccggatcagcgcatacatctcgtcatacgccgcccgatcctttcgcataaagcggtcgtaacgtccggcatttttgtcccagaaattcttgtgttctcgcatctcattcattccttttggctttagatttatctaatcggtgtgcgcagcctgacagttaggtgcaactaaccgtcgtgtcttggaaaagccgcatttctgcggcctttctgcgtattcaaatagctctctgcaagcgccgtacaccagtgcttccagcacctgcggatacaactccccaatctgctccttatgggaaactgtgaggatcagtccccgcaccgtcgcggcagccaaagaagcgccttgtgaagttgttctgtttcatagtcggtaaaagccaagctcgtccaccatccaaatgaccatttcggttcttctggtcatgttatatcatgcctctttttgttttgcaaggggtgtggagaaaaaatcgctaatcaaaaggagtgcagtgttgcagaaagagacgacggaattccggtaaaagttgtgttccaatcgtgatactggctcccacacgtaaattaccgatagcatcccagtttcgaacctttttttccatttcatcaaataacgaaactatatgaagcgcataaccataaaattccttgcccccctctgtgggaagaattctgcgccccatacgttcaaacagacgaattccgtagtattcttccagttctttaattgccagactgaccgacggctgtgcaagatgaagttcctctgcagcctttgttatattactatggtgaaatacagccacataaattttcatatgtctcagtgtcattttcttttcctttataatgaaattattatgataatcataagataatactattttacatatagtttaagattttttatactgttctgggaacggatagtagacaattcttcaaaacaaatgttattaaagaggaggaatttcctatgcaggataaaaaacatgtgttattaaaaatatttatatcaaccctatatctcagtgcttttactttcggcggtggatatgtaattgttaccttgatgaaaaagaaatttgtggatgaataccactggattgatgaagatgagatgctggatctagtagcgattgctcaatccgctcccggtgctatcgctgtcaacggtgccattgtggtaggatataagctggcaggcctgattggtgctgctgtttctattgtcggaacgatccttccaccttttctcattatctccgttatttcgctcttttacacagcttttcgggataatttactggtaggtcagatgcttgagggaatgcagtccggtgtaggtgcagtgatcgccattgtcatttatgaaatggccggaggtatattacatgagcacaattgcctttccaatgtcattatgtttgctgcttttacagcatcttgtatctttcaggtcaatgttatctatattatcctgatatgtggagctcttggcatattaaaaatatcgtatcaaagaaggaggacctctgcatcatgatttatttagaactttttctaagttttttacagattggactcttcagttttggtggtggttatgcagccatgccacttatccagggacaagttgtaaatggacaccattggctttctatgacagaatttaccgatctaatcaccatttcccagatgacacctggacctattgctgtcaactctgctacctttgtagggatccgcatagctgggattccaggtgctctggtcgcaactctggggtgcattttaccctcctgccttattgtaaccctgattgcatccttttatcttaaatacagaaacttatccgttttccagagtgtccttgctactctgcgtccggctgtagttgccatgatagccgccgcaggtgtctccattctgaaaaccgctttctggggaatcaaaactgccattactcttagtagtacccattggagtctggtttttattttcatcatttctgcagtccttctgcaaaaatataaaataaatccaattctggtcatgattctggcaggaatcatgaatacaggactctcatttatacaaggaatgttattatgaaactgattgcaaaatattatataaacaattacaaaatttattcagagaattcacagctcatcagtcaggttcagaaaaatctgacacatgctgtatagttttatttttctttacgcagtaaattccgggcatatgcctttctctgcgccagcagccagatctgacttcctttctatctggccaaacgcgaaagttgtgctccaccgagaaaattggagtttttgtttcaattcaaaaaagaagaggagcggtaccccaattggtgtaccgctcctcttcttttttcttgtccttattaattttaattatgtaactttttattctactgctgccgcttcaatggtactctgatatttttcaaggatcagagactgaatgcagtcacgtgtggaagaattgatcgggtgtgcaatatctcgatactctccatcagacgctttacggcttggcatcgcgataaacagtcctttctctccttcaatcactttaatatcatgaacgacgaactcttcatctatggtgatagacaccaccgccttcatcttgccttctctggcaacttttcttatccgtacatctgtaattttcataagacacccctgtatattgtatttttatgtttttgtatatacgatattgaagcaaacaatgttttgcaacaactgataccggatttccgacctttctaccctggtatcatcacatgatatatctttcattatgattcagagccacattcgcaaaatcgcctctacgaggctttccttttgctcatgtatggctgctcgccatatacatgctccgaaatatgtgccttcatgcaagcatgaggcccatattctcgggcatgtgcatggctctgaatcattacatgatatatctttcatttttttctatcaccacttttacaccgtcttcccctacgtagcgggaattggcccgaatggtatctctgctctccacgatgcagttttcgatacaggtgttgtcacccagatatacatcattgagaataatggaatttctgatcacgcagttatttccaacgaatactttcttaaacaatacagaattctccaccgtgccattgatgatacagccgctggcaaccagactgttctttacattggctcctgcattatattttgcaggcggaagatcctgaaccttggaataaatatccgggtaatcgtgcagaaaatgctttcgcacatctgctttcaggaaatccatgttggtctggtaatatgcatccacagatgcgatactgttccagtaagtatccatcttatatgcgtagattcgtttcacattcttataacgaaccagaatgtctcttacaaaatcgtaccgatcctcttccgcacatttctcaatcagttcgatcagctgtctgcgtcggataatatagattccacaggaaaccagatgggcatctgtcgccatcggcttttcttcaaaatccatgactctgccggtctcgtccgctttgatcacaccaaagcggctcatgtctgtatcctgtggcatctccttgcacacaaccgtaatatctgcttttttgtcaatatgatattccagcactttattgtaatccatcttgtagacgccatcgccggatgcgatcaccacatatggttcatggctttgctttaaccagtcaatgttctgccagatggcatctgccgttcctctgtaccagtagctgttctccgctgtcacagtcggtgtgaaaatatataagccgccctgttttcttccgaaatcccaccatttggatgaactgaggtgttcatttaaggaccgtgaattgtactgcgtcagcactgcaaccttctgtacatgagagttggacatgttgctcaatgaaaaatcaatgcttcggtagcttcctgccaccggcatggccgcaatggcacgcttgctggacagttctttcattctgtgattgttgccgcccgctaaaatgattcctattgctctcatgttctatcacccgccttaatcaaagtctcgccgcttgcaagtattccgtccggatagtccgcttcttccgtcttaccggaaatcgcagtgttaagaccgatctgaacatttgccggaatctctgtcttctctccaatcgttaccagaccataggagtatacctttggatttactttgttcggaatattttctcccacacccagcttacagttctcaccgatcacgacttcttctgcaatgatggacttgtccaccgtacagccaggtccgatcacagtgtctttcataatgatcgagtcacgtaccactgctccctttccaatggtaacacctgctccgatcacagatcctatcaccgttccttcaatcgtagaattgccgcagacaatactgcgctcaataaatccatcctccgatacgtaaaggggcggtaacgcatcactcttggtatagatcttccagaattcttcatacaggttaaattccggtatgatatcgatcagctccatgttggcttcccagtaagatccaagagttcctacatctttccagtatccgttgtactcataagcaaacaaccgctcgccccgttccaggcagtctggcaggatatgctttccgaaatcacatcccggcacgtccttcatgcggatcagtgcttctctcaatactttccacgtaaaaatatagattcccatggatgccaggttacttctcggcttctccggcttctcttcaaattcattgatctgtccgttctcatctgtgatgactacaccaaatctgcccgcctcttcccacggaaccggcatgcaggcaatcgtcactgctgcgttattctctttgtgataatccagcatcacttcataatccatcttataaatatggtcacctgacaaaatcaggacatattctggattatatgtatcaatatagtcaatgttctggtaaatggcattggctgtgccggaataccagtcacttccggcgcttctctcatatggtgagagaatagttactcctccgttgttacgatccagatcccacggcattccgatcccgatgtgtgtgttcaaccgcagaggctggtactgagtaagtacaccaaccgtatcgatcccggaattgatgcagttgctcaatggaaagtcaatgatccggtacttgccgccaaaggcaactgcaggttttgcaacctttgcagtaagcacgcccaatctgcttccctgaccgccggctaacaacatggctatcatttcttttttaatcacgctatcacctcttgatgcaaacattataatgctttgatgtctgtattatagcacaccttttgtaaatagtgaacatttgcaaagaaaaacattcatcattttttaacatttttcgacagttttttcttgtttttgatgaattttcatctcgtttccgtcatttttgctatatgatttcatgtttttttgttcaaaatgatattacccggtttttcctgacagaagtgcgttgatttttcttctgaagacgatataataataggaaaaaacagaaatgaggatttcttatgtatcagataaattttgactcaccggtacatgtacatttcatcggtatcggaggcatcagtatgagcggtctggctgaagttctgcttcaggaaggctttaccatctcaggttctgacagtcagcagtccgaactgaccagacatctggaagagaaaggagcaactgtcttctacggacagactgcagacaatatcaaaccaggcatcgatgtggtcgtctacactgccgccatccatccggataatgccgagtttgccgctgccagatccgctggcattcccatgctgaccagagctgaactgctgggtgagatcatgcgtaactacaagacggccatcgctgttgccggtactcacggaaagactactaccacttccatgatctccatgattcttctggaagcacaggctgatcctaccatctccgtgggtggtatcctgccggagatcggtggaaatatccgcgtcggcagatcagatctgtttctgaccgaagcatgtgagtacaccaacagtttcctgtccttcttcccgactgtggacgtaatcttgaacattgaggaagaccacctggatttcttcaaggatcttgccgatatccgtcactccttccatcggtttgcagaactgctcccggcacacggactgctggtaatgaatggcgatatcaagaacatagacgagatcaccgatggtgtggatgctgatctggtcacatacaaagtgtccggcgaggcagattacaccgcttccgatattacctatgacagacagggatgcgcatccttcacactggttcacaaaggaacccctgtaggaccggtagagcttcatgtaccaggtatccacaacgtatccaatgcattggctgccctggcgaccaccatggaacttggctttgatttcaagactgcttccgaaggtctggctatgttccacggaacagaccgtcgtttccagtacaaaggagaagtgaacggtgtcaccattatcgatgattatgcccatcatccgtccgagatccgggcaaccctgaaggctgctgccaattatccgcatcgtgagatctggtgtgtgttccagcctcacacctatacccgtacccgcgcattcatgcacgagtttgcggaagcactttcccttgccgaccatgtagtactggcagagatctacccggccagggaaactgacaacctgggaatcagctccagaactctgcaggcagaactgcataaaataggaaaagactgcgattacttttccacatttgaagagattgaagaatttttattaaaaaattgtatgcacggtgatctgttgataactatgggtgccggagatgtgctgaaaatcggggaaaatctacttcagagataaagttatccacattatccacatgtttatcaacataatatgctgcataaacatgtggattttttcgtggaaaacagatttacataatatatttcgacactattcgacaaattattgaaaatccttgtatttccggtcattttttgtcgaatcaggtttcccataaatgtaactatccactaagttatccacattatccacattccctcaaaagtatccccagaggaaagtgtgggctatttcttttttggataagctgtgctatactccgtaataggtggaggatactgatttatgagtcattttacgttaacaaccggcgcttctgtcggtacaacttctatttccaatattttcctggatgaatatatgccaggagctaatggtgaatatgtgaaggtctatctgtacctgcttcgttcgcttggcgacagcaccagagagctgtctgtgatcggtctggcagatgtactggactgtacggaaagtgacattctccgcgcgtttaaatactgggaaaagcagggactgttgaagctggagtgtaatgcctccaatgtgcttcttggcatctatctttgtgagccgtcccacttacgaactactggtcagcccgacagacaggcctctgtcgccacccccggttcttctcctgtcgttccttctgttgcttctgcatctgccgtaccggaacgtaaggcatacagccgggatcagttacgcgagttcacttctcagtctgactgcagacagcttttatttgtctgcgaacagtatatgaaaaagacgctgacgccatccgagatcgagacattgctctacttctacgaccagctccatttttctgtggatctggtggagtatctggtagagtattgtgtctgcaagggaagcagcagcattcattatatcgaaaaggtaggtcttgcctgggcagaggcaggaatcaccaccgtctctcaggcaaaggaacggactaccacttaccggcgcaatactttcgctattatgaaggccttcggcatcaacgaccgtaatccggtccagccggagcttgactatatcgaaaaatggctgggaacttatgatttcaccctggatctggttctggaagcctgccgccggaccatggatcgtctgcacaaaccgaattttgactatgcggacaagatcttacagagctggtccgaaaagaaagtacatacactggcagatgtggaacgactggatcaggaacatcagaagaagaacagtacccggaagaagccatccgctgccagggcaaccggattcaccaatttccagcagcgtgactatgattttgacaagctggaagagatgctgcttcaaagccagaaataacaggaggatcacatgccgcttaccaataaacagtacgatacgatcatgcgggaatatgaccgtcgccaatatcaggattaccggcttcaatgtacccggatcgatcagatctacgaacagatccccaggatccgtgagatcgactcagagatctctgcctgcagtcttcgtcaggcggagcggatgatcgaccaggaaccaggggccatgaagtccttaaaggacgagctggcactgctcaaagctgaaaaggaaggacttcttttatccgccggttatcctgctgactatcttaagatgcattatacctgtccggagtgcaaagacaccggttatatcggccgcaaaaagtgccattgctttttacagcaggagatccgtctgctctattcttcttcccatctggatcagatcctggcagaagagaacttttcccatctgtcttatgatgtctatgatgaggagcagaagcagatcatgccggagatcatccgtacctgccatcagtttgtaaatggatttgatcaggaatttaagaatattctgttctatggttccgtaggaaccggaaagacctttttatccaactgtatcgccaaagagcttctggatacgggacattccgtaatctattttacatcctttcagctcttcgagcttctgtccatcggagcacctgcagataagtggaatctgcaccagcaatatgaagctctgctggacagcgatctgctgatcctggatgattgcggaacggaagtttccaatacgtttactgtgtccaggctgttccagcttctaaatgaacgggcactgttgagaaagtcaacgatcatctccacgaacctgtccatccgggaattccgtgatgtgtacagtgaacgtattttttccaggatcaccagttcgtacactttgcttaaactgaccggcagtgatatccggattcgccggaaaatcaaccgaactttgtgaaattccttgactctgtatcacaggaaatgttataaccattgaagtagatctatataggtgtttacatattcggagctattcatgaggcaggctctgagtatgcgattatttttatacattttggagggcatattatgattcagcagcgcagtgaacgtgttcttgagacgatcccggtaggatcccttggcatcattcctcttcccagttgtaaagagctgggtgataaggtcaatgattatctggtgcagtggcggaaagaaagcgccaacgagcacaaggataacattgcattccagggctatgagcaggaatctttcctggtaggagcaaagattccccgttttggttccggtgaagcaaaaggaattgttcaggaatctgtccgcggacgtgatctttatctgatggtagatgtatgtaaccacagtctgacttacagccttgcaggccataccaatcacatgtcacctgatgaccattatcaggatctgaaacgtattatcgctgcctgtggaggaaaagcaagacgtattactgttatcatgccatttctctatgagagccgtcagcataaacgttctgcccgtgagtcactggactgcgcactggctctgcaggagctggtatctatgggtgtggacaatatcatcacctttgatgcgcatgacccgcgtgtacagaatgcaatcccgctgtctggttttgagactgtacagcctgcttaccagtttatcaaggcactgctctccaacgtaaatgacattcaggtagacagtgagcatctgatggtcatcagccctgatgagggtggtaccagccgtgcagtttatctggcaaatgtgcttggtgtagacatgggtatgttctacaaacgccgtgattacacgaaagtaatcaatggacgcaatccgatcgttgcccatgagtttctgggcagcaatgtagaaggaaaagatgttctggtcattgatgacatgatctcctccggtgagagcatgattgatgtagcaagaaagctgaaagcccttcatgcgaaacgaatcttcctgtattccacctttggtctgttcaccaatggtatggaaaaattcgacgaggcttacaaagaaggattgttctatcgcgtactgactactaacctggtatatcagaccccggagcttctgtcccgcgaatattacatcagctgcgacatgagcaaatacatcgctcttctgatcgatacgctgaaccatgatgcatctgtcagtgatcttcttgatccctacgaaagaatccaccgtttccttgatcggtacaagaacggacaggtataataaagggactgccgcaaatgcaggatgcattttgcggcagtcttttttgaatcatatagaaaacgactgtttttgcgtcgtgaaaggaattatatgcccaattttatcttcatttccccggcctttcccggcaattatgaaaatttctgtgttgccctgagggcaaacggtgtcaatgtcctcggcatcggagacaccccttatgactgtctgtctccgcgcctgaagagcgcgttgaccgaatattaccgggtagaaaatatggaaaactatgacgagatgttccgtgctgttgcatttttatccttccaccatggaaagatcgattacctggagagtaacaacgaatactggctgacccaggatgcaagacttcgggaagattttcatattactaccggtcttcagcccaaagatatggacctgatcaaatacaaatcaaagatgaaagccggttacgaaaaagccggcattccctgtgcacgttaccatctgatctctgaccttacatcggcacagaacttcatcagggaagtcggataccctgtgatcgtaaaaccagactgcggtgtcggtgccaatgacacctggaaactcacctgcgaagcggagcttcttgactttttccgccatcttccatccattccttatattatggaagaatatgttcccggagagatctgctcttatgatgcgattgtaaacagcaagggatctccccttttcgaaaccggcaatatcacaccgatctccattatggactgtgtgaacgaccataactccattaaattctatattgtagatcagctggccgaagacctgaaaacctgcggacgtgcctgcctgaaggcttttaaagtgcacagacgcttcgtacatctggagtttttccgtctgctggaagatcatccgtaccttggcaaaaaaggccaggttgtaggtctggaagtcaatatgcgtccttccggcggtcctaccccggatatgatcaattttgcctataacatcaactgctatcagtactatgcggatatgatgatctatgataaactgcgccataagaccaagacttctccagccttctgcgtctatgtaggccgttggaaagagcatccttatgcacatactcaccaggagattcttgcacactgggacaaatatctgaaggttgccgaggaacttccggaagtacttgcacatggcatgggcaattatatgtatctggcaagatttgaatccaaagagcagatggacaccttctgtcaatatgcgttggagatcaaagagccggaagttttaccggaaataccggtaaagaagacaactcgagtccgtaaaactgcaggtgcgaaacgatcttctaaaatttcgcagaaaggatctgaaaattcatgatagaaatacaggaaacaagttggtacagtgaccggcttgggcgggagatgcccgtaaaacgttatggaaccaaaggaaaaccctgtctggtcattccttctcaggacggtaaacataatgactttgagagctttggcatggtagaagcctgcagaccttttatcgaaaatggaagacttcagttattctgcgtggacactattgatgcagagacctggtcctgcacctggaaaaatcccagagaccggatcttcctgcatgagaaatggatgcaatatctgttctgcgaagtacttccctttatgaaacaggctactcccggacaattatccatgaccatgggatgcagcatgggcgcatttcatgcagctaatctgtttttccgctttcctgaccagtttgatgcaaccatctgtttaagcggtgtctatgacgctgccaacattctgagcggctatatggatgatctggtgtacctgaactctccataccattgtctccagcacatgccggaagatcacccgtatatggctctgtaccgcagaagccacatgtatttctgcgtaggccagggtgcctgggaggacgaactgctggcagatacccgcaagctggacagcgtactgaaagcaaaaggcatccctgcatttgtagattactggggatatgatgtaagccatgactggtgctggtggcagaaacaggctgcttattttcttggaaagatcttgtaatgttcacagaatctacatttgactttcgatctgacgaatcttaaaatgaaacatatgtagaatagcgaaaggaataatgaaaatcatgaaaaaaataactgtatggcttctgactctggcatttgctgcgacaatgctggccggatgcggaagcaaaactgataccacggatactactgagactactgaagagacctctgctgctgacgagaccagtgatggagccgctgacacagcagacacctctgaggacggagaactgctcacaggtcttcatcatgtgaccatcgatgtgcaagactatggcacgatttctctggaactggatgcagatactgccccgatttctgtaaccaactttatcaatctggcaaatgaaggcttctacgatggtctgactttccatcgtatcatctccggattcatgatccagggcggcgatcccaatggaaacggaaccggcggttctgagaagactattaaaggcgagttctctgcaaacggtgtggaaaatgatatttctcatgtgagaggtgtcatctccatggcacgtgccaatgacccggacagcggatcttcccagttcttcatcgtccatgaggacagtactttcctggatggccagtatgcagcctttggtcatgtaaccgatggtatggatgtggttgatgccatctgcgaggctgtaccggtgcaggacaataatggaaccgttgctgcagcagatcagccggtgatcaccgctgttacggtggttgattaagataataaaagctactcacgagttgtatacttatgagtagctttttttatgtactatgaatattcgatgaaaattgtgcaaatattgttctatacaacacccatggcactgctgacggcggcaccgcaggctgcctcttcttggtagatcgccagtgacagttctgcgccgaacatctcactgctgatcacctgaagcacttgattctttctcagaccattaccggatgcaaccagatggttgacttcaatgcctgtggccttatagatgatctgatacatatcatacagctctttgatcatgccatgaagcaccccataggtcagtccttccggagtaaaattctcttcacttaagttcgtgataccaccgcggatatccggattgattctggttccattaaaccgtgtggacacttccatcttatcactctgctcttttccttcacgagccatctcttccagaagtccatataatggctcgtcatttccagtagctctcttcataaatctacggaaaaatttctcaagggtggcatacgctcttccaccgcacagagaagcaccaaccagaagatattttccatttacaaatggtcttgcctcgattccctctcctgagaacagctgatcagacagcacagagatctgtccaccagttcccatattcagaaggatcgtattctctctgaatcccacagacccaagaaagcttgcctgattgtctcccagtgcagcagttaccgggattcccttatacttaccaagcactgccacatcaccggtcacttccgggagaatgaatgtatccattcccagctgttccagcactgctttgcggaactctcctttttcgctgtcaaacagattcagcccaaagcttcctgcattgctggcatgcaccagcggagtttttcttccggtcagcttcatgccaaggtaatctccaatcgaacagaaggtcgctgctccttctggcacgatcccttttctgcagtgatacagatgggtcaccaatccaaagcctgtggacacagtaagtcctgttttatcgtatacttcctgaacaatgctcttaccatcaaattccggctgcgcacctcttccatcctgccaggtatataatgggctgacgcactccccctctttgtccagatatatgattccatgcatctgtccggtcagtccgatcgtctcaacatctttatgagctgccagcaactcattcaacacacctactgctttttcaatgatctttacaggctcctggatccgctcccagtcatttccggtctctataaaagttccgttagaaatggtcctggattccaggaccatctttttctctgtatccagtacaaccaggctgatcgttgttgtaccaatatcaattcctattgatttcatgtctgttctcctgattatgtggtctcacgaaccacaagattcacgggtattctttgtctctgtatctctacgtcttttccattgatcatatccacaatacgttcagcagccaaacgaccatattcctgcactggctgatgaatagtcgtcaacttaggatagatcattctactcatggaaatatcatcaaaccccacaacttttacctgatctggcactttgatgttatggttcaccagataactgagaccacctaccgccagaatatctgtcataaagaagatcccatctgctcctccaagattttccatgatatactgtgctgcacggctaccctcttccagtgatacttcatttacataaattccatatttcggattaatttctatttcatactccgcaagtgcttctttaaatccctgaagacgttttttgatagtagataatgttcctccataacaaacgtacgcaatttttttagcacccttacaggccagttcctgacccgcaagatagcctccctgaatgttatcgcattcaatcattgcatagttttcttctgatcccggcttttcttcccgtttcatgtctcttggatcacggtcaatataaacggtcggaatatggagtgattctgtaatatcctcaccgccgatatagataatgcctcccaccttctgactgaggagcatctgtaactgttctttggcttccatcacattttcattggtgctacagatcaatgtcatataattctgggtcaataaatgtttttgaacttcctttgtaatgctggcaaaaaattcatttgtaatatccggaaccagaatgccaatcacctgtgtatgattaacacgaagtccccttgccagctggttgggctgataatcatatttctcaataatctcttttacccttttttctgtatcctttgaaaatctaccattctgattgatgacccttgaaaccgtagcaacagacgttcctgccatttctgcgatttcttttaccgataatttcttttgcaccatataacaccttcaaccaatcttgcatccattatgttgtgatttcatcactccataatttcgctgtttgtcatgagagagcttactctctcatgactctcttgcgttcattatatcatatattttccatatattggatgaaagttgcagtctatttgaaaacttccatcaaatgttcgaaaaatttatctttatccaccttcatcgctactttgtgacatccctcatccgaagacctccaataagtaaatccagccagcagacgactttctgtgtcaatggtcaggttgcctttttcaaatacacacacatcatcgtggaacaaagaaacggccgttaaaggatcatggaatgtcacccgctcctcatccttaaaccattctcttgcaatatccataaccggatgcagtaatggatgctggaatatcgcttctgcctcctcaggtttcatgataagctgactagtcacattaagaccgcaggtaatatgttctgctaccgaagcttcatatacaagctttgtcgcatgaggatcgatcagtgcattattttccagcactcctttacttccaagcacaatataatcgctgtcctgcattgcactcattttctcagaagtgttgtcataccgtgtataagtcggagaaccacacatcagcacaattcgcttcaaaagcttcgggatttccggatccattgcaaacaatagacccacatttgtcagcggagcaatacagatcaacgtgatctcgcccggatgtttccgaatagtctcctgcataaatgcaaccgctctgttcttgagaaactctgtgtcatgagcccatttgctgagaacctttttctgtggtgcatacagttcaatctggggaacaaacataggattctcacatcctgggtaaatagggatatcctttcctgcgatcttacacaagacacttgccagctttgccctctcatatgcctctccggtcaccgttgtaatacccagaagttccgcctccggatttgccagaagatatgccagtgtgattgcatcatcaacttctgttcctatgtccgtatcaagaagaatcttttcttttgccataactgcgcctcgccttcttattctctcattttcttaaagtaatcaataaatacagcaatcagaactacgacaccttttactacatactgccaggaggaatcaattcccagaatattcataccattgttcagaacaccgataacaatacagccaatgatcgtaccgcttaaatatccaacaccaccagtcatactggttcctccaagtacaactgcggaaatggcatccatttcagctccctcacctacattgaactgtccggagaatgttcttgcagagcttaagataccggcacatgctgcaaagaatcccattatgataaataccgtcagagttactttcttagagttaatacctgaataagatgctgcctgcgcattgtcacctactgcataaatattacgtcccagtctggtacggttcaggatcagtgcagatataatgatgacaacgatcatgtatacaaaatgaattggaatatttccaaataatttcccacttccaataaaggtaaacagctcatcatctaccagaatcgttgttgccttggtataaatacgggcaaaaccacgaccaatattcatagttgccagtgttacaataaaaggcgggattgttgttcttgatattatcacaccattgaatacaccgaccagtgttcctgccaaaattgacagtggaatcgctgctacagatggcattcccacattagtgatcagaccacagcacagacatccggataccgcaataatagatccaactgaaagatcaatgccgccaagaataataaccattgtcataccacaagccaaaataacatttactgtaatctgacgcatgatatttgcaaagttctgtgggcttaaaaatgaatccgacatgactgtcagaatcgcacagatgatcagaagaccaataataattccaccatttctctttatactgtcaacaaatccttttacaaacggaacagaaccgctctttccttttgcttccatcctaatttcctccatttcacttctaagccgtaacttccatagttgccagatgcatgatccgctcctgactcaattcatcccgattcagcactcccgttgtataaccgccggacattaccataacacgatcactcatgttaatgagttccggaagttccgaggataccatgataatcgacaagccgctctctgccagctgatcgatcaatgcatagatctctgcttttgtttttacatccacacctctggtcggctcatccaggatcagcacttctttggtcgagcaaagccatctgccaatcagcactttctgctgattaccaccgctgagctttcctactgcctgctccggaccagttactttaatgtgcatatcttgaatcttctgatctacaatctcatcttcttttgcacgattccataccagttttttcagaaatctcaggattacattgatcgtggtgttaaatcgaacacctgactgaaggaacaatccttctttcttacgatcctccggaaccagtccaaatccggctgccatagcctcattcggactattgaatgcaacttcttttcctttgtagagaatggttccgctcttcttatgtgtaattccaaacagacattccatagtctcgcttcgtccagcccctaccaaacctgctacacctagaatttctcccctcttcacatcaaagcttgccttctttaccctgtcaccatctgcaagatcttttacttccaggacaatttcatccttcacatgatcattcttcgtataatagcttgccagatcacgtcctaccatcatggcaatcaacttgtctctgtctgtttcttttgtcacaaccgttccgatatattcaccatctcgaagaattgttgtctggtctgtgatctcatataattcatttaatcgatgggaaatatagatgattgctacattctcttttttcaatgtacgaatcatatcgtacagaatttctacttccgcatctgataaagacgacgtaggctcatccataacaatgatctttgcaccaaaggaaactgctttgataatttcaatcatctgctgctttgcaatcgtaagtttgctgagctgtacgtttgcttttaatcccatctcatatttatctaaaaacgcctgggttcttttttcctgttcttttaaatctaccatgccgtttttcataatttcacggcccataaatacattttcagcaatggtaaggtgctgtgccatcatcagctcctgatgaatgatactgattccaaggtctctcgcacttaccacattatgaatatctgctttctccccattaatataaatctcaccgctgtcctttgaataaattcctcccaaaatcttcattaacgtggattttccagctccattctcgccaagaagcgcatgaacttctcctgcttccactgacagctgcactccattcagcactttattgtctgaaaagctttttgatatatctttcatctccagcaatacgctcaccgaaggcacctctctttcttttaaaaagccggggaagcctgtactcccccggcccatatcatgttatctgcttattttgatattactgccaatcagatccattgtaatcgttgatattttccggtgttactgcgaaggacgggatctggatctcgctctcatatgcttcaccattcaggatcttgtatgcaacttttgcgctttcctgaccgataacgatcgggcactgtgctgctgtacacttccagattccatctgcgccatctttggtgattgctgcttttgcttccggaccagcatttacactgtaaatttcaatattctgtccagctgctgtgattgcagaataagcaccctgtgcacactcatcattaatacagaagatagcagtcagatctggatttgcctgcatcaaatcttccataacagtcagacctttttccggctttgcacctgcatccatctgtgctacaacttcaaatcctgcatcttttacagtgtcaataaatccattagcacgatcagttgctgctgcagatgccggaaaatcaaggactgctactttaccaccttctggatggttcttaactaattcttcacctgcaatctgaccgcaggaatagctgtcacttactacgaagctattaactttagaaagatcactgactgcagagtcaaagttaatgatcggaatacctgcatcatttaatgcttttactgctgctgcagatgctgctgcgtcagacggattgtagaatacagcgtcacatccctgtgcaataaagtcctctacaacacccaactgataagcactgtctgctttaccttcagagtggacgatctcatcgccatttgcctcgatgatctctgctgctccattataacaagcctcaaagaaagaacctgcactcatctcagtaaatccaaatttgtaatgatcaccgttcttcggtgcaattacctcaccagttgcatcatgaataacaacctcgcctgcatctgcagatgtgtcggtctcttctgctgcatccatggtatcttctgcctctgctgcggtctcagtggctgtgtctgctacagcttcttctttgcttccgcatcctactgccatggttcccaccattgctgcacacaaaatcacacttactaactttttcttcatgtttccatcctccttaaaagtggttctttatttcagcagcggaaggccttcctgttttgtcatttctatgatattgatcttccactgcaatgttctttataaaatttttatctttcccacacatgacgcaggaatgcaaccgctccagctgcgtctttgtcaagctgctcttcggttgtatttggaatgatatctctccatacacggatctcttttccaatggttccgcctgccattacaaacggttccataactgccgccccctgataatcaatatctcttaaagcctgtccaatctctgcccacggaagagatcctttgccaggaacctgccgattctgttcgccgagatgaagatgtcccaaatcttttcctgctctacgaatcgctgccggaatattatcttcttcaatattcatatggaaagtatcaagcataatctttacatgcgtacttcccaccgcatcaatgaactcctttgcctgatcacaggtgtttaacatatatccttcatatcgattcagcacttccatgccaagaacaacatcacaatcttccgctgtcttagaaagaatttgcatatttttgattgctctgtccagatctccttctctgtccatcttctccgacatatccagtggccaataagagtaaagtccaccacccagcatgtgaatatccatcaactgaagttttggcagcaggttctggaagaaattcattgctttcttcacgacttccggatcagaagaacaaatattctgtgctttggtcggtccatatccagatgtcaggatgattccattatcatctgccactttttttaattccagaagctgcgcatctgtcacgtacttttctaccaatgctgcacaggagatttccagtacatcaaatcccagcttcttaactttcgggataaaatattcataatccgaagtccattcgtgcgtccaatatggagcataaattccgtatttcacgattgtctcctcctttttttctatctgtttctaatctttggatttcatttggcctcttgagtaatcctttactcacattatacatttacacaagcaaatgtcaatatattatttattttttagtgattctagacgagtaaacctttactcatttgtgcaattttatggacaacaaccttttacatttatgcggattactaaaatttagaatataatttttgttcagaataacaaaaaaagaaaaatgcgcaaaaccgatatttttatctgtttcacgcacttattcaatatgaagatcctcctgcagtatccgaaaacttcaggttctcttcccaatcgttaaaactgatgatgtctcccaacatttctttctctatgtcaggtgtttttaggcttattctcatagaccagaatcttctggtaaatatcctcataactgatcgtactgaaatcagttacatccaccggaatgtccagtcccagatcaatattatactgtttatgagcaatggctgctgtaaattcttcaaatccaggtgctatccgggatacagagtgtaacatttccggcttaaaggtttccttatgatagcaggtcagcagatgtcccggatgtctgtcatcctcttcatcccgtcttgccccccgctgatagaccgtttccagatcagtatacagatacacagtcaccgcgtcataaccggattcctgaatcagttcttccaacttcggcttatgccgctgatagaaaggatattcaattaaaattgtcctgttctcccacattcgcttctgaatggtcagataaaactcttccagactccaccagtttaagcgatccttctgcttttcattatcaaatccgaagatatcccagttcttttcttttatctcatcataactgattttcacaatgtcttcatttcccaggtattccaggaagcgacgagcggtaccgctcttaccagtccctggtccacctgtaaaaataagcaatgttcgtttatttgggaactctctcttcatagtcattcctcaaaactgaaaggttccatcacgcatagcctgaacattttctggactgattttaccttccataggcccaaacgcagctacattcaatgcacctgctgctgcagctatctcggcacactctttcagttcttttccttccagaagcgaacaaaggaatgcaccaatagaagtatctcctgctccagtagggtctacacattttactttataaagaccctgctctaccaccaaaccgtcacgggtatagatcttggatcccttgtccccgttcttcagcatcagaatctccagattcggattctcaaagcatttcttcaccgccgcgtccacatcatccagaccggtaagaagcttcagctcgtccagacccggcgcaaaaagattggtaagttccagaaccgcattgataatctcaaaggattccttgctcttcttcggattggtcagatgttccacacgcacattaggatcaaagctgatcttggttccctgagccttcatagctctggccgtcttgacaatctcccatccataactaaggcgtgctgtcaacgcacatcccatgatatgaagatacttcgcttcttttaaggaaggttctgtcacatccggcataaccgcctttgtggccggagtatcatcccaatggaacagatatctgcggtcacctttattatcataggccacaaacgcacatgctgtagatccatccggatccaccagaactttagatacatccacgccatccttcctcagacggttcagcatgcattcaccgaaaccatccttacccacaccagaaatgattccacaactatgtcccattcgagccactgtagaaatcataattgccgaagaccctgatggataaggaccggaaaacaatgcagtttcattcagaggtttgtctacctcggttctcataatttcaaccagggtctctcccattgtccagatctcagccaagtgctttcaccgccttttccttttcttcttctgatgaaaatttctgaataaactcaacaatctcatgattgggcccaagaatcgtcacatattccacgccatgctcccaataaggcaaaaatgccggaccttcattaatatagtatccagcttcccgtatctctttcacacaggctacaatatctgtacagttcagcgcaacatgatcgattgcaccagtcgcattagaagcaccaccatctttttcatatgtctcaatgagaatatttccatgctcaaagaattttaccggatgtcctccatatacagtctcccatttcaacttgaagccaagacccagataaaattccgatgtttttttgatatcatctgttgggattccaatgtgctgatacccctctacatagttagtaagcataatccccctccttacgctcttagggcagatacttttttcaaaatacctgccctattttacatttcaaaacctatttgtaaatacttcttaatacagccggagcctttccactgcagttaaacagatcactcttgcttgcgatctcagctgcaattgctttacgtcccggtcctacaattttacgtgggtcgtactcagtctccggaagtgtcttgattgcttctctgacagcatcggtatagactttctttaatccagtaccaacattaatcttgctcatacccatggcaacacatttacggaagtcttcatccggtactcctgtaccaccatgtaataccagagcaatatctgtctgcttacgaatctcttccaggagatcaaatttaatcttcggagctgctttataaaagccatgtgctgttccaatagcgactgccagtgcatcaataccggttctgtctacaaactcttttacaagcgccgggtctgtataagcttttccagattcttctacatgaacattctcctcatggccagccagcataccaagttctgcctctacagagcagccatcgatgccgtacgggctatgattatgtgcaaaatcagcaatctccttggattttgcaatatttgtttcaaaatcctcctgggaagcatcgatcataacattggtaaaacctgctacaacagcctgtttaatctgctccatatttgttgcatgatccagatgcagacagaatggaacttccggataagtctttgcgattccttttgcagcttctgcaaccagttccagggaaccaatgtatttaactgctcctatagaagccatcaaaataaccggtgcatttttttcacgggcaccttctacgagacctaccatctccggaatcgtactgaagttaaatgcacctactgcatatctgtccttaggatctgcatcagtagtagcaagtcttacagaatcggccataatctgtttaattgtaagtaacggcataattattctcctcttttcctagaatcttatattacaggcttttttcaaccgccttttttaccataacataagcaccataagcaaccactttatcgttcaactctgaaacacgaattctgtcttcctcaaatgggaaacatgcatgtcttcgtatttcatccatcatgctgtatcgaaaatacggatatgctttcgccattccgccagccagcacgattacatccggatcaagaagattgatcaaatttgaaagtcccacaccaatatagtagccctcctgacgcagcatgtcaatcgcatacgcatcaccttcggcagccgcttcggtcagaaactttccatttactttttcaggatcatactcgataccttcgaaagccttggacttgattccacaccggatatctcttttcattcgacggttaactgcagtcccggaagcatacaattcaaagcaaccgcttccgccgcagccacaggaaggcccagcaaaattaatggtcatatgaccaaattcaccagcgaagcctgagcgtccatgataaatctcgccattaatagcaatgccacctccgcaaccggtactgatagtctgatacaatactacattttcacctttggctacacctacatttgcttcagcaagtgctccaagatttccatcattttctacatataccggtacatcaaattctgctttcaaacgatcgccaagaggaaaattcttccaccccatcattggcacatcaataataagacctgtccgataatccagtgggccaggtgctgcaacaccgacacccgctaaatctttctttgtcttacctgcttctttcagaacctcataggcaagctcaacagtgttctgaaaaactgcatcctcaccttcataggttctggatttttttaccttgaattctgtaatcggctccccctgatcattgaatactgcagaggttgtttttgtcccgccgatatcaataatcaaatagtacttcatccttactcttctttgcctttctgtgccatatcaagcataactgccagtatgataatagcaccgattacgactttctgccaatatgcagaaatctccatcagggtcataccattgttgataactgcgatgatcgcacatccaaacatagctcttgcaacagatccagaaccacctgccagggaagttcctcccagaacggttgctgcaatagcaaacatctcatatccatcacccgttgccggatgtccgttgtttaccttggaagctgcaacgatacccgcaagacctgctgtgataccacagatcatatgacatttcagggttaccatcttagtattgataccacacatatgagctacagacggattggatccaactgcaaatacgtgacgaccaaatacagttttagtcagaacaatatggaaaataaatactacaataatcgtaaacaacacaataaccgggataataccagtcttaaagctctctgtctggatcagacggcctgcaccaagtacagagaagccgttcggaagtccataaaccggaccgcctccggaaatgatataagccagacctctgaacgcctgcatcagagccaatgtacagatcatgggaaccaaacctctgtaggctaccaaccatccaataaacaaaccaataagtgctccgcctaccagaccaacaagaatctgaattaacataatcaccggagtagcctgaatgttcattgccagaacgacctgtgctgctaagatacctgtaattgccattgaagaaccaacactgatatcaataccacccaggataattacataagtcagaccagttgccagaatcgcattcagacacatctgtccaaacaagttgatgacatttgctgtcttcaggaaagtaggatttccaatagagaatccaaccacaagaagaatcagtactacaattacaatattatcagtgattaactgtttaatatttttctctttcattttattttcctctctctacgaataagatttgtaccgctttccggtgtatctgtttactgagcctgtttatccgatccgtcagtaaccggattcgcaagagaaatcagattgatttctgtaatctcttcacgagtcagttctcctgtcagacgaccctctgacataacgtaagcacggtctgccaccttgataacctccggcatatcggaagaaatcatgataatacatccaccgtcttctacaaactgattcatcaatgcatagaactcagctctcgcatttacgtcgatacctttggtaggctcgtccagaatcagaagttttacaccggctgccagccatttcgaaaggataaccttctgctgattaccacctgacagatttccgcacagtgcgttgatatttggtgctttaatcttcagcttgtccatgtagtcattacttgtctcgatctcccatggcacattgacaaatccgttctttgcatggaacggcaggttcggcagcgcaatattttcttcaattgtttttttcagaagaagtccggtacgacgacgatcctctgtagccaatcccacttttctgcggatcgcatctgctggattcttaatatgaacttcttcaccatacagaaatactttaccagaagtgatcttggttgctccaaagattgcctccataacctctgtacgtcctgctccaacaagaccagagaacgctacgatctcaccagcgttggcatggaaactaacattttcaaatacaccttttcgagaaagtttttcaacgcgaagtacctcttccttcgcggtatgttccggttttacataagcgcccagctcacgtcctaccatactgttgacaatggtctgctcacttacttcatttactttatactcagcaactttcaatccatcgcggaagatagaacatctctcacaaatgatcggaagctctgccatacgatgtgttacataaatcatggtagtattagctgccttcatctttttgacctgctcaaaaagagaatcaatctctttctcagaaagtgaggaagtcggctcatcaagaactactacctttgcgtgtttggaaataacctttgcaatttctaccatctgcagttgtgcagctgtcagtttggaacaaagtgtgtgtgcatctacatccagacccatctcgtccagaacggcctgcgcatcggcctccatttttttacgatccagtaatccgtttgcctttttcggttcgcatccaagatacatgttctcagccacggtcagatgaggagcaattgctgtctcctgttcaataactgcgatacctgcatccaaagcatcctttggagttttaaagttacatacttttccgtccagaatgacttcgccccttgtgggcttataaattgaagcaataattttaatcagcgtagattttccggctccgttttccccgaccagagcatggcattcacccggataaaaatcaatgctgatatcctccaacgcttttacgcccggaaattctttggcaatattttttacctgtaagagcggttccatatctgtcctccatttcc

SEQ ID NO: 4298 - DNA, 18159 bp, Unknown
  16S sequences of unknown bacteria
cggagggcgaacggctcgagcggtggggagatattattctcatccgccccgacccccaggccatttggaaaacgccccgtctcgacccgagatggaagcaggctcacggccgctatcaccgaagtaaatcgggcggcggaaaatgggagttttataaaaaaattcccgaggtgtggagcataaattacggctctcttaaattcaatttaaagcccatgggctttaagcacaccgggatttttcccgagcaggccgtgaattgggacttttgcgccgaacttatcaaaaaatcgcaaaaaccgcttaaaatactcaatcttttcggatataccggagccgcaaccctttcggctcttgccgccggggcgagcgtgacccatgttgacgcctcaaagggtatggttgcgtggggaaaggaaaacgctcagatttcacgcctgtccgacaggccggttcggtggcttgtggacgactgcataaaattcgtaaacagggaaatccgccgaggaaatatatatgacggcataattctcgacccgccctcctacgggagaggtccgggaggggaagtgtggcagcttgaggaaaagctttacgattttctcctgtcctgcaaaaagctcatgaataaggacagcagctttataatgctgaattcctacacaacgggtttttcggccggtgtgtgcggatataccctcggggagattttccaaaaggatttcggcggaaaaataatctgcgacgagatcggtcttccggtttcggccagcggaagggtgcttccctgcggagccaccacgatttggacaaaggaggatgtgctttgagcgacataataaagcttgacggcgtgtccttcggatatgccgatccggaaaccgaacagaaaacaaaaatattcgacaatctgagcctttcgatcgaagaaggcagctttgtggccgttctcggtcacaacggctcgggaaaatccaccctttcccgtcttttaaacggcatgatattgcccgacgagggaacggtcacggttgacggactctccacggccgacgaacagaatatgcttgacatcaggcggacggtgggtcttgtctttcaaaaccccgataatcagatagtttctacaatagttgaagaggacgtggccttcggccccgaaaatttgggcgttgaacgcggggaaataatctcccgcgtggaaaaatccctaaaggcggtgggtatgctcgaataccgccgtcacgccacgaccaagctttcgggcggacaaaagcagagaatagccattgcgggaatacttgccatgaacccgagatgtcttgtgcttgacgaggcgacggccatgcttgacccgagaggcaggggagagataatctccattgcaaaaaggctcaataaggagcagggcatgacggtggtcatgataacccattatatggacgaggcggtggataccgaccgctgcatcgtcatggagtcgggcaaaataattctcgacggaaagccgtcggaggtttttgcaaaaagagacataatcagaaaaaccgggttgaccctgcccataacctgtaccctgaccgaggcactttcggaacggggaataaggttgtcgggcgatcccctcgacgagagcggaatggtggaggctctgtcaaaattactgaaataaaagaggaaaaacattgtcattactttgcgcggaaaaattaggctatatttacggcgagggaacgcccttcagaaaagacgccgtcaccgacgtgagcttttcggtggaaaagggcgagatcgtcggcataataggacataccggttcgggaaaatccacccttgtgcagatgctgtgcggacttttgaagcccgagagcggcagggttctgctttcgggggaggatatttttgccgacccgaaaaattcaagaaaataccgttttcgaataggtatggtttttcagtaccccgaatatcagctgtttgacgaaacggttgcaaaggacatttccttcggcccgagaaacatgggcctttcggaggatgaaataaaaaaacgtgtggtcgaagcggccgaccttgttgggcttaagagaacattgctttccaaatctccctttgacatttcgggaggagaaaagcgcagagccgccattgcgggcgtgcttgccatgagacccgaggtgcttattctcgacgagcccacggcggggcttgaccccaaggggcgcgccaccatacttgacatgataaaaaattacaacgaaaaaaccggagcgtcggtcattttcgtttcgcataacatggaggacgtggcaggtctttcccaccgcgtgcttgtgatgaataagggcaaaaacgtcatgttcggaagcccgagagaggttttctccaaaggcgagactcttttgtccatggggctcgacgttcccaaaatcactcggattttccttgagcttaaaggccggggatttgacgtgtccgacggtatatacacggttgacgccgccgccgccgagatagaaagacttttaagggagcggggtggaaagcgtgcttaacgacatcactttcggtcagttttatcccgcaaagtctcttgttcacaaaatggacccgagatttaaaatggtgctgacggtggcattcatcgtgttcacatttgtggcgcaaaacgcaatttcccttgttatcacggccgcggctctcgcaattttcattgccgccaccagaatacccgtgaaaatgtatttgaaaaccttaaagcccattatacctattataatactgacctcggtgttaaacgccctttatgtttcgggcggagataccgttgtttccttttggaaaataaccataaccaccgggggaataaccaccgcggtctatatgtcggtgagaattgccattctcataatgtgcagttcgattttgacctacaccacctcgcccaccgagctgaccgacgccatcgaacggcttttttcgccgcttaatgcaatcaaggtcgacgttcactcccttgccatgatgatgaccatcgccctgcggtttattccgacccttatagaggaaaccgacaagataatgagcgctcaaaaggccagaggagccgacatagaaagcggaggacttataaaacgggtaaaggcgcttgtgcccatactcattccgctgctgatttcctctttccgccgtgcgtccgagcttgccgacgccatggagtgccgctgttatcacggcggcgagggcagaacccgcatgaaggtcatgaaggcctcggcaatcgactatgtgtcgacgggggtttttgcgctgctgcttgcggcgataattctttcaaacacctactgcggcggaattatttattcgcttataaaaggatagttttatgaggtatcttttgaccgtcagctacatcggaacggcctatcacggatggcaggttcagaaaaacgcaaattccgttcaaagcgaggttcagaacgctctcgaaaaggtgctgggctgccgtcccgcactttcggggtgcagcagaaccgacagcggcgtccatgcgagaaaatactgctgtcactttgactccgaaaatcccataaacaccgaaaaggttatagccgggcttaatcattttttgcccgaagatataggagcccttgcccttcgtgaggttgacggcggttttcatgcccgatattcctgcaaggccaaggaatatgaatacataatatacaattcttacagaagagacccgtttcttgaagggagaagctgccgctatccccacgcccttgacgaaaatcttatgaacagggcggcaaaggcttttttggggacccacgacttttcctccttttgctcggcaggggcaaaggagggggataaggtcaggaccgtcaaaagcgccgccgtcgaaagaaaaggcgatgttgtgattttccgcgtgcgggccgacggatttctttacaatatggttcgcataatggtcggaacgctcatacgggtgtgcgagggaaaaataaaggccgacaaaatcggtgacataatctccgcaaaggaccgttcccttgcggggccgaccgcgccggccgtcggactttatcttaaagacattttctacgaggaggaagaaaaatgaataaagacaaacccgaaaaaaaagactatcgggtcataaatgttccttatgagtttaaaaacagatcctccgaaagtgcggatcttgacggtcagccgaatgtaaggactgatgaaggccgtgtaaacggcggcgcaaatctgccggaaaaacgtcagaaaaagccgatgaaaaaaaatgtcggcaaaagagtgaaatccgaaaagaacggaaaaacgcctccttcgggtgaaaaaaacgacaaaaaaatcagcgtgataatcggcggaaagctcaagcgggcggccaaattcaaaaagctgcttgccgctgcggccgtattgcttacggcgtttatagtgcttaacatcgccattcccataggacttatcgacgccacgggagaattcttcgcgggattttcggcctccggtccgggatttcctcttgacatttcggcggcctcgggaaggcttatttccggggtgggcagcgacgttgctttgctatgcgactcgaccgtaatgctttatacctcgtcgggaaaacaaatttacaaccgcccccacggtttttcaaatcccgccgcggcgacctcccgttaccgcgtgctggtttatgacaggggcggaaagggatataaaatcgagcgcagaagaggaaccgttctcgaaggctcggccgaccgtgaaatcataaccgccgccatcggcgataagggctttttcgctcttgccacaaggtcgggggactatgtgtgcgacgttaccgcctttgaccgaaagggcgggcagaaatgcacatggcattcctccgaacggcaggtcgtggctcttgccgtgtcagacgacggacggtatatgggaataggcaccgtttcgggacagggcggtaagaccctcggcggggtgctgcttataaaaaccgacggaggcacaattatatccgaccaaagctttgaaggctccaatgttgtttctctcgattttaagggaaacacccttgtgggagttttcgacaatatgctgacctctataaccgaacagggcgtcagaaccgatttcggatttgactcggggcgggtgtcctgctttgctcaaagctcgaccgccgtggccgtgacggtggaaaaatacaacgactcggccaacaatcagctcatggttttcgacaaaacccttgaaaatctctattccgccgacatcggcgccgaggcggtctcgctttctctctccggcaacaaggccgtcgtgctttcgggagaaaagctgatttcctttgacgcaaagggcgaaaggaaaaaggaagccgaagcctcggccgatgcccgtcagattattacatcgggagcgggaacggcagtgctcggctcggtcactatcgaatccggaaaggtgtagttaatgaatattgttttcgacataatatgtcttgctcttttggtaatcataaccctaaacggcgcaaaaaaaggccttgcctcctgtctcgtttcctgtgtcggggcggtggcggccgtggcaattgcggtttcgctttcggctcccgtgtcggagctttgctatgacgtgatgtttaaaaacagaattcaggcggaagtcgacagggcggttttgggcggagccgaaagtcccatagacgagggcgaaagaacggccgaaatacttgccgacgaaaacggaacggtttcaagaatgcttaaaaccttcggtatttcgacagatgagattgcaagagcggtttcggccgaaaacatcgcctcggtgagtgaaaacattgttgaaaatatcataaagccgccgctgctttcgcttataaaaacggttgcgacgattgttctcggaacgattttgctgttaatcgtttcgctgctttcaaaggcggtgggaaaggtttttaaaataactccgcttaaagggctcgaccgcggtctcggcggtctgctcggccttttggagggacttataatagtctatctgcttgtgacggtaacaaagtcgcttaccgtggcgcttccgaacggatttttgggtctgacggccgaacagctcggccgctcggtctcatataagctcatgaccggctctttttccggctcggccgcgcaacttttcaaccgcagcatagggaggacgtatgaataaaaaaatatttacaattcctaatctactgtcgtttataagaattatacttgtgccgataatcgtggtgctctatcttaaaaagcatatggtggcggcaaccgtgcttgtggttttgtcgggcgcttcggatatgctcgacggctttatagcccgaaccttcaatcaggtgtcggatctcggaaagctgctcgaccccattgccgacaagctgacaatgcttgcggtggtttttctggtggcgatacaccatttgccaatgcgcgtcatgctttatgtcatgatggctaaggagggcataatgctgctgggcgcccttgtgcttttcaaaacgggagcgcgcacctgtcagtccaagctgttcggcaagcttgccacggcggctctctatgtgaccatatttacggtcatgctgaccgacgttatcggttttgtgtcgggcggtgcacccattctttcggaaaaatgcctgtggataatggccgccgtatgctgtgcgcttatgattgccgcacttatccaatatattgtcatttttatactgatgaaccaaggaaaatacgacttcgacgccgaaaaaattcaaaggagctaacaaatgaaacccacactctgctcaagatgcaaaaaacgccccgccaaaacgatatcgctttggggcagcagcaccggctcgtgcgcgccgtggtttttataaccaaaatggagggggataaatccactcccgaggggctttgccttaaatgcgcaagggagcttaacatcggccccgtaaccgatatgcttaacaaaatgaacatttccgacgaggacctggattccatgaccgcactgtgggtgctgcgggtgtccggcgttacgctggacttcttccaccgggccaacataccgaatttatcgcaaacggcaattccggttctcggcggtgccgccaccttcccgggcatgatgaatcagttcttcggcggaaacgcaaatcccgaaagccaagaggaacaagaggtctccaaagaggctgacggaaagaaaaaagacaaaaagaaaaaccaaaaaaagagaaaataccttaatctttattgcaccgaccttaccggaaaggcgagaagcggcgagcttgaccgcataatcggacgggacagagagctttacagggtcattcaaattctctcccgccgaaccaagaacaacccctgtctgataggcgaaccgggcgtcggcaaaaccgccattgcagagggacttgcccttaaaatcgcggccggcgaagtgcccgcaaagcttatggataaggaaatattccttctcgacatgaccgctctcgtggcggggactcagttcagaggccagtttgaaagccgcattaaggggcttatcgacgaggtaaagcgcgagggaaatataattctctttatagacgaggttcattctcttgtgggaacgggagacagcgaaggctccatgaatgccgccaacattttgaaacccgccctttcgagaggtgaggttcaggttatcggcgccaccacctttaacgaataccgcaaacacattgaaaaggacagcgctcttgagcgccggttccaacccgtcaaaatcgaggagccgtcggtggaggacaccgtcgccgtgctcacgggaattaaggaatactatgaaaaatatcacggagtgaccctttccgacggtatcatccgtcaggccgtgacgctttccgaacgatatataaacgacaggtttttgcccgataaggccatcgaccttcttgacgagtcctgcgcctgcgccgcgctgagaaataaggcggccgacagactttataccgtaaataaggagctgtccgccctaaataccgagcttgaggagcttgaaagcgaaaccgaaaaccctgattttgagaggatcgccgccgtcaagaccgagcttgccgcaaagggcggcgaggccgatgagctgggcaaaaaggcaaagggcggaagggtgaccgaggacgaccttgccaaggttatcgagctgtggaccggaattcccgccgcaaaggtcagacaaagcgacataaaacgtcttaagggtcttgaggacaggcttaaggaaaaaatcatcggacaggacgaggctgtaagccttgtggccaaggccgtccgccgctcgagggttcagataagcgcaagaaggcgccccgcgtcctttatttttgcgggccccaccggtgtgggaaaaaccgagcttgtcaaggtgcttgccaaggagcttttcgacacccccgaaacgctcatacgtcttgatatgtccgagtttatggaaaaacattcggtgtcgagaataatcggttctcctcccggatatgtgggctatgacgaggcgggacagctcaccgaaaaggtgagaagaaagccctattcggtcatacttttcgacgaaatcgaaaaggctcatcccgacgttatgaacattcttcttcaaattctcgacgacggccgcataaccgacgcccacggcagaaccgtcgggtttgaaaacaccgtcattgtcatgaccacaaacgccggaagcggagcgggtacaagcctcggtttcggccaaagtgtcagtcagatgtcctccgacaagaccatgaaggctctcaagggattccttcgccccgagtttatcggaagggtcgacgaggttgtctgtttcaatccgctgacccttgaggactatgaaaaaatcgcaggacttatgctttcagaacttaaagagccgcttgccgaaaagggctacactctttcgtgggacgaacaagtcgaaaagtctcttgcaaaggaggctttcggcggaacgagaggagcgagagacctgagaaacgccgtcagaagagaggtggaggacaaaatagcctccgccataatcgacaactgcgacgaggaaatttcgggctttgtgctcgacgccgacggagtaaaggtcgtaaaataaaattaagccgaacggaaaatttctttccgttcggcttttcttaatttttggggagccgcaaaatgtcgccgcttgacagttcaaacggacacgggattttgacgatttcctgcgcatggggggcgctttgaacgctctctccgtctgaattgactatttcgccgaccttaaagctttttccgaagatgtcgggggaaagaatttcaagtgtgtcacccaccgaaaatttgcccctttgctccgccgtgagaattccgttttcaaagccctttaccactcccgcaaaggtacattcgcttatataaggaacctgctcgtcgggacggtattttttaagctctccgaggtaaaatcccgtgcagtagggacggtggcttatgcagtcaagctcgtgattaagtgcgtcaaggtcggtacagccgtcaagtctttttcgataggccgaaacgacggtggcgacgtagtacggcgttttcatgcggccctcgattttaaatgaggtaattcccgccgccgtcatgtcgtcgataatatccatgcagttcatgtctctcgagcttaaaatgttggtgccggagtctgtttcttcaatttgaaaaaactcccccggccgtttcatttcggtgatgtgatagctccatcggcagggctgggtacattcgccgcggttgccgctgcgccccgaaagataggggcttaaaaagcaccgtcccgaataggacatacacatggcgccgtgaacaaaggcctcgatctccatgtcgtcggggattttacttctcatttcggcaatttcctcaagagtcatttcccgtccggtgacgattcttttggctcccatattgtagtaggcgagagccgtggcatagttttggcagttggcctgggtgcttatgtggatttcgaggtctgcagcagcctcctttattgcgcaaaccgccccgagatccgacacaataacggcgtcaacggataaatcgtaaagcctttttgcataggattttatttgctcgatttcgccgtttttggcaaaggagttgaccgtgacgtaaagctttttgccgagtgaatgggtttccttcacagcctgtgcgatactttcctccgaaaaggccgaggcgcttgcccgaagctgcataaaggggcctccgatataaaccgcgtcggctccgaaacgcagcgccgttcttagggtttccatgtctcccgcaggagcgagcaattcggtttttttcatcataacaactccctgaaataaagtccgcctgttttttctcccgaaagggaggtgccgcttttataagcgtcgaatatttgcctgcacttttccggcgtctcggttgtgaaatacagcgtcataaagtcaattccgcgaatttcttttccgcaaagcacaagcggtcgggaattgagtagtgtggaatagcgttttgacgagcagagaacgggaaaatctatgcccttgcggtcggtgagggtgtttaacccggggcagccgccgcagccgttttgcctttttgccgggcagtttcggaaacgcatgagcggaaggtatccgtagccgataattcctctttcgacgctgccgccgaggttttcgatgctctttgcgtcaagttcaaaggaaacggtggccgaaccgacgccgagctcttcaaggcttttcagagaaagggaattgagaatgttaagcccgtgaccgcaatgtattttaaagccgtgctttttcgcaagatatattccgccgatgttttcggtcgaaagtgttgttatgccgaggcttttgagcttttcaagcttttcttcgaggtctttgcggtcaaaggtgagggcgggaagttctccgtaaagaaattcgccgaaatcttccgctttttcggggctttcgagaattctgtcaacggaaagaatgtagccttcggcggttttcacgctttcaagctgcgcaaagctttcccctcggataatgtatctgcattttcctgcggcatgggccttttgagtgaaatcgcagtcggtaaatttatgagccgttacggccgcaaaaagctccgattgctttttgaccgcctctcggcgcagggcgtttaatgcgggcagcggcagcatgagattttcgccgcagtcaagctcgaaattatctataaagaagggagtccctccggtctttgaaatctgcttttttgccgtttgggcgtcgagcgggcggttgaccgcagggaaaggaaccgctccgaatgccgttaccgtacccttttccgaggtaagcgttaaagaggagggcgtgttttcctttacggtcaggaatgcgtcgagaggcagccgcttatattcgtttttataaagctccgacagctttgaaaacaccttttcggccgacacaacgtcgtcctttgttctgtgtccgaacatttcaagatttctttgcccggttatatatccgtctgtaaagccgcttcgggaaaacacctttcttaaggtgtcaaggtcgggcttttgcccgtttttcgccgcgatgcaggcgttcaccgccgccgcgacatattcgggacgtttcatgcgcccttcgattttaaaggagcatacgcccgccttttcaagctcttttatatattcaatatggcacatatccttgagcgaaagggcaaaatgccgttcacccgatttaaaatcaagtcggcagggctgggcgcaaaggccgcggttgccgcttcgccccccgagcatggatgaaaggtagcagcagcccgacaccgacatacaaagagccccgtgaatgaaaacctccgtttcaagagaggtgtttttggcaatatgttcgatttccgaaagggaaagctcacgggagagaacgactcgggaaaatcccatgctctcaagctgctttgcgccgtaaatgtcatgaacggcaagctgcgttgaggcgtgcagcgaaagattcggcacacattctttaagtatttttgcggcgccgagatcctgaacaatgacggcgtcggcacccgaatttgcaatttcctttgcaagggagataagccgttcggtttctctgtcggtgaaaagtgtgtttagggtgatgtgggccttgaccccgcgctcatggcagtatttcaccgtgtcgtaaagcgagtcgaaattttcggcgtttctgcgcgcgttaaagtcctttgcgccgaagtatactgcgtcggcacccgaacgcacggcggcctcaagctgtttgcgccctcccacgggcgccagtatctcagtcattttcctgctcctccccgccgctgaaaacggcctttgccgccacggcgcaaaacaccttgtatgcgcctgcaagcttcatcattttcgcacattcgttcacggtggaacccgttgtcattacgtcgtcgatcagcagcaccgttcttgcgaaaaccatgtcggtatctgcctcgaaaacgccgaatatgttgccgtttctcagcgccttgggaagtgaccgctggggaaccgtgtcataaatttttgaaagagcgttttgctcaaaaggaacgccaagctttttggaaaccgcctttgcaagaagtcttgcgggactgtatccccttgacgcaaattcccttttggtcacgggaacgcaggttataaagtcggggaggggaaaaccggaggccgaataggccgaaacaatgcggcttgcgagaaaatcggccggctgaagattgcccttcgccttaaaagtcctcacggcgttttttaccgctccgtcgtaaataaaggccgaaacggcgccgtcgaattcgaaggcgccgtttttgcaggtgcaaagctctttcggagctccgcagtttttgcaggcgtcggccaggtcgatttcggtcttgcaaagggactcggcgcaggagggacaaaggtcgcttccgaatgatatgacccgatcacagcctatacagcgggacgggaaaagaattcttaaaaaacgttcttttaacttcataaacaacattttatcactcctcggcgcaaaagtaaataaaaaccgtgcccgccgcccgttcacaccgcgaaaatgtggttaaataacgaaaaaacccttggaaaaaggttgacttaaaggttcttatatgttaacattcacgaaagagaaaggtctcgaaccgtatagttttccgtaaggagttgtttagaaaaatgaaaaaagttttttgcgttatttcccatacacattgggacagagaatggtatgctcccctggagcttttccgcaaccgtctgaccgacctgttcgacagactgctcattattctcgaaaaaaatcccgattatgtattccacatggacgcacagaccgttgtgcttgaggactatcttgccgtccgtcccgagaaaaaagcaattcttatgcagcacattaaaaaccgccgcataattgtcggaccttggtatcttcagaacgacttttatctcacaagcggcgagtccactgtcagaaacctgctcgagggtaaaaagctgaccaccgagttcggcgcaagcggcggaatcggttacgctcccgaccagttcggcaacatttcccagctcccccaaattcttgacaacttcggaattcacaatttcgttttcggccgcggtttcagcgagtattaccgcgacgccgagggtaaggttcagcgcaaaccctctcccaccgagtttatttggaagggtgccgacggaaccgaggctctcgcaatacatatgcgtcattggtacaacaatgcccagcgtttttcggccgacatcgacaaggcctataaatatgttgagagcattgccgcctgctttgacaacgaattcaccttcacgccttacctgctgctcatgaacggcgttgaccatctcgagccccaggccgatcttcttcccattctcgaggaggttcagaaaaagcttcccgaggacgaggccattatgcagtataacatggacgactatgtcaaggccgtcgacaagtttgtcaaggaaaacgacatcaagctgcccgttcacgaaaacgagctcagaagcggccacgattgggaaattctcaagggaaccctttcctcccgtcactacctcaaggttgccaatgttaaggcccaaacgctccttgaaaatgttctcgagcccctttattccatgctcgaaaaggacggcatgaacggattttatccctatgaccgcctgatttatacctggaaaaacctgctccgcaaccatccccacgactccagctgcggatgcagccgcgacgaggtccactatcacatggaaaaccgttattcggaaattttcgaatacggcaacgaccttctccgccgcggtatgattgccgccgcaaatcacagcaaggtgctcagagaggcttctctcgacgattatgtcattaccgtggccaataccctttcttcggaatttgacggaatgacctatgccgagctcacctttataagaggcgacgaaataaacaacttcgaaatcttcgacgagcagggcaacaaggtcgactttatcgccacaagaaaatacgacgattatatcgacgttttcagccccatcaaccttcccggaaccattgacgtcacaaagtatgacatctatatgaaaaccggaaaaatcactcccttctccttcaaaaacttccttgtcaagaaaacctgcggagacatggaaatcaccccggccaagtgctgcgactgccccgaaatcgaaaacgaatacttcaaggtcgccgttgacgaaaagggaaaaatcacccttaccgaaaaggcaagcggccgtgttatcgacgatgttcttaagtttgaggacgttgccgacgcgggcgagtcctatgttttcgtgaccggcaagaacgacacccccattctttccgacggcaccgcaacctcagttgaggttctcgaaaagaacgaatatgtcggccgcatcaaggtcagctatgacctgcttctgcctgtcgattatgacaaaaaggccgaaaagcgcaccgatgaaaaggtcgtttccaaggcaagccttgaaattattctccgcaaggacgagaaatttgtcggcgtgaaatatgccgttgacaataaatccaagagccaccgcacaagagtgcttgtgtccaccgatgcgacaagcgacgtttccaccgccgacattccctatgatgtggttacccacggcgaggaggctcattacatcgaaacctacagcaaggttctgcccaacacctccttcgcaagcataaatcaaaacggcaaaggctttgccgtctttaccaacggcgctcacgaatatgagcatatggacggaaacaagctggcattttcgattatccgcgccaccggacttatctccgaaagcgttaccgagacctggagagtgcccggaaatcagtgcataagactgattgaaggcgagcttgcgctctgcccctttgagggagacgttttctcggcgggaattcttcagctcgttcagcgtttccgcgctccggtaagcgtgtgccacacctcctgcgacaccagaaagttcgagggaggccgcccctgcgtacaggacagcgagctccacgagttcttctatctgcccgacgcctatccgaaggcttccattccttccaacattcccgctttgtcggttgagggcgacggaattcaggtttccgcctttaaacgcagcgaggacggcagcggacttgtggttcgtttcgtcaacctgtctgataaggagaccgaagccgccgttaagtttgacggcaagatctttatgaccgacatgaccgagattccccgtgagttcatcggctttaacagccatgttttcaaggtcggtaaaaagaaaatcgtcaccctttatctcggcaagtaattttttaaaaaacgggacggctgcggtttttccgcggccgtctctgactgatttttgagttaggaagatattatgaaatttctcgattatgtcaatgtccgtatgggaaccgacaccacccctcttttctccaacggaaacaccctgcccatgacctcggtgcccttcggcatgaacaactttttggtggaaacaaggggtcacaatcctcttgaaatcttcaacgccacagacagggtcaccacgggtataaggctgacccactgttcaaaccgctggctcggcgactacggatttctgacctttatgccccgaagcgaaagctccaaatccggaatatgcagcccaagttcctttgtgcccgaaaagaccgttatgactccgcacgagctttgcgtggattttcagctccagcgtgcgcgggtgaccctctccccggcgcagcgctcggcaatcgcaaaggtgcattattacaatgccgaagggggcagaagccttcttttaaagcttttcggaacggcgcagattgaggtcaacgccgacggcaccgtcaccggaaaggtgtgcaaccatttcaacgaggtgcccgacaatttcggcctttattttgcaattgaatttgactgcaaggccgacgcggaggccaccgaattttacacctgccacggtcagaaaatcgccgctgcgggttcatatgaaggggaagatgtctttgccgacatcgctctttgcggcgctcccgatgattttgagatgagaattgccacttcctttataagcgtcgggcaggcaagacagaaccttaaagagcttgacggcaagactttggacgacgtgaagaatgcggcggccgacaaatgggagcaaattctccgcaaaatcgaaatcgaggccgacgaggaggtcaaaaagaccttttacagctgcctttacagaatgttcctttttccgagaaatatgtgcgaatatgacgaaaacggcgcacagaagcattacagccctgccgacggcaaggtatacggcggtcctctttacagcgacaacggattttgggacacctacaagacggtttaccccctctattccattatcgcctccgacgaataccgcgatatgtgcgacggtttccttaatttttataaggaatcgggttggctgcccagatggatggatcccggcgccgtcgactgtatgcccggaacctctatcgacaatctttttgccgacgcggtggaaaagggcgtagttaccgacaaagccaccatagagctcatgcttgaatccatgcttcgccacgccaccaccgaaagccccgagcccaaatacggccgcgagggcattgccgattatattaaatatcactatgtcacaagagaccataaggaaagcgtaaacaagactcaggactatgcctacggagatttttccattgcccgcattgccgagcatctcggaaaagacgagcttgccgaggagttttatgagcgcagcctttactaccgcaatattttcaacaccgaaaagacctttatgctttcaaaggataaggaaggcaaagagcgcgacgactggacccagtttgactggggcggggactacaccgagggcggcccttggcagaattcctttgccgttttccacgattttgccggccttgcggatttaatgggcggcagagacaagatgattgaaaaaatggacaagctgtttgccactccgcctcttttcaacggctgcggatacggcggcctcattcacgagatgagcgaaatggcgtcggtagacttcggtcagtgcgccctttcaaatcagcccagtttccacattccctatatttattcctatatgggtgctcccgacaagaccgctttttgggtgagaagagcctgcaaggaactgttcaattcgggaaataagggctatccgggcgacgaggacaacggaagcacaagcggttggtatgttttctcggttctcggattttatcccgtttgcccgtcggttgccgaatatgtcgtcggttcgcccacggttagctcggcggtcatccacaccgacagcggtacaaagctcaccaccaccgccaccgcccagacc

SEQ ID NO: 4299 - DNA, 6754 bp, Unknown
  16S sequences of unknown bacteria
cacacttgcagggcgagaagagtttttcccgacgtacacgccgccggaaaaaacaaattggactttatttgcgccgtgcgcggcgcaaactctgcgaggcttttgacagtctaatccaggaaaaaataccatgcattgggcggctgtcaatgccgcttgtgcatcggcagccgccttgtacgctgcctagagagcgtttgcgcttcctgtaggcaaaaaaataacgggcatccggggaaaatcggatgcccgttatttttttgccaccactgctgctctcacgcacgcggcagtttttatgcctttgggtgacattgctcatagacatttttgatgttctgcttcacgatctgggcgtagatctgcgtcgaggagatatcgctgtggcccagcatttcttggatggagcgcaggtccgcaccgttttccagcaggtgcgccgcgaagctgtggcgcagcgtgtgcggggtaatctgcttttgaatccctgccttttcctggtaggatttgatgatcttccaaaagccctggcgggtcatgcgttcgccgttcatattgacaaacagcgatttttgctggggatcggcaatcatctgggggcgaatctccgcaatatagacccgcagcgcctttactgccgccgggtacagcggaatgatccgctccttctcttccccaacgcggatgaacccggcgctggtattgacatggctgagatccaggttgatgagctccgaaacgcggatgcccgtcgcatacagcagctccagcattgccttatcccggtaacctttgaaatccgtcagctgcggctgctgcagcagcagctcgacctccttgcccgtcaggatctgggggagcttcttttccgtcttctcgaccttgatgttccgagcaggattttcctggcactgccctgtcagggcggcatattgatagagatttttaatggacgccaggctccgctggacgctggcggcggattttccgtggcccgccatccagtcggtatacgctacgacctcgtcgtgggagacggccagcagctcctcctgcaggatgccctcgacatactggctgtactgccgcacatcccgcatataagacgcgacggtattctccgacgcgtgttttgtatggatcagatacgcctcaaaggaggcgagcagttcagccatagtgtaaccctcaaacaatggaagcaaaataaatctgcgcggcctgcgctgcgccccaaagccgcgcaagcgcggcaatgccaaagcaaagcccacatagcgccacctggctgcggcagcggtaccggcgtgccagcaccagcagttgactcagcagcaggaaaaaagcgggcagcgccgcggaaaacagcgcaagatacacgccggtatcagacgcctgacacagcaagaagcagctgaacgccagcgccgcgccctgcagggcaaacacaagccccaccagccagcgccgccgcatcggcctggcctgctgccagagcgccaagccaaggcacggcagccaaagcagcaacgcctggggccgggatggagccgcccaaaacgagaaccagaagtccgtcgaacgcagcgcctccggcaacggaaaaatgaccagcagcagcaaactcatcacagcgccggtcataaagccggcgctggcaaggcagaccgtatcagaatcgttatgtctaccaaaactccggaaatgcatggtgcctcctttgtggttgcatcgaaagaatggccaattccggaacattgcaccgccgacgctgttaatatacaccagccaccgggaattttcaagacgcttcggccatctttcctttttttgtaaattatgcacatatattatgtaaatataattatgtaaacataagaacaggcggttccgcctacacaagatgtcgcggcgcggcacggcttcgtcacgagatatgggtttgctcataaaaatcacgccgcaaaccgggcggaaaccgatggaaatattgcacaaattttcagtagcgcacccggtagccgcgccgccgctgcggcatcggcagcagtgccagcagcgcagcgccgcataaaatgccggagtttaaaagaatcaactcaagatctggctgcgccaggcagaggttgcccaccagcatcaagcccagataacaggcgcagatgcccagtgcgccagcccatttggccacggcccgggccgccagcttgcaccccagaaacgtcccgacggccagtatcacgctggtatagatgacatcctgcgcctgaggcagcagctgcgcgccgatcagcgccgcacagagcaggctcagcgccaggcaggccccgcagccgcatccggcagccaagagaaattggatacccggtcttttcgcagacgaccgtgttttctttcctttcatagacatgcctcctttgtgctacagcctatgccctcccctgccggatgataccgaaaaaaactgctctgctgcccaggacttgcatccttagcagcagagcagagttcgtgcttttgtgtaaaagcgccttaccggcggcgccaggtgttgcgggagaacaggactaagatcgggaatacctccagccgccccgccagcatatcgacgatcaggatcagctttgagaacgggctgaacagcgaaaagttgcacattgggccgacaagctccagccccgggccgatgttattgaagcaggagacgaccgccgagaggttcgtcatcagcgagaagttatcaaacgagatcagcaaaaagctgacgacgacgatcataacatatgcggtcagatacaccgtcgtcccgctcaagatcttttcatcgacccggtgcccgttgagccggacgacctggatctgctgcgggtgtagcatcttacgaatattgcgccgcagcgccttgcccagcagaagcagcctgccatatttcaggccgccgccggtactcccggcgcaggcgccgatgagcatcaggcacagcagcagcgccttggaaaacgcaggccataggtcaaaatccgtggtggaaaagcccgtcgtcgtcataatgctggagacctggaacgccgcgtggcgtaccgtctcgcccaaggttttgtaataaccgcccaggttcagaacaatcagcaccgtgctgacggcaaacgtccccaggtacagccgcagctcctcatcctgccagacgctcttccactgccgcagcagcagaagataatagcaggagaaattgaccccgaacagcagcataaagacggtgcagaccgtctggatatacgggctgtagctggcggcgctgtcgttcaagatgccgaagccgcccgtcccggcggtgccgaaggagacgcacagcgcctcaaacagcggcatcccaccggcaagcagaaagatgatatccacgatcgtcaggacgatgtacatcaaatatagcagccgcgccgactttttcatccgcggaaccagcttgcccacgctgggtccggggctctcggcccgaagcagatgcatagtaaagccctcgttcttaccgctgaccggcgcgacggccagcaaaaacaccagcacgcccatgccgcccagccaatggctaaagctgcgccagaacagcatcccccggtccatcgcctcgacatttttcaggatggaggcccccgtcgttgtaaagccggagaccatctcgaaaaacgcgtcgatcaggctgggaatctgatgggagaagtaaaacggcaggcagccgagtaggctcagcaagatccagctgacgccaacacagaccatcccctctttggcataaaaacccgccttggcccggcggcacagcagcgccagcgccccggcggccacgagcagaatgccgatggtgtataaaaagccgtaagccgaggggagtcgaccgtcgtacaggcagatcagcagcgccggcagcataaagacagcctccatcgccaaaatcagggcaatgagccgccccatcattttatagttcatgtttgtgcctcgcttgggaaaaaatcagcagcattattctgcaaaaatatcgttgatctgccgcagcgtaccgcgtccgctggtgacgataatcaccgtgtcgccgcgctgaaaggtggagtcgccgttggggagctctgttttcccgccccgggagatggaaaccaccagcacattgcgccgcagcttcagctccttcagcggctgcccgcagtgacgggtcgcgtcgtcgacgaggaattccaccgcctccgcctgcccgtcggccatcgcgtggaccgagacggcggcgccagtctggttctgcatcgcccggacgtagcggacgatgatattgcagcatagctccttcggcttgatgacgctgcccaggggtaagtcgtcgacgatgcgggtgttatccatgcggcccagcttcgtgatgatctggggcacaccgcggctattgccatagagggagacgatgatattaagctcatccagccccgtcagggtcacgagggcgtcgcagtcatccagatgctcgctttccagcagggactggtcgctgcagtcaccgcagaccacggcagcgtcctccagctggtctgccaggtccaggcagcggccatgctctttttcgatcagcttgacggaaatgccgtccttttccaagagctttgcaagataaaagctgatacgcccgccgccgcagaggatgacctgcttagcccggcgggtgatgatccccagatttttgagcagcaccgtcaggtctgcccgggcggccgtgacgaaaatgcggtcccccgcctggaggacaaaattgccgtccggcgcgaccgccgcgccattgcgcagcaccgtgcacaccaggacctggcagttgacgatatcgttcatctgactcagggggcgattgcagagcttgctgtccggattgatgcgcagctcgacgatctcgacccggccattggcaaacgtatcccgccgcaggaatccggggtatttcagcagcttttcgatctcctctgccgcctgccgttccgggttcaccgtcagcgaaagggcaaaggcatcgcgaatttcatagatctgcgatgtatattccgggttgcggatgcgggcaatggtatgcagcttcttgttcatctggtgcgccgacatgcagcaaagcagattgatctcatcggccccggtggcggcaatgagcaggtctgcctccaggatccccgcctgccgtaggaccggcattgaggcgcagttcccatgcacgaccatgatatcatagcgctcctcgctgctctccaacgcgctcaggtcgttgtcgatcagcgtcaaatcgtgcccttcggcagagagctggcgcgttagcgtcatgccgacttttccatcccctgcaataatgatcttcacggcttcctccacattctaagctgcccggttggcgtccgggcagctgctttttctctgagatattctaagcactactggcgcaaaataccgcgcctgcggcgcggtggggcatgaagcgccccctttgcggctattatagcagattgttttaaaaaggcaactgtaattccaggattctttattccctttttacacgttttgcaggcgctggctgcttttacggcgcaccacaacgcaggctgctactcgtccatctcctcgatggtatacgccgccgttttctttctccgctttgtcagcctgtgttttacgcggagcacaaagagaacagtcaacgcaatgccgagcgattccaaaatgcgcagcttcactttatccccataaacaagatccgcccagccgctgtctaaggtcaatatgacttggtgccgcccgtccttctccctggtgatttgacggccatcggattgatacacccacccatctcggaccgggtcgcgttcgttgacattccatttgcggtataattccccgatattggtctcgctgagatgggggtagatccttgtttcgtgggtctgcaggtcgtgttcgatcagtttcgggaagaggcacacataaagatgcgtatccgtcagctttaatttcacatcctgcgtttcctccaggcgcagcgaaaactgctgattcccggctgcattataatagctgatataccggatatcctcgatggaaaattccccagctatacccgttggcctggtatggagaatcgcaaagtcgcccccggggccaaaattgatctcctcgatctttgcgcacttgaccggctcatagatgacctccaactgatacgcaaccggcggcagtgtcccggcttctaaggtgagcccgtccacctgcagcgccgtcgctgccgcgcaaagtccagcgacgatggcggcggcacagagcatatggaatagcagtttcacaagcttctttcgcatgcatttctcctcctgttgaataatttaaagtataaattatggatttttttggcaatctgataatttgtaaccaagcttaggacagatttaaacgaattcccctccgggtcaacctgattaaccgggttattcccacaatacgcaaactggttcgtattcaggaaggacccatccagggatatctggccgtcggcattcacaaaccgcccgattgccgggtcgtaataccgtgatcgttgcaatattccccatcgcgtcgtatgtgtagcttgcagtgcgattcgaccagccggcgcagaggccggtgtaggactcgctggcgatctgggtcgtggtgcgggtggaggagatgtcgcggtaggtgtagctcttggtgtagagcc

SEQ ID NO: 4300 - DNA, 22167 bp, Unknown
  16S sequences of unknown bacteria
ccaaagacgacgattgaggttgcggaacggagactcagtgccttatgccgcagcattcttcccgcgaaccagcgaagcgctgttcgcgggcgcgggcggtcgatcagggtttttcgacaggctgaggccccggcaaattgccagggcctgtcctgttttcgattttacggaggggaaaccgccgcttacatcatgctgcggtacagctccttgatctcgtccacgctggtgtcgcggggattgccgggacggcaggcgtcggcgtaggcggactcggccaggaaagtcacgtcttcatccttcaggatgcccttcaggtcggcggggatgcccacatcggcggacagcttcttcacggcggcgatggtagccttggcggcttcgtcgtcgtccatcatgtcgatgccgtccacgcccatggccttgccgatggcacggtaacgcttgcccgctacgggagcgttgtactccagccccagcggcagcaggatagcgcaggcaacaccatggggcgtgtcatacagggcggacagaccgtgcgccatgctgtgcacgatgccaagacccacgttggagaagcccatgccggcgatgtactggcccagcgccatgccttcgcggccttcaggcgtgttttccacggcagcgcgcaggctgtggctgatcagacggatggcctccagatggaacatatcgctgatggtgcagtgacccttggtgatgtagccttcgatggcgtgagtcagcgcgtccatgccggtagcagcggtcaggcccttgggcatggaggacatcatgtcaggatccaccacggcgatctcggggatgtcgttggtgtccacgcagacgaacttgcgcttcttttccacgtcggtgatgacgtagttgatggtcacctccgcagcggtgccggcggtggtgggcacggcgatggtgaataccgcgtgattcttggtgggggccacgccctccagcgatcgcacgtcggcgaactcggggttgttagcgataatgccgatggccttggcggtatccatggcggagccgccgccgatggccacgatgctgtcggcctgagccttctggaaggcggccacgccgtgctgcacgttttcaatggtggggttgggcttgatgtcgctgtaaatgtcgtaggccatgccggccttgtccagaagatcggtcaccttctgggccacgccgaacttcaacaggctggcgtcggtgcagaccagcacctttttcttgccccggttctgaagctccgggacgatattttcgatggcacccttgccatgatacgaaatgctgttcaggacaatacgatctgccatgattgcgttcctcctttggaatgaatggactgattgccgaacccctgacggagttcctataaagaagttttcgaccttttaggacgatttccttccttgggattatgaagggtttgtgaactttctggatacagcatcccaaaacatccatgcagccccgtcagctgaagaacagcgcccgaatgtcttcctccgtcaggctgctcaacgccgtttcgcccgaaatgaccacccggtcgaagatggcccgcttgcgctggctcagatcggtgactttttcttcgatggtgccctgagcgatcagcttgatcacgtctacgtccttggtctggccgatgcggtgagcccggtcggtggcctgatcctcggcggcagggttccaccacgggtcgtagtggatgaccagatcggccccggtcaggttgaggccggtgccgcccgctttcaaggagatcaggaagaccttgccgtcgccgccgttgaaacggtcgcagagccgctgccgttcctccgggtgggtgctgccgtccagatacaggcaggaaacgccctcccggttcagccgtttgcggatgatctgcagcatccccacgaactggctgaagatcagcatccgccgcccggaatcaatggcggaatggacggtctgcaccagcagctccagtttgccgctggttccctcgtagtcgggcaggaacagcttggggtggcagcagacctgccgcagcttcagcagcacgctgagcacctgcatccgggcccggggcagcgaaccttcatccagcgcctgacccacgtgctgccgcagggtggccagcagcgtttgatagacccgctcctgctccggcggcatggcggcatacagatactgctcgtgcttttcaggcaggtcgctgagcacctcgctcttcaggcggcgcatcaggaagggacggatgcgttcccgcagttcttccgcccgctcgccgctgccgtagcggcgcaggaacgcggcctgggtgcccagatagccgggcaggatgaagtcgaagatgctccacagttcgccggtgtggttctccatgggggtgccggtcagcgccacccgcacctgcgcatccagctccttggccgccagcgccccctgactttgggcgttcttgacggactgggcctcgtccagcacggcgaagcgcaggggaatgtccttatagtattcaacgtcccggcgaagcaggggatagctggtcaggatcacgtccaccgaatcgtcctttttcaggtcggcgatggtgtggcggcgttcgtcccgctggcccgtcacgacccggacgatgagtccgtcgtcgaaacgcttcatttctgccagccagtgataggtcagggaagtaggggtgacgacgatgcttttttgagaaccgtccttctttttggcggcggacagggcggcgatgacctgcagcgttttgccaaggcccatctcgtccgccaaaatgccgcccatccgggcctcatacagcgaaaggagccaatcgctgccccggcgctgatagggggacagcttcttttgcagcttctggggcatatagtcctttttcgggggctggctcagggtttgaatggccttctccgattcctcgtccgtctgagcgtccgccccggccatgcgaagcatactgatcatgtaggcggcccggtacgcgccgaagctcaactctctcgtgtcttccggaacgttgggttcgtccagatgggccgcgtccagcagctcctgcaccacgggcgcaaggcccatcatatcccgcacgtccagaaattcgccggttttcagccgcacatactgctgccgctgggcaatggcgttcagaatgggcaaaagctccggcgcgggcttgccgtcctccagcagggagaataccagccgcccgccccgcatatggaacgaagccttggccgagaaccggcggggcttgacccgctcgaaggcctgcgaagcgtaaatggtgcagtggcgggaaagctccgccacgccctgcgtacagaagtacaaaatttcccgggagcggcggaggatgatgcggcccttgtgaaccacaaagccgaagtccgccagcagatccagcaccagcccttcttcccggccgtcccgcagcagcattcgtccgtcgggaagcccctgcgccgccggagccgcgtcctctccgtcccgaagggcgaagggcagcaccacggtctccccgtagtggaattccattcgggcttccacgttgccgtccaccagatccagataggccacgggcttcaacggctccgacaccagccgggcccgcagctccggcgaaggcaccaccgaccccacggcggacagcgcgggcagcagcacggacagcacctcctccgcattccgggcgggatagcggaaggaagaaccctcgccgagcaacagccggcacacccgggcctgagaggaatacagatgcgtgaccgtattgcccaacagcacataccgcgcgtccggcgtgatcatccgcagctgctccgtgccctcggtggacaccagaagctccgtgggggtcaggctgacggcgaagcacaggggcagctcctttttgcggatgccgctgtgcatctgcttctgttcgccaaattgcagctggaagggatagttttccagatagcgcatgacgctctgcaaaaaaggcccggtcagcagtacaaaacgcccatcgcattgcagcacggaggcagcgtcgctttcggcggctccctccggcaacaccgcgggctctgattcatttttcagaggaatatagctcatcagcgccgtcagaaagcgctcgtcctcccgggaaaagcgcatactgtcgggccggtaggtaaacttgggggacagggtcagctccgttccgctgacgaagcaggccagcaggtcggcgatatttttgacggcgtacagccgctcctgcccggccgacaggcccagaccgatccgaccgtcctcgtacaggcgcagcaccgccagcagacggacggtctcgccgccgggcatggcccggttcagggcgctcaacatccgttgtcccaacgccagctcgttttcctgctggaaacgcttgagcgtgccgtcactttcggcccgcagcaaggcggccgtcacgtgctggcagggctgctccgtttcgccgcaggtgcacagtgtttcgccccgccgggtaaaagtcaccgactgcacgtccgtgccgcccacttcgtagcgcaggccgttttccacctctatgggctgggagaccagtccccggcggtaaagtttttccccgttctgaaaggctgccgtatccaccccgatggattccaaagcaatcatccgcatcctcccaaatcaaaaccaatctttttatatttctggaaaaggtttccgccttcctgcctttcttcgggaagaaattccgaaaaaacgaatgttttttccttttcggcgcagactgatcatcggaacggcaatcaggcaaacggccgaaagacacgcgcaccccggggcttttgattgtaaagcgccaagccgcctgcccggcgcatgcggcggatgatgtgagatgggtaagaagaaaaacttttgttttgcgcgatggatttcctcaagcacagctgctgccgagaagccttgcgctttcgatggttgacgtttcaagcagggccgcatttcatgcggttcctgtttgcgttttccgccgtttaacgaaagaatttccgaaaatccgtattttttgaaaaaagaggattgacgcgccgggcgaaagctgttataatatctttcgctggttccacaacgtggagagatggccgagcggttgaaggcgctggtcttgaaaaccagtgatgccgaaaggcaccgggggttcgaatccctctctctccgccactttatccctcttggataaagaagggcagatcaaaccgtccaccatggagaagtacccaagtggccgaaggggctcccctgctaagggagtagggtgcgtgagtgccgcccgggttcaaatcccggcttctccgccaaaaccttgccagacaacgttccggcaaggttctttttacgtttggaaaggaaaaaatccgccaaaagcacccaattcttttttctgccccatgaaaaatgactgccatttccaaacaggcgcggagagcgaacatcctctccgcgcctgctttttgatttcattcaatttaacctgtccgaccaggaatgcctggttttacttcttctcgtccagcagcaccacgccgtcagcggggttgcggtcgatagcacccacaatgcggtggggcaagtagggttcctccagataggcaacgtcctcggctgtcagcctgaccgccagcgcgcccgccgcgtcgtccagatactgcgtcttcgtcgcgccgacgatgggggaggccacgcccctggcccattcccacgccagggcgatctgctgcattttcacgccgtatttttccgccagctcatggacgcgggcgacgatctgcatatcctgctcctcggtgcggtcgtatttgcccatggcgacgcggtcggtctggctgcgcagcgtgtctgcgttccacgtgggccgggtcaggtggcccgccgccagcggactgtagggcatcaggctcacgcccatctgccggcagatggggatcagctcccgctcgtcctcccggtaaagcaggttgtagtggttctccatggcttcgaaccgcgcccaaccgtggtctcgggcacacagctgcatattgtaaaactggtagccgtacatggcggacgcgcccagcgcccgcaccttgcccgctttcaccagatcgttcagcgtctccatggtttcctcaatgggcgtttcgtagtcgaaacggtggatgatatagaggtcgagataatccgtgcccagccgcttcaggcttccgtcgatctcccggtgaatggcctcacgggacagtctgcccggattgaaatacaccttcgacgcgatgactaccttatcgcgggaaacgttctttttcagcgcttttcccagatattcttcgctggtgcccgcggaatagctgttggccgtatcaaaaaagttgatgccgaggtcaagagcgtggcggacgacggcttcggtggcgctttcgtccagcgtccagtcgtgcatggttcccgccttgccgaagctcatacagcctacgcagagcttggaaacttcgatgtccgttttccccagtttcgtatattccatggtcattctcctttcatagccccagactgtccacccatttcggacggacgcggcgctttcccggctgctgagccgcttgccggggagacatttcgcagtcggggcacagcaggctttcagaatgctttccgttttgcccatgccgctgccgccggaggtggcaaagggcacgagggttttgtcggaaaagtcgcagctttccaaaaaggtctcgatgatgcgcggagcctgataccaccagatggggaagccgacgaatacaacgtcgtactgcgccacgtccgccggggctgccatggccgggcggctcttatcgtccttcatttcgagggtactgcggctggaagaagcgttccagttcaggtcggcggcagtgtaggccgcctggggcttgatctcaaacagatcgccgcccgtcacgcctgccagcgttttggccagccgggacgtttcgccgcttgaggaaaaataggcgattaacattttactcatattcccattgctcctttcaacgaaaacgttccgtgaagcctttttcacaggttaaaactatgatagcagtcatttttgaaacgtccaataccctttccttatggtcagatattggggttgaccaagacttttcactccatataaaacagtccgttggggtcgtaatctgtgctttgaagaatctcaatgccaaagtggtcgtagaccgtaccggccccgtccttgtcgatccatcgccggtcaaattcgtctgcgtcgatcaggtcgtgaccgacgcaggccgggtcgttgaagagaaaatacgcctgtttgccgcgctggccgtagccgacgcagatgacccagtggccttcggccagataggtttccgaatcggaagggtcgtcgagctggtagctgccgtcctcggcggaggaccatgcctgcagcggcagcagaacgggatgacccgcgtccagtttttgccgcaggtcgtccagcgtcagggaatgcagagccgcaaattccacgccgctttcttcgaagtaacgcaggatcgcgtccggcgacgtaccgttttcgggcgtggtgcccagcaattcttcgtagaccgtcaggttcaggtcggcctcgtagggatagagccagttcatcagcatctgtacgcaggtcgcgccgcaggtgtagtcgccgtactgccgcagcgcgggaacgtcgatcagcacgtccgcgtcggaaagaaaggcggcgtaggggctggatgacgcaatcccttccgcaagcccgttccccgcggtcaggaacagaccaatcagcaggactaataaggacagacggagaaacgggctttttacggcttttttcatggggagagcgctcctttcgcacaatgatttttcgttatttgtggctcaaggatagcatcggcgttgggaaactgtcaaggctttgaggggcagctttccgccaatgcatgggtgtgctataatgtcttttgaagatcaaacggaagggcgggaaagtcagcgatggaacaagcagggaagaccgccttttatcaccttccgggactgtttgagttttatgagctgtaccgcgtgtttctgccgctgttccggcagcaccgggaatatttttacgattggtgcgagatcggctccatttacggcgcgccgggggattgcctgtggggtggcggacgggtcggctacggggactgcgcccctcgggacgtgctgcgactaacgcgggagtacggcgtttccgcccggctgaccttcagcaattctcttttgcgggaggagcatctttccgaccgaaagtgcaacgagctgtgcagactgtttgcggaggcgggcggcccggccaacggcgtgatcgttcattcggacttgctgctgcactatctggaaaaacgctatccggggctgtatttcgtctcctccaccacaaaggtgctgacggagtttcagcagctgcggcaggagctggaacgggaggaatttcgctatgtggtgtcggattttcggctgaacagggcgtttgaccgtctggaagcgcttcccgcgcccttgaaagacaaggtggaatttctgtgcaacgaatgctgctggttcggctgcaaggacagaaaggcgtgctacgagaccgtcagtcggaaaagtctgggagaggacgggccggagcatcgctgcgccgccccggacgcggagggcgggtatcgcttttccaaggcgatgaccaatccgggctttatcggcgtcggcgacatttcaaatgtctatctgcccatgggcttttcccatttcaagatcgagggccgcagtcttggcagcgcgctgatcttggaatttctgctgtactatctgacgaagccggagtatcagctgcgcgtccgggaggaaatctatctggataatatgctcgatttattctgacaaagaaaaatcaaagaaacggacgctgcccgatagggtccagcgtccgttttggcaatggctttcgttttcaggaggcgctcggcgtctcgctcttttttgtctcgatcgttttaacgccgaaaaggaaatacaccagatgggccgcccacacacaggctagaacgccgcagggaacgtacagggctttgcgcagcatcatcccgaagccgaacgccatcagcatcgtgacggtcagcaggattttcgccttggtcttcgtcgtcatgccctgccctttgacgtaggattccagattgtttttgtacagctaccgcctttcacatacaggctgcaggggtgctcgaagccctcgttcgccatggaaaggttgctgccgtccttgatgtgctcgcggaagatcaggaacggcagcgaatagcagccgtccttcagttttttgcacagcgccgcgccgctgaactgcttctgcccgcgaagctcgtatttcacccggtatcgttcctcggtcgcccgtaccgtttccatggtgctgtcggtgcaatagagcgtccagacgaacgcgtcctgcttggcactttccagatcgacaccttcgtacaaaagatggttcagcgcggtctcgaaccgctcggaatagcggctggccgcctgacggcccgcttcggtcagctgcggactgcgggcgttttcccgctgaacgagtccgtccttttccagcgaagaaacggcccggctgacagcatatttttccttgccgagggttcgggcgatccccgtcacgctgcgatccgccgggctgagcttccaaaagcacagcagcacccggagcttcagaatttctgcattgtccttcatggccgttcctccaacatatatcatgcgcctttatcttagcataaacgcgctttcccggcaatgaaggaaaggcgcagggtggattttcagcggaaattttgctatactgaaccaaacgtttgaccgcaaagcgaggtcttttcatgctgtatctgtcccgcttcaccttcccggacgacggagaggaatttgactttctgcttacgatcaagcggaagtgctacgacagcttttatcccttcaaggtgctgtctgcccggggcgtgcgggagctggacctggagccggtgacggtgctctacggcggcaatggctccggcaagactaccgccctgaatgtgatggcggagacgctcaagctgcgccgggacagtcggtacaaccgctccattttttttgaggattatacggccctgtgcgtgccggagattcgaaccgaaattccgaaaagaagccgggtcatcaccagcgacgatgtgttcgacttcatgctgaacctgcgggccgccaacgcgggcgtggatgaaaagcgggaggaactgtttcaggagtatctggacgcgaaatattccgattttcacttccgcaccatggaggactacgaccggctgaaaacggtgaacctgtcccgcagcaacacccagtcccggtacgtgcgcaagcggctgatggacaatctgccggagcattccaacggcgaaagcgcctttctgtatttcacccagcgcattgaagaaaacggcctgtacctgctggatgagccggaaaacagcctttcgcccgccaaacagcaggaattgagccagtttatcgaagactcggcccgcttcttccactgccagtttgtgatcgcgacccattcgcctttcctgctggccatgcgcggtgcgaaaatttacgatctggacgcagaccccatgaccgtccgccgctggacggaattgcccgccgtgcgcgcgtactacgatttttttcaggcccacggcagcgaatttgaaaaataaagggctgcggctcggactctttttggccgtacattgcgcggccaattcgttttttcaaaaacgatcggtactattttcggcagaatggaaaacataccgcccaacaggggctgcacgcgaaaaataccgaccgcagttcacgataggccagtcggaggaaagcggcgcaaagggcagtcattaagaaagtccatttgacaacttaaattggccgcacttttgtgcggccaaggagggggcaggggtagaaccattgtgggagcgcaggagtcaaagcctcggccgttttccttacagtgtttcgtccaacaggacggaaacggtgcagtgggaaccggctccggcactttccaccacagcctgaaagaggttttccagatcgcggacggtgatgttccaggcgttttgggcgtattccgggttggacttcgcttcctcaaacagcttgtcttcgatggtctgcttgatctccgtgtagcgctcgggggtcagtggatacagccagtcgaccttttgcacttcgtcctcgtggacggttagcttctggtagccaggaaccggcgcaggaacgcgcacctgcacctccgtgccctcggcggagacggcggcgcggctcaagtccacggtgtagctcatctggaaggtgtagggcacgaccactttctgcaccgtgccgaaaagccacgcgtcctgcgtcacggtctcctgcccggtagtctctacctcgtaaaccaccaggtgattcttttccttcagggtctcgctgaagcgttcgctgatccactggacgttgccgccgccgaaaattcgggcgtagagcgcaggcccgaagcggatgcccgtaaagaccagcgccgccagcaaaatgacggtaaacagctttcgaatgaattttttcatgggttccacctttctcaggcagggggcatccatttgcctatttcaataaagagccgcaccagcagctgcaccagcacgtacagcgtggtcagcgcgcccaccagcatcagatagccgcgcacaaagcggcgaaaccggccggggcgactacgcctccgatggggcgggggagtaggctccggggagccgtaggggccgccataggcggactcgggcggctgaatgcccggacggggagagggattcatgcgggtcgcctcctttcggcatcgtcagccatggctgaaatgccaggggttcttcgacagtatacgacaaaaaaacgaaaaaagctatccctgccgccgaaggaaaccgcgccctttggcagcagggatcgttgaatagaaggaacgcctctgttattccgccgtcaggtagctttccatgacgtagccctcggcagcgtcggtgcgcactttgacccagccttcctcctcgcagcgttccagcaccagcagccgctgatttttgtaaagccgcatgacgatatcgccgctcagatcgggcagggaacgaaggttcagggagctgtcgtcatcgatgcccgttaccagcgcgatccactggccgtcggtgggctgctcgctcaccggcatcagggtgggccggggcgtgggcgtaggcgcggggccgggcgtagctgccagcgcttccggggcggcgggcagagctgattcggcaaagtcgtagcgcatcagggacatgcccggatagtagaaggaaagaatttcctgataggttttctgatagcgtcccgccatccattccgcgccgcgctggctcatgcccacgccgtggccgaaacgccgggcttccagccggtaggcggtatcggtttccaccagcgtccacagttcgttttcatagttgctggaaatgctcatggccagcagcttttccgccgtgggaaaaatggcgatctccagctggaagggctgttcgatggccgtgaaggggccgtataccggggcgggagtggccgaaggtgtggccgagggtacggcggaaacctcgggagaaggggaagaacccggcgtaggcgcagcggtttcggcgctgccgtccagcaccagactgacttcctcctgatcggaatcgaccgccgggacggccgcgtcctgccgggtgcgtccgctgatctgcaccgtcaggtacagggtgtccatgcgcttgccttcgccggacagacgcgcgtcgctgacggtattcacccggatgctggcgggcgcaggatcgaagcccagcgcggtcagctcgtcccggagaacggtggccagcaggttgcgcagaccgtagggagcgatgtcgtgttcctcgttggtgtagcttttttggagggtcacgcttttgaccacgctgtacgggttttccacgtcgtaggggtcgtccgcaacggcatagtagccgtaatcaccgccgcccggccagacgctttccaccagctccgtctggccgccgttggaggcggcgtagtagcactgggccagcttgcctttgtaaaagccgcacacgccgtaggtctcctccacggctttttccgcgttgccgtagccggagatatacccccggaagacctgatcgttggtggtgtccaccacgtcgtagtccgcgtccgggctacgcttgcgcaggacgtaggtgcgggcggccacggtctgggccttcagcgcctccaaggggaacgaattgctcatttcatagggcacgacccccagcaggtaatcctccacgtgcagggtcagaatgggcagaagcgcaccttccgaaattttcagccgcagatcgccctgatacagagccggataatttacccggcggaagccgatctcggtggcgcccgggtcggcataccgggtcagggtcaggtcagcgccgccgttcagggtcagcgcgccgcagtaaacgaaaatgctgccttcttttaattgaaaggaaatctgactgccgccgggcagataaagctccgtgccctgctccgtgcaaagaccgtaggcgctggacaggcttacgtcgattcgatcagtgatctgcagccgccgaagcagcacccgcacctgtgggtcaatggtctgaccggcggagggaatctcggcgctgtcggccagcaccggcgcggccagaccggccaaaagaagcaaagcggtcagagccgccaaccatcgtttttgatgagaacgttgaaacataggggtttcgcgtctcctttcctgccgcagagggcaatgggaatccacaaaacaaacgaacgagccctttcattccctgcatgtgtttttttcacaggaatgacgaaaacggccaacgacagaagaacggcggaaaaagccggtcaatacagcatgactgtcaaatcgtccacccggtcccgggcggaggtgaccagcacgcgaagcgcatccgtgcggatgggggcggcgcttcggtcatgaatttgacgatgccccaccgtcgtcccttcgatcgtgccgaaggggccgctccattggccgttttcatcccgccattggatgaaatattccgaaatgcgctggcctttttcgatgggttcccgcagctcgatatagcgcacgtcctccgctctgtccagttccagcagaaattcgcactgatctccggcaggacggtcgatgcgccgcaggggccgtccctttgccagctcccgtccaaaggcggctttcagcgcgctgcccagttcccgcagccgctgcacgtcccggtcgtcgaatttcccgttcggcatgggcgggatgttcagattcagacaggcgttgtgacccacggagttcagatacgcctgcatcagccgctccacggaatggggcgcttcctccgggtgatagaaccagccggggcggatggacatatccacctccgcgccgcagaagttcagcccggcagagcgggcgatctgctccgcgacgcccagattttcctgcgtgttataaacgtagtccagctgatctgccccgggcacataccacggccccggcccggtctgggtctgcggggacagcttgcacagctcgtgaggcaccacggcccattcgctccgccgggccctgccggactcgttgccgatccaacgaacgtccggcccgccgtcctgaaaaatgacggcgttaggctgatatttccgaaccagacgaatgatgccgggaaagtcatacacctgcctgcggccgttggggccttcgccgcacgcgccgtccagccagacgcagaaaatatcgccgtattcggtcagaagctcggtcagctggttctggtaatattcattgtaagcttccgtgccgtacagcgcggagttccgatcccacggggacagataaaacccgaacgcgataccgccccggcggcaggcctcggcggcttcccgaaccacgtccaccttgacggggcagtttttgacggaatgctccgtgtaccggctgggccacaggcagaagccgtcgtgatgcttggcggtcaaaatcagccccttcatcccggcggacttgacggcctccacccattggtcgcagtccagctccgtggggttgaagatgcgctcgtcctcgtcgccccgtccccattccagcccggtataggtgttgggcgaaaagtggacgaaggcgtaaaactcccgctcgtaccattgcagctgccggggcgagggggttacatgggccgcctgacgcagaaattctttcagatcgttggaagcattcgtcattgccaaaatcctttctttggaaggggcgaaaaagaatgacagagcctttaccgcgggagaaaaacagtcctgccggagctgtcaggattccatgacgctgcggaagtcgatgctccgggtctgggcctgctccatctcatccagacagcgctgaatggcggcttcgtcgctgcccgcttccttcagcgcctctacccgcgtgtaccagagaggcttcaggcagcgataaaggggcagcgcggcttccttttccgcttcggagaaggcatacacgcccgcggctaccttcagcgcggacagaatggcgtttcgttcttcgtccagggagccttcataaatttcccggaacagataattcaggaatacgtccttcccggccagattgaaatcataaatgcctgcgaagtttcccagatcgtccagcagaacgttggtgtcgttcaggtctgcctgaaagacggacgttggcagcccggcgtagcacttttccagcgcggcacgattttcttcccagcgggcgaacaccctgccggtctgcgccgcaaaccgttccggcagcgttcggctgtagcgctgaaattccagcgcgttttcggtcacttcgtccatttcgtcgccgccgaaggtgtcgaacaggcagtaggcggagggcaggttcgtatactgaaagcagcatgcggccactttggccgtcatacggtacagctcgtcccgaaagggcttcgcgttggggcagcggtcggcggaaagatagggtgaaaattcctccgcataggcaaagcagcggtgccctttataaagaaccgcgggaaaatcgccgcaaagcgacgaaaaaatctgcgggcaataaaagcccagtctgcggtattcgctggcgcagcgccgccacatggcgatatgctcggggtcggtaaaggcgttttcggccagcttgacgaccagctttttttcggaagccagccgtgcgaagattgcctcccggaaatcgccgccctcccgactggtgtttttgatttgaatctccgcaacggtttcagccgtaaacagagaaacgacctgctttgacgtggattcgttcatactgaaaaaaactcctgcagaaagatggatttctatggcacagtgtagcatttttgggggacgctggcaatacaggccgcaaaagaatcctgggcgccgggaagaaattttccattttttctgttgattaggagaacgggaacggacacatcggacgatcaaaacaatggggaaaagcgaaaatgaaacgctgtctggctgcgctgttgcttctgataatgaccatgatgatgaactgtgggttgggaagggcggaggaaactgtcttcccggccgatacgccctttgccgaccgggcggcagaggaagcccattttcgcgccaatcgggcggtacacgaccggtatctgtttgaacctgacctgtatgtttgcgccatgaccgtgcagaaaaacggggatcgcctttttgaataccgctggcagtattcgcccacagcgatattttcagtgaatgtggcgaaggattcagagagcctctatcccttttttaacgcggagttcagttttgaaaattattttgatgagcttgttcgggttttcgacggtttgtttggggactggacgctggaacaaaaggcgtggctttcttccaaggtagaagagtattggcagatggaggttttcagaacgtattatctggactccggctatgcgccgtttaagacagttttatttaaacgtctgctggatgagcagcggtgtggtctgccggatgaaagcgccgttccacaggatgaagcttatgcgctggctgttcaatacgccgagaacgacccgcagatgtcccggcaggaaacatggtggaaaattcagaccttttatctggtcaatgacccggaaaagccggtatggctgttccgctttttcagccgaataaacgaattttatgatgtgacggtcgatgcacacagccgagaaatcttgatgcaaaaaggggagatatgatctgatgaaaaaagcaaaagcgttctttctggcagccctgttgatgatcgcaccgtgcttcgccaaggccggcgagctgagcaatgcggaaaaaaactatttgaaagacgtgactgctcaatgggaatttgcattcggcccattagaattatgggattaccgaatgattcaccagtgcccacttctgccaattttgtccaaacgataacaatctgcagttgcgatttaagcaaagaacaatttcaacacagtctgttgacaaatttcttattggttgcttactcccgcgaacaacgcttcgtcagtttgcaagaaagtattgcggcgaaaggtttaggggacaacgcccctaaacctttcgccgccactttttcaactgcctgacttcaatgtttttgctttttatttgctcttggcgtttagatcatcaatatgcttcattgttagggcaacacgatcgtctatacggaccattccaaccccgaaaatggaagtgttaagttttccatggagaggttctatccaagggctatcgattgcctcaaatccatgacatatgcccacaatagagccaacggttgcaccgttacaatctgtatcaaatcctgtttgtaccgccaagcatatagatttaccaaaatcctcatgcccatacaaaagcgatgcagcaacaatttccgcattagaaatggtgtggcaaaagtcatgcggattttcttcatcccatcgtgcatgtatattctggaagcatttttctaccggaagtttttcttcataatcacgtatgacatacttcagatgttctgctaaacgtgatttttgaggaatataatttaacgattcatacaatgcatgagaaacagtggtatcaatggccgcaattgcaagaagagcagcaatccacatttctccatatataccgttttttacatgcgaaatgctggcatcgcgccatgccatttgtgcggcagcttcaggcataccaggatgaatatacccgaaataatcggcacgaatttgcgctccaatccattctcggtatggattcttgtacacggccgaaattggagggagatatccatttacaaaattgcaataagcggcgcgctctgcagtccaataagcgttctttgattggctgttaatccatattctgcttacgtctgctggtgtaaagtcgaagccatacttttcaattaactcctgattcaaaacaacatagttggtatcgtcatccgtcggcatataagttactgtatcagcaaaggaacgtccttccaatgagaattttgtattgcgaattatttcttccgtcaaatctgttttttgaatataacgatgcattggatagttaccagatgcctgcaaaatgggaagcaattcggaagtatgaattccttcaaccggttttccaagcaagcaaccgcagatccttccgtaccatgcaccagcaattttttcttttaactgttttgcatcaattgttttcttatatttttttgtttcagcccattcatgacgaatttcttcataatcggacggttcaacatatggatagtcctcgatgtccgtcgcattaaggattaattcaaacagaatttttgccatccgctctttatattcattccgaggcatatgttggattgcatcaaacaatgtatgataactgctaatatttttaccttcctgaacagattgaatatactcaataaggagctgctcactatagaattcaccttctgaagccagggcaaaagacggtgccagagatatatgctgctgttcctccatcgcgcgctgattactattcatcaccaattcatccaaagaaacgtggaaatgtttagaaagtagcaccaatttctcaagactaggagaatagctgccattttcccacttctgaatagcctgagtggtgaccccacacatttcagcaaattccatctgagtcagttttgcggcaatacgtaatttccggattttttcaccaagtcccatgaatttctctcctttttttgagttatcatcaatctaactttaacatacctccaaccgctttcgcaaccaagcacagctttctcaagagatatattttcacgacaaaaaagctaatatcgttttatcaagaatagtgaagcaactgaacccctatctgaaagaactgatcacgggccgtacagaaaaactggcatggaaagcggaaaagctgccggaatttaaggaggagatggagtgacttcaggacttgcgcggtgaactgaccgcgtttgttggtgaggaaagcgctggcgaattgattactgctgcccgtggcgcagatgtgccaatttacgaatactgttatcgcgccgggctggaggacggtatacgtctgagcggattgagcgagcggctgaagaagtcctaagcacacaatttgacaaaactcaagaatataccattttgaccgtggtggggtaaaaaacacaggcgcggagagcaattttgccttccgcgcctgtgtgcgtaatgcgaaatgaagttggctcaagatactttttcgggaaaatgtccgggaaaaccattgtagcaggggcttttgaaccaccatggggtaaaagaaaagcaccagcctttgtatcaaaagctggtgcttaatatggcggagagttagggatttgaaccctaggtggggtattagcccacacacgatttccagtcgtgcgtcagcacgaccggcaaacccttgcgccgcaagcatcttgacagcatcatacctccatcacccgcgccatggtatccatcaccggccccagcgcagcagcccgcacatggtcggcgtataaatccgccgtcagcttgtacgtgctgtgacctaggacggcctgcagcagcttgatcggcgcgcctgcttccgccgccgccgtggccatgctgtgccgcagtccgtgcagcgtcacatggggcagaccggcagcggccagcgccgacgcatggtcacgggccagccgttcgggggtcgtgtccagcacccagcgcgtcagcactagctgctcagctcgccacgcggccagttcacgcgccacgggcgcggccatgggcagcactctggcgcttgcgccagttttgagggcagcggcctgcaagccccggcccggaacccggccccgctgctggcagatggcaatcgtgccggctgcccagtccaccgccgcccacatcaggcccaacgcttcaccgcgccggagtccgcacgtcaccatgagcagcagcagcggccagccctgcacagaccgcgccgccgccagatagccgggcagttgttcagcggtcaggatggcagcgcgctgcggctcatgctctggtcgttccaccccatccatgggggagtagggcagcaggtgcagcgccttggccttgttcatggccacatgcagcgtcgtataggtcaactgcgccgccctcggatagcgcgccgcctgctgattgatggccgcttgcagctgtagaccgttcagctcggccagctcagagcggcacacattcagcggcagcgcatcgatagcccggcgatagcatgcggcagtgttgggccgcttccgcggcgtgatgtaggtattcagccagagttgcagatagtcccctgtcagcatgtttttgaccccccaacgcgcgcaaaaatgttcacgttggtattataagacgggggttaatatcatggcaaccgctaaatctggtgctcaaatcgtgtccttcccaacaaccggctattataataattataataattataataataatagccgaatgtatgtatctcaatctctgaataataacagtgtacccgcgcgcgagcaggcaaacccggaatggctcgccatcgaaggcgcgtactatgcggccatcggctacagcatgacgcaggccatccgaaaccagatcgccgcactcatggagcagggcgcggcccctgacctgattgccgcagtactggagtacaccgccgaagcgccccggccctcgtgggcctatgcccgcactgttctgcgccgccagatggacaccggcacacgcacggcagaggattttcagcagtccgtggaggcctatcggcgcaaagcagccgagcgcgccgcaggccccgactgctggtcagcagaacggggctattatgccagccgcggcccgcgcaggcttccggaacagtgctacagtcagcgtgagtatggcccagagctagacggccccagccccgaagacatagcagccgcccggatgctctgaactgcaatcgtcgtgcgccaatcttttcgctaaagtggtgactttagcaaaaagtttggcgccaatcaccgtgccgctcccacaggttccggcgcggacagccccgccccggcggggcttttcattgcccgttcagcaggcgtttgtgggcatctatgcgctaaaggcgcctttagcgcatagttgccatgacgttggccgcgtctccccttagcgctgcgcgcccgctcgcgccctatctgcgcatcgctacccagcttccaggcccgcccacgcagccgcaagcgcgtccgcgcacggccgcagctttgcggccgcacgggctgcaaccctcgattgaccgtaagcacggccccgccgcaatccagcccacacgatctcg

SEQ ID NO: 4301 - DNA, 15232 bp, Unknown
  16S sequences of unknown bacteria
ctgctgccgtggtcggtgccgatgtcggcgattattttgccgtcggtcgtaaattcggcagcgagagcaagtctgtttgaaagttttttaaaggacatatatacctcgggattgatttttttgtgcggttgtgttatattacacctcaaggggtgattaccgtgaaatacgataaatacggcgacccgatcgtcgaaaaggaaacaaaaatgaacggcagccgccgaaaggcctttgccgtgaccatgctgcttcaggttttgataatagccgtcaacattgcgattatgttcataccgagcatcaacggatacctttgctttatattcgcgccgttttatattttcctttatgtgacctttgtcaaggcccttgctaccgtcaaggacgacggccttcccgtgggaaaatatcaggctttcaagtttataagcatcgccgtttatatcataaccgcagccatgtgcatggttataaattattagtttgaatttaaccgtaacaaacatatctgaacacaatttttctctgccaaaatcctgtttgtatctattgcttaattgaaagagacggagaaaagaaagacaatccctccgtcacggctgcgccgtgccacctccctttacacaaggaaggcttgaatgtgcaaggcctattgtttttttacaaggtgagaaaatataaaatcggtttttgtttgggttaggtacttcacaaaaaaacgaaaatctgtttttgctcagccccggcgaccttgtgaaaaatgaaaagaagtttctgcgtaccgtcggcaaccttgtgtaaagactgaaatcgacctttccgcagccccggctcccttgtgtaaagggagctgtcagcgaagctgactgagggattgtaagcttccgaaaaagtctctgatttatcactcatcgctgtttgagttgtttgttcgttatatgttgccttaagcttaaaaagctccgcagccggcttaccgcccgatctgcggagtttttttattttttaaatccgattatgtcgagataggatttaatcagctcgacggaattttcaaagccgattcggcttatgtcgacgcagaggtcatagttgtcggcgtcgttccattccttgccggtgtaatatttataatattgagagcgctctcttgtgacctgctcgcaaagcttttgagcgtccttctctttaagggcatagcgctcggcaatgtttttgacgcagaaatcgtccgagccgtaaagaaaaatgtggcagacattgtcgaagtccttaagaatatagctggcgcagcggccgatgatgatacaggattccctttcggcaaggcgctttatgacctcggcctgaagattgaagatgttcttgtcggaggtgtagtcgccgcttgtgggaggctcgacgatgcccttataggcgccgctcttttttatgaaaaaggagcctctgattttttcgtcggcctgcccgaagagggattcgtgaactcccgtttcctccgaggcgatttttatgagatccttgtcgtaatactcaatgccgagcagctttgacagagcaacgcccatgtcgcggccgcggctgccgtattttctcgaaacggtaataacgttttttgccataaatatacaccctttccgaaaataaaatcgaaactattctccgaggtaagcttttttgaccgagtcgttgttggcaagatcggaggccttgccctcgagggttatgtttcctgtttcaagcacataagcgcggtcggcaatggcaagagcctttttggcgttttgctcgaccagaagaactgttgttccggcctcgcttatggaacggattatgtcgaaaatttcgctgacgagtatgggggaaaggcccattgagggttcatccataaggattattttgggcttggacatgagggcgcgccccatggcaagcatctgctgttcgccgcccgaaagggttcccgcaagctgatttttgcgttcctcaagtctggggaaacgctcgtaaaccattttaaggctttcggcaatttcggccgagtccctgcgggtgtaggcaccgagcttaaggttttcaagcaccgaaagttgggcaaaaacgcggcggccttcgggaacgtgagccataccgagcgaaacgattttgtggggcggggtcttaacgagattgtgaccctcaaaggttatggaaccgtgcttcggagagataagaccggtgacggtgtgaagaattgtggtttttccggctccgttggcgccgataagggcgatgatctcaccttcgttaacgtcaaaggaaattcccttgatagccttgataacgccgtaataaacttcaaggtcgcgtacttcaagcattgccatgattttctcctcctattctcctaaatatgcggtgattacttcggggtttgaaagaacgtcggaggttgcgccgctggcaagctcctgaccgaagttgagcacggtcagtctttcgcatattccgcccacaaggcgcatatcgtgctcgatgaggagcacggtcatgtcaaagttgtcacggatatacttaatggtgtccataagctcctgagtttcgttggggttcatgccggcggccggctcgtcaaggagcaggagtttgggctgggtggcgagagcacgggcgatttcgagctttctctgctttccgtagggaaggttggaggcgagataggaggcctccttatcaaggtcgaaaaccttcagaagctcaagcgcctcttcgtccatttgcttttcggttttgaagaatttcggcagacggagaattcccgtggccaccgaatagcggtatttgttgtgaagtcccaccttgacgttgtcaagcaccgacatctgcttgaaaaggcggatgttttggaatgtacgggcaattccggccttgttgatttctatggtcgacttgccggttatgtccttgccgtcgagaattattgtgccgtcggtgggcttataaacgccggtgagcaggttgaaaaccgtggtttttccggcgccgttgggtccgataaggccgtagagctcgcccttttcgatttcgatgttaaaatcgtcaacggcgcgaagaccgccgaaggaaatgcccagattggttattttaagcattgacattatcagccgcctccttttcttttttgccctttgcaaagaatttctttatccaagcgaaaaatctctggcgataagctatgagagtgtcgttggaggtgaatatcatcatgattatgagggccagcgcgtatataagcatacggtagtcggcaacctcgcggagcacctcgggaagcagcgtcagaacggtggcggcgattatcgaaccgcggatgttgcccattccgccgagcaccacaaagaccaaaatcatgatggacatattatatccgaagtttttggaggaggcggccagaatgctcaggttgtgggaataaagcacaccggcgattccggcaaggaaggccgaaattccgaaggcgatgagcttatatttggtgatgtttatgccggtggcctcggcggcgattctgttgtcgcgaatggccatgacggcgcgtcccgaacgggaatggataaagttgaggcagataacgacggtcaggaaaacgaggatgaatccgacgacgaaattggaatcgtggggagtgccctcaatgccctgcgggccgtttataagcagggtgccgtttacctgatcgagtcccatgtcggtggccgaggtgagggaggcgtgaacgccgttttcgtcatatcccaggtaaatcgatttggcaaaattctgaattatttcgccgaaagcgagggtgacgattgcaagatagtcgcccttgagacggagaacgggaattccgatgagaactccgaaaacggcggcgcaaaggcctccgatgagcagggcaatgggaaatcttatgtagctctcgggaatggcattttgcatgaccaccgagaaaatcgagcttgtgtaagctccgacgcacataaatcccgcatggccgaggctcagctctccgagaatacccaccgtcaggttaagagagacggcgagaatgatgtacatacaaatgggaacaagcagtccggtgagcatactgctcagcgcccctgccgaggcgagcgtctgcatgaccgcaaaggccacgatgagaattccgtaggttataaagttgctttttgtgtatggctttaatgatttggttttcaagacttccgacctccttaaaccttttcgtcaatcttcttgccgagaataccggtgggcttaatgacaagcacgaggataagtacggcaaaaacaatggcgtcggccatctgggaggaaatgtaggcacgtcccagaatttcgattataccgatgagaactccgccgatcatggcgccgggaatggagccgataccgccgaaaacggccgcaacaaaggccttgattccgggcatggcgccggtggtggaggtgaggttggaatatgtcgagcaaagcagaacgccggcgattgcggcaagacccgagccgattgcaaaggtcagagcaatggtgccgttgacgttaacgcccatgagctgagccgcgcccctgtcctccgaaaccgctctcatggcgttgcccgggcgggttttgttgatgaaaagcataagggcgaccatgatgatgacggtcacggcaatggtgacgatagcctcgcccgaaatggtgagccgtccgtcgaaaagcttgaccgaatcgaggggaaccaccgaagtgaagtttttgggctgggctccgaaaacgagaagggcaaggttctgaagcaggtagctgacgccgatggccgttatgagaacggcgaggggagacgcatttctcagcggcttataggccacgcgttcaatggtcataccgagcagcgtgcagaaaataatggaaatgagaaccgcaacataggggttcaaaccggcgtaggaggtggccgagaaaactatgtatccgccgaccattattacatcgccgtgagcgaagttaagcattttggcaataccgtaaaccatggtataaccgagggcgataaccgcataaatgcttccgaggctcaaaccgttgataagattagataagaaatccaatgtatacacctctgtctgtttgtctaataccaaagacttttttatataaagagattatatcatatttgctttcggaatacaacggaaaagacataaaaaattcaaaaaaaattaccgacagtcaaaatttcgctctcaagaggagaaaattttatactgtcggtataatttttgggataatccgagattttatcagcggcttacgaaatcaagggggtcctcgacgctgccgttaaggcgaacctcaaaatgaaggtgcggcccggtggagcgtccggtgttgccgacgtatccgataacctgacccgccgagaccgactggccggtgtaggacgcgacgcttgacatatgtccgtagattgtgataaagccgtcgccgtggtttatcatgacatagttgccgtatccgccgctgttccaaccggcgtcgataaccgtgccggctcttgcggcgactatgggctgaccgtagatgttgctgccggcgatgtcaagaccgttgtgggttcttccccaacgggggccgacataggacgagatgtagtaaaatccggggcagggccacacccatccgcttgaattgggcttggaaatgacgcttcccgaggaattgcttccgctgttgctgttgttatttttattgttgtttgcggctgcggctgccgctgcggcctcggcctgaattttcgcctcgaattcgtcgatggcggccgaatattcggcaagctgatcttcaaggcctgatttttgaccctcaaggtcggaaatgacggaattgagctccttcatgcggtcgcccagctcctgtcttttggcgtcgacctcggcctttatggcgctgatttcctctttttcggcgttggcctgattttcaagttcttcaacggccgaaatgtcggatttaagctgttccataatggcattgtcgtgatcggtgacgctggaaagcagctgatctctgtaaagaaaatcgccgaaatcgttggccgaaagcagcacgttcagcatggaattgtcgcccgagacatacatggcgcggagtcttgtcataaaggtctgttttgtggactcgaggtcggcctgtttctgagccttctgagcctcgatgtcggcaaggcggctttccacctcggtgagctggtcgttgtaaatgtcgatttgcgcctggacgttgtctatgtcctcctgaagggcgcttttgagcgcctcctggtcgcttatgtcgcttttaaggctgtctatctgttccttgaccttctgctgtttgctttcaaggtcgttgattttgtcgcggtagcttgccgcaccgaccgtcatgagattggaagaaaagcaggtcagaacaagggcaagggtcaacatgcccgaaacaagcggctttaaaaatttgtgtttagaagattgcattgaactcgctcccttcgtgtcttagatattttcctattgaaattgcgctgccgagggaaccgaccagggcgcccatcacgataaatccgccgagaagcttaaaggcgaaggaggtgaaggggacaaaggctccgagcccggtaaacgagctcataagggtctgttcggcaagcttatagataaagtagagacagccggtggaaacgacgccggcgattataccgagaagcattccttcaattacgaagggagtgcgtataaatcggttggtggcgcccaccgccttcataatgttgatttcgagctttctcgtgaacatggttatctttatggtgttggaaactatggcgagggagatgatgagaagaagcaggataactcccgtgccgattatgcttatggccgagcgtatggaaacgagcttgtccacataatcgccgcgctggcggatgatgtccacaccgctgactccgcggatttcctccaccgtctgattgtatttttcaaggtcgtcaatggtgacctgagcgccgtcgggaaggggattgtcgtcctgaagaatggcgaaaatctctttatattcctctcccatggagtcctcctgagaggaaagtccgtcctctttggacacaaacttgacatcgtttatgttgtcgagattttttatggcttcggaggcggcaagggcgtcgtcacgggacatatcgtccttgaaaaacaccatgaccacggcgttttgctgaatttccgaaacatagttgtcgatgttggccgaaagggaaaaaacaattcctatcataagcatgcaggccatgagcacgccggaagaggcgatggacatgagtctgtgtgaccagacgtttttaaagccttcggaaagaagataacggaaggttctgaatttcattgacggtcgccctcctctccggggttttggctgtcgtccgactgttttgtaaaggcgtcgatcgcgtctgcaaaggaaagcaggggagtgtgctcctcctcgggctgtgcgggggggacttcttccttgggttcggccgcggaaagaggcgttttgccgtcatttttcggcttttcgggtgcaaattccgaaacaagggacataaggtcatgctcgcctgcgttttcgatgtcgggctgtttgtcctccatgattatttcggagggaatatgtatcgactcggcggcgtcgtgggtgaacatggaggccttttcggcaatgtcctcgggatttactatgaccggctctatttcgttgtcggcgacaaccgaaccgccctcgatcattatgacgcggtggccgaagtcgcggacgagatgatgctcgtgggtgaccattatgatggtggtgccgcgcttgttaatttcgttgagcagcgaaacgatttcataagacatattggggtcgacgtttccggtgggctcgtcggcaagtatcatggcgggattgttgacaagggcgcgggcgagagccacacgctgctgttcaccgcccgaaagctcggtgggatagcatctggccttttcggtgaggcccacgatgttcagcgtgtaggaaactctgcggcgtatctcccttttggaggctcccactatatgcatggcaaaggccacgttttcaaataccgttttatcctttataagacggaaatcctggaaaacgatgcccatggtgcggcggagtttcgggacatcgcgggatttgagccgcgacattttataatttccaaccacgatttcgcctgcgttgggcttttcctcgtgcattatcatttttataaaggtgctctttccggcgccggaggcacccaccacaaagacaaattcgcccttgtatattttaaggttaacgtcgtttaaggccttggttccgttgtcataggccttgtaaacgccgcggaattctataagcggcgcttccgacgggttgcttttaggcatttatttcactgtccttttgctgtatatttctatataatcaataaaacgtcggttacaactttgtaacaatagaataacacaaaagcctctgtttgtcaacagaggcctttttaaattcaaaatttattaaccgccgcggtgcagacgccgaaagggcgaaaatcaatatttcacggggtttgcgttgagatacttgttgaccatgagggcgattttgaaaacgatagcgtggtcgaattctctcagatcgagaccggtgagctttttgattttctcaagacggtatacgagggtgttgcggtggacaaaaagctttctcgaggtttcggaaacgttgaggttgttgtcgaaaaagcgctgaatggtgaagagggtctcctggtcgaggctttcgatagagtcctttttaaagacctcgcggaggaatgactcgcaaagggtggtgggaagctgataaatgagtctggcgataccgaggctttcgcagctgacgatggccttttcgttgtcaaacacctttccgacctcaagggcgacgtttgcctccttaaaggaacgggcaaggtccttgacgccggtaaccttggttccgatgccgacgacggcatgggtgtaaaattcgctggacagggtgtcgactattgagcgggcaaggttttcaagatccttaagctcgatttcctcggggacctccttaacaagggcaatgtcggtctcgttgatgttgatgacaaaatccttgtgcttgtcggggaaaagcttctgaaccacttcataaaccgaaacgtcgttgcggcttacgatgcggatgagcatgacaacgcgggaaatttccgaaacaaaatgaagctcgcgggacttaagataaatgtcgcccgggagaatgttgtcgagaatgacgtttttgataaagttggcacggtcgtgcttttcgtcgtaatactgtttaatggaggaaagagacacggaaagcagggaggcgtattttgcggcctgtgcgtcgttgccctcgatgcagacgatatattcgttgtgacccatggtgccgaaaccgaaataggtgcagtttccgataaccaccgggacttcggaaaccgaaacctcggggaaatcaatttccgcagcctctccgacgttggaaagctcgctgcttgcgataacggtaggggtctcgtccaaaatgcttatggtgcgctcgatggactggctcatctgatgaactattccctgaaaaagtctgtttgacataaactatcttctccttgtccctgccaataaaatgacgattttttaatctctatacctttagacattatacataatacacaacttgagaaaatttttcaagtcttttggccgaaaaattgtgattttttttgccgataagctcataaaatcgcggtcggcggtgcaaagcggcggcaaaggggccgaaaatcggtcttaaaatcccgagggcaaaataaaatgtattgataaaccgacgggaaaatgatataatgaaggtgattttatgatatgttttttcgaaagcgtactgcttaaggagggagagagaaccttggaaaagctgacggcctttatcacctcgggcggctttgtgggcagtctcgtcgttatcgccctgaccgcccttatcattatgctgctcaagaagcttaaaaagagctatatatcgagagacggcgtcgacggcaaaagggaaacaaacgcaaggttcatcttttccattgcaagatatgtggtttttctcatcgcctttataaccgttctgcaaatcaacggggtcaatgtttcggctctcgtgaccggcctcggaattgtcggaatcgtcgtcggattcgcccttcaggatgtgctcaaggatttcgtcatgggaaacaatatcatgctcgaccatttctttgtggtgggagacgttgtcaaatacggaaatgtcaccggaaagattgtttccttcaacataaaggtcacccgtattctcgacatcgacacggggaattttttgacggtcagcaaccgaaatatttccgaaatgacggtgctttcaaactggcgggacataaatatccccgctccctatgagcagagcgccgagcgcatgagaaaaatcatgaatgaaatatgcgccgcggccgaaaaattcgagcatgtggaaaaatgcgagtttctcggcacaaacaattttggagaaagcagcatagattatctcataagagttcactgccccgccgaatttttcaaacaaacgcgaagagaaatcctcggcgcggttcaggatatatacgcaagagagggtatttcggttccctacaatcagcttgacgttcatttggacggtcgggccgaccgaagcatttgagaaaggtaaggttttatggcagaggtaaaggcatttaaggcgctgagatttacggaaaaggcgggagacataaacgagcttgtgtgtccgccctatgacatcataagcgattcacagcggaaagaatatcttgagaaaaatcccgacaacatcatccgccttgagctgccgcgggagggcaccgacccttatgccgaggcggcaaaggtgcttggtgcatggaaagaggacggcatacttaaaaaggattcggaaaaggcgctttatatttatgaaatagaattcgaagcgggcggcgaaaaaaagaaggtttcgggacttgtttcaagagtaaagctcgaggaattttccaaaggagtggttctgccccacgagcagaccctttcaaaggccaaggaggacaggcttaacctcatgaaggccacaaactgcaatttcagccagatttattccctttatatcgacgggggaaaaatcttttctctttgcgaaatgcagaaaaagcgccccgccgacgtgacggcaaccgacggcgacggtctttgccatcgtctttggatcgtcaccgaccccgagtttatttcggccgtcgaaaagggctttgaggacaaaaagctttacattgccgacggtcaccaccgctatgagacggctctcaactatcgcaattatctgcgggagaagggcgaggccgacgaaaacagcgaatatataatgatgtttcttgccgatatggagcaggacgggcttgtcgtgctgcctacacaccgaatcgtgaggggacttgagcattttgacagggacgagcttctcggctcctgctcggacaattttgagattttcaaaaacgtttccgacggtcagatgcgcgagggcatgaaaaaagcatataaggacggaatcgcggcctttgggctctataccgccggctgctatgatttgctcgtttcaaagcttacggccgttcccgagtcggaaggcgagggcagctattctctccgctctcttgacgtggcggtgcttcacacccttattcttgaaaagaagctcggcatcgacaaggaaaacatggcaaagcagataaacctgacgtatacaagggatgaaagtgatgccgtcggcgaggtggacggcggaagagctcagtgcgcgtttatcttgaatcccaccaaggtcgaggagataaaggacgtggctctcgacggcgaaaaaatgccgcaaaagtccacatatttctatcccaagctcataaccggccttgttatgaattcccttgattaaaaaaattgaaaaaaagacttgcattttggttcaaagtctgttattatagtttgcacgatgttattttatgaaagtttaaggaggtgcagagtatggcaaaatgcgatatttgcggcaaaggcgtaaccttcggaatcaaggtttcccactcccacaggagatccaaccgtgcttggaagcccaatgtacagcgtgttaaggcaatcgtggacggtactccgtgccggatcaacgcctgcacccgttgcctgcgttccggtaaggtaaccagagctatataacctatgcacaaacaaaaaacacagcttttgggactgcgttcccgagcggctgtgtttttttgttttttgtcatgtttttaattgaccttttaatgtaaatgagttataataatatactgtgaaattataagtgcatctgcgcactttttcgggaggcggacagctttgaatatattggccgtgggcgatgtggtcggcaagtccggctgcgaatttttaagaaaaaagctgcccgagctcaaacgcagatattccgtcgacgtgacaattgtgaacggggaaaattccgccgaaggaaacggcattacccccttttcggccgacagcatttttgcaagcggcgccgacgtcataaccggcggcaatcacaccttccgcagacgggaaatttacgacgttctcgagcaaaatccctttttgctccgcccggcgaattttccgtcctccgccccggggagcgggctgtgcgtggttgacaagggagcctataagcttgccgtcataaacataatggggcaggcgtatatgtccccggttctcgagtcgcccttcgacacggccgaccgtctcataaaagaggccgaagaggaaaactgtaaaatcaaaattgtggattttcacgccgaggctacgggggaaaagatgtcccttgcatattatctcgacgggcgggtgacggcggtgctcggcacccacacccatgttcccaccgcagaccttaaaattatgagcggcggcgaggcctttatttccgacctcggcatgaccgggcccgaacattcggtgctgggagtccgtcccgagctgacggtggccatgatgaaggataagctgccggtgagatttttgacggccgagggagactgtttcctttgcggagctctgctggaggtcgacaaatcaagcggaaaaaccgtgagcgcacggcagattattgtcagataggtgatattatgattataaagaaatttgttgcaagcgaatgcggagcggttctcgacagcgacgttaaaaacggcggcggaaccgacgataccgccgttttacagggaattctcgacatggcgcaaaaggacggggtgggggttcacctcgttatggacggcgccgctctcataacgggacttgaggtctattcaaacacgacgattgagtgtccttcaaagtcctgcggatttttccttgcaaacggttccgactgcgctcttttcaccaacgcgagaaaaacgtcgggcccctatgagcgggaaaaatgctttgaccttatagaggacgaaaacataattttcgagggcggaacatacaatcacaactgccgcggacaaaagcacgacgtcgaaagaccggacggaggtttttcctttacggtggcctttgttttcgagggcgtgagaaacctttccatgagaaatctcgacatcgtcgaccagcgcaccttcaccgggcttttcacaaactgggagcgggtgtgcgtcgagaatgttcacatcggccttccccacaaaaagcactatgaaaatcaggacggactccatttcttcggtccgggaaggtatctcggcatacacaatctcggcggcgacgcgggcgacgattttctcgcccttgcccccgacgaggccgacggtgtgtccgacatttccgacgtcatgatcgacggaattcatcttgaggacgccgaccagggaataagaatgcttgttcgccgcgacggccgtcttgacagagtgaccgttaaaaacgtggacgggacctaccgttccttcggatttttcataaatccctttttccccgacggggtaacaaagcggggcggtttcggggacgttgttttcgatacggtgaatctccaccagaccgaggccgactatacctacaccgacaatttcctcttccgtataggcggaaacgtcgaccacatcaccctgagaaatatttattcgataaatccgaacgacgcccgacccgttttgcagctcggctggcaggccgaggacgattcacatgttaccgagcaaaacaaaacctcggtgggaagcctgctcatagacggccttgaggtgctgcaaaacgacggagtttgttcgggcatgaatttcatcgaaatcaaaaaaagcaaaataaaccgcctgaccgtgcgaaacgccgacattgtcagaaatgaaaatgtgtcgggcggcaatcttattaagctttgcgacggcgtcgaaataaacaagttgagacttttcgacattgacgccgacggcctcgacgggcttgtttgcggagagggaaaaatatcaaggcttgcagaggacaacgtaaatctttaaatccgacaaattttaaaataaaaggaggggcggtccgtgaaaaaaacaataaagcttttggctgttttgtcggctgttctgctcctttcgggctgcagcgccaaggggctttctcccgaaagcaccataaaggcgccgggagccaccggctattatgccggcgttcaaaaagcgcttgaacaggcggtgggcaaggatattgtgcttaaatatcctcttgtcaacggccgccgctcggccttttgctcgggggacttcaacggcagcggcaaggacgaggtgcttgccttttatcagcaaaagggagaggctgcggtcacaagaatgaacctgctctcctgggacaacggcaaatggagctcggttcaggacatcgaccccgcgggcaaggaactgctgaccgccgacacctccgaccttgaccttgacggaaatttcgaaattctcaccggctggcaggtttccaccgcaaaaaccaaccagctttgcatgctaaactcgttgaatcaattccgc

SEQ ID NO: 4302 - DNA, 8133 bp, Unknown
  16S sequences of unknown bacteria
cgaagctgatccatacgagatacggcgccagcagccagcctgccgggcgcgagatccggaaaaacagcaccgctgtgataaaaacgagcacccacagggccagcagccagaaaaaggcgaacaggtacgcgccgcagttgaagaaaaagatgggccagaaaaagttaaaaagcagctgcaccgcgtaaaaccagagcgccgtcctgccagactgcgtgccgcgcccagcggaatggccagggcgagcaccagcggcttccatttgtacttcaaattgtatccctcccagcaaaagcatagccgggcagcagggaatttataccaaaagcttgcgaagcgtttgcccgtgccactggtatgcctggcttgggggggagacagtataatgtgcaaggtgctgggatttttactgagacaatctcagcaaaaatcagtttgccgccggggcgccttgttgccgggcaatcagcgcctcggcgcagcggatgccgtcggccgcggcggacatgatgcccccggcgtagcccgcgccctcgccgcagggatagagcccggcaaggctggcctgcaggttctgcccgcggatgatacgtaccggggaggagctgcgggtctccggcgcggtcaggactgcgtcaggcagggcaaatccgtgcagccgccggtccagcagcgggatggcctgggccagggtatcggtaattttcggcggcaggacctggcgcaggtcgccccaggtgacgccggggcggtacgtcggcgtgacagcgcctgcctgctgtgacgggcggttttgaaggaaatcgcccaggcgctgcgccggggcaaaataattcccgccgccgtaggcaaaggcccgctgctcgatggccgcctgccactggcacccggccaggacgccggagccggggaaatcctccggctgcagtgtgacaagcagcgcagcattggcattttcgccgccgcggccggaatagctcataccgttggtcacgaccccgcccaggccggaggacgcggcgacgacatagccgcccgggcacatgcagaatgtgaaagcactgccgccgccgggcaaatgcacggccagcttataatctgccgccgggagccgttttgggtcccggggcgcgccgtattgggcggcgtcgatcagcgcctgggggtgctcgatgcgcacgcccatggcaaagggcttgcgctccatggcaaggccggtctgggccagtagggagaaggtgtcccgggcgctgtggccgacggcgaggatcagcgcgcggcagtccagcttctggtcgccgttatagcagacccagtgcagctgcccgtctctttggcctagccccgtcagccttgcgccgaaccggacctgcccgcccagggcgatgatctcccgccgcaggttttgcacgacctggacgagtacatccgtgccgatatgcggcttggcgtcaagaagaatgtctggtcccgcgccaaaccggaccagctgctctaagatatagcggttgcggatatcgtgggtgccggtgttcagcttcccgtcggaaaatgtccccgcgccgccctcgccgaattggacattgcagtccgggtccagcgcgccgtctgcccagaactgggcgacccgcgcttggcgcgttgcggcgtcttgccctcgctccaggacgatggggcgcagccccgcctgggcgagcgtcagggcggcaaacatgcccgctgggccaaagccgacgacgacgggccgcggtccgctggggcagggcgcgggcggcgtgtagcagctgggccggtaggggatggctttggggcatttttccgccgcggcagcctcttccgccgcgctgcgcagggagacggcgacgttatagatgtatttcaccgccggttttttccgcgcatcgatggcgcggcggagaattttcagagaggtgattgccgcaggcgggcagtgcagcacacggcagacagcttgccgcagctgggcctggctgtggcccggggcgagggccagcccgttaagttgcagcatcggcgcgccctcctttccgcagctgcccggccagatgtccggaggaccaggcccattgcagattgtagccgccgcagtcgccgtcgatatccaggacttccccggcggcgtacagtccgggcaccagacggctttgcatcgtgcgcgggtcaaattcctctgtcgcgatcccgccggcggtcacctgtgcggcgtccatgctcatatttccggtgacgggcagacgcatggcgtgtacagccgcagcgatggaggcgagctccccggcgctcaggctgcccagcgggcgggccagggagaaaccggcgtagcgcagcagcgtccggcccaggcggttgtggagcataccggtcagtaggtcctcgcaggtcaggtccggggcgctttggcagcgctgggccagcgccgcctgcagcgccgcagccgagacctccggcatcaggtccagcacaacggccatctggggccgcgccggggccgccgcccgggagagggaaaagaccgcggggccgctgacgccatattctgtgaattgaatctccccctgctgccgggccaggcgctttttgccgtcgtaaagggtgacgacgccttcgactcgaacccctttaagggagcggggataggtcgggtccgtccgcagctgggccaggctggggtagagcttggtgcagctgtggcccagggcctttagcagctggtagccgccggtcccgccgcccagcttgctgcctgcagcgccgcctgctgtgacgatgacgcggtctgcggtgtatcgagcctcgcccgttgtcaggcaaaacggggggccgggacggatcgccgtcacttccgcgccgcacaccagccggacatttttttgctgggccagcgccaggcgcagcacgtcgacgacgctgttggcgctgtcgctcatcgggtaaacccggccactgggctctgtgacagtgaacagaccaagtgcacggaaaaagtccagcgtttgcgccggaccgaactgggccagggcatagcgagcgaaatccggcgcgctgccgtgataattggcgggggtgaggttttgattggagaggttgcagcggccgttgccggtggccagcagcttccggccgacccggctctgccgctccagcagcaggacctgatgttgcggcgggacggccagcgcggccataagccccgctgcgccgccgccgatgatcgcaatgttcatagaaaaaatcgctccttcccggcgctgctgcgccatggaatcacgtggattgccgttttagcttctgggaacattataggcgaaaacccgtcaggatacaagagggaacgaagcggcttgacaggaggggacaggtttagtatgatgaaagaaaaaaggagcacaaatatgaatttttataagaaatttattgcatatatactggcgattgccttattgaccctgccgctggcaggctgcagcggcaaaggcagcgacgatgccggcagcaacggcccgcagcagggggatggggggaagacgcccccggcgtttgagatggagaattattctctgaccccggcagaaaactacgacgagcttgcccagcttctggcaggcgtcatcaatggcgacgcgtattccagcgcggaaaatgtcggcgtggtcgatgaatttttcgcctctggcgaccgcccgtcctacgccgggaactacggcgagcagagcaatgatacgcggcagctgcccgagggtgtcagccaggcggacgcggcggtgctggcaaacggctatctctaccaggtgcaggacggcgaactgacgatcctgcaggcccagggcgaggataccgccgtcgtctcctcgacaggcgtcacggcggacccggcggggtatgataattatgaagaaacagcccaggccgtggcagtctccggtgatctggcggcggtcatgacgtatgtctatgcctggaacactgcggcaggggagaacggcgaatggtcctcggagacggtcagccagactcatgtcaagctttatgatgttcaggacaaagcggccccggtggccgtggcggacttcgtgcaggacgggtcttatcgggcggcctatctggcaaacgacacgctctatctgctgacggacgactatgtcatcaatctggacgagcaggactctgccagctttatccctacctgcggcgccgcaggccagactgcgcagctgccggcggaaaagatcctggtgaacgaccaggtcgatgcgccggtgtataccgtcctcagcgccatctcgatgcagaacggcaccgccacggatacgctggcggtgacagggcagatgcagccgtgctttgcagcggccgacaagctttatttggcaggctggtgctatgcgatgcagcagtcggagcaatacaaggaaaatcagtaccaggtgacggactattacagccacgccatcacgctcatcgcatcgctgcactgcaccgatggcctgcagctggagaagaccgcctgcgtcaatggccgcctgccggaggcgtcgtcgctggactatgacggcggatatctccgcctgggaactatggccgagagctatacaaaccgcctgtttgaagacgactccatgggcttttccaatctggagccgggcaagcacagcttctccaatgaagtccatattttggatgacacgctgcaggaagtcggccgcctgaccggcctgtccgacagcagcctaatctattaccagcgcctgctcggcacgctgggctataccgtcagctatgacaaggcagagggcgtttacaccctggacctgtccgatccgactgcgcccgccatgggcaaggccctgtccggcagcgacccggcggagatcctgctgcgctatggcgaccgcttcctgggcctgacggcgggcggcaagctgcagctgttagagcaggatggcgcgacgctcaagaccgttgcggaggcgaattacgggcagaattatctgaacatccgctatcatctgagcagcgttctggtttcgccggaggatggggtcatcgcgctgccaggcgacggcacactcctgctcttccgcgtggcggacgatgccattaccgagatcggcgaggtcgccatcagcgtgacggacgcgacccgcgtgctgcgcgccggtgatctgctctatgtgacgtcccccgggggctgcaccgttgttcagtcttcagacggccagagcgtcggccaggcggatatcgcagtggggtgacggctatgatcgaagaaacggtaaagcgcatcaacgagctggcccacaaggccaaggccgagggcctcacgccggaagaagctgaagagcgggaccggctgcggaagatttatatcgccgccgtgcggcagaatctgcaggcacagctggacaacacctatcttgtggacgaaaacggggaaaagcacccgctcaaaaagaaaaaacagaattaacgtgggaagacggcaaatatttttcttgcagctaaaaaattgtttgacaaatgttttcttgcacggtataatactttttgcatgactatgacatgcaaggactttgacatggctgcggattggagtttgtatgatgctgctggatttatcaaagctgatagacgcgcccggcaagcagactgcgtttcaaacgagccttgatctgagtgatctgcagtttggaagctgctgcccggcgaaggagcctgtcacagcggagggaacggtgcgcaatgtcgcaggtgttctgcagctggaaggcgcggtgcacgcccatctggacggcatctgtgaccgctgtgccgagccgtttacccgcgacgtcacgttccccctggaagccattctggtgacagaactggaagacgaggaaaacgaagacgaatgggtatttctgctgcagggaaacagcgcagatctggaggatatcatcacgacctcattcgtgctgcaaatgggctccaggctgctgtgcgcggaggattgcaagggcctttgctgccggtgcggtgcaaatctgaaccgggaggcgtgcaagtgccaacaggagtcggatccccgcctggctgtactcaagcagctcctgacagaaaaagaacaataaaagaaacactatgctgtaaagcattcagaccaaggaggtgtcacgatggctgttccgaagagaaaagtatccaaggcaagaagagacaagagacgcaattcccattggaaacttacgatccccggtgtggtagcttgcccgaagtgcggcgaaccccgtttgccccatagagcttgcagaagctgcggtacctataacggacgtgaagtcattgctgtagaagcaaaatgatccccagaggaagcgcctgcggcgcggaaaagctggtaatgagagaagaggaaggcgttagccaaagccccgtaaggatgttttttgaaagggatacggtgtaaccccgttttcggggttgcaccgttttctctattaggctgtaagcctgtattcctgcgggtttgactgtattttctccatcaggcttttgatctcgtcctctgtgggaatgtcaatcagtccgatggctgtgaagtagatgtccaccttcacagagcagtgaccgcttgacttgtcgttgttgtgaacctcgatcctccgtatcagcgagttgacaagcgttggcgtcagttcctcaaacgccgtgttgcttcgcaggactttcagcagggttttcaggtcaaggcttgtctgttctatactgacaagccttttctcgtcctcatcgacccttttgacaagctccctctgctcgttttcgtaattgatcgacattcttgcatagcgttcggctgagatgttgccgaggacctgatcctcatagatgcgctctatcagcttgtcaaggtcttgaatacgccgctttccgctttcaatagaggacttgagcctgtttgtttccgtccgcttggatacgatgtctttctgcgccatcaggtatagaaacaccggttcatagcatctaacgaagtccgccaagctgttgatagcttccagcacgatcttttccagcactacattgcggatatagtgtatctgacagtttcctctgccgcttttgtagttggcgcagcggtaatgctcctgattggcgttaaggctcttggcggcacagaaatggagctttgaaccgcagtccgcacagaacactttgccggaaaaaaggcttgtcctacccgttgctgtcggacggatgcggttctcacgaagctcctgtactcgtttccaggtgtcctcgtcgatgatggcaggctgagtgttcgggatgatctgccactcgtcctttggattatacacggtcttgtgaaccttgtagctgaccgtggtggtcataaagttcacggtgcagcccgtgtactgctgattggcaagaataccggcgacggttttctgatcccaagcgtatgggtgggtatactgctttcttgtttttctgccaagcgaagcgtaataggcggaagggatgaggaccttttcctgttcaagctgctttgcgatctgcaacggacctctcccgtcaaggcagagtgcgtagattttccgcacaatatccgctgccggttcgtctaccagccagtcctccttatcctgtgggttcttgagatagccgaatgggacggaggaactgacccgcttgccgtttgccgccttgttcttccataccgcacggattttcttgctcgtttgagcagcataccactcgttaaatatgttgttgaacggcatcatctccgtgcctgtttccttgagggtatctacattttcctgaatggcaatgaacctgacgccgagggtcgggtatttgatttcaagatagttgcccacatcaagataattcctgccaaaacgactgagatcctttacgatgatggtatctaccaagccctgttccaccaggttctccatttggatgaaactcggtctgtcgaaggtcgtccccgaaaatccgtcatccgtgaaaaactgagggttcggaaaattattccgctgtgcgtatgcaagtaaaatctccttttgattggtaatagaattactctcgccattcaaatcatcatctcttgataatctc

SEQ ID NO: 4303 - DNA, 10255 bp, Unknown
  16S sequences of unknown bacteria
ggccaatgcctttgggttatatcctcatgaattggtcaaactcattgaagaggaacggcttcgcagcacttcataaaatttaataggatttattcttaattagtgcgatttgtttgacaatttatggtacaataagaaagcagattcactgtatcaagttagataggagttcattgtttttatgttggattttttacccatcgatttatcagacaaggaatggatgacagagctgtttgaaacaggcggcgcgccttcggaagaatacaattttgtattcgcttatatctggcgaaagacctacggccttactgctacccgcatgggagattatgtgttggtattttcttccaaaccaacacccagctatttgtttccctgcggcaaagggccattaaagccggtgctggatgccattattcaagatgccaaggataggggtatccagcttcagcttcactgcctaatgccggagcagatcgaacagatggaggcgatttatcctggaaaatttacttatgaactgcagcgcgattatgccgactatatctattcggccgacaagctccgtaccctttccggcaaaaagctgcatgccaagcgcaaccatatcaatcgttttttagagaacaatccaaattggcattatgagcccattacccaagacaacattggcgattgtcttctgatgaacgagctatggtgcaaacagtcaaattgtgatgaaaataaggatctacaggaagaggcgtgcgcggtgcgccaggcctttgcgcactatgatgagcttggttttgacggcggcctgctctatctgggggataaggtcatcgcctataccatcggttcacggttgacgcccgatacctacatggtacattttgaaaaggcatttggcgagatccaaggggcgtatccaatgatcaatcaacagtttatccagcatatcggggatggctaccaatggatcaaccggcaggatgatatgggtgaagagggactgcgcaaggccaagctatcctattacccggaaaagattttggataagcacattgccttttataaaggataagccaccatgcatattcagtttgcggccaaagagcatagcggacaggtcatcgagttatggcgacagtgctttggggacagcagtaaattcgtttccttttatctgagtcatcatccctttgaggaaaaaacgatgctgttgaccttggagggagacgttgttacctctatgctttccctcctgcctgcacagcttgttataggccaaaaaaagctgcccgtgcgctatgtatacgccgtaggaacagatattcgatttcgcggccaggggctgagtacagcgctgttggatgcatctgcgtcattgtgccgtcgcagaggtgaggctgggatatttctgatccccgcttcggatagcttgtttgagttttatcgtcagcgcggttttgtctctgcctttggcgttgcatctcgcactgtatcctcgtcagagatccttccctattcggattccgatttagacgtgcggcctatgtctctttcggtattggctgcgctgcgcaaccatgcttttgcttgccttccctcgtatatcgcctgggatgaagcggcgctggcctatgctgtgaaagcggccagagcggccctgggtggcatatatggtttttacaaaggggacacgcctgtgggatatgtattttacgaaccgcaggaggggtgcatgcagttaaaggaatggtgcgtaccagaaacattgtatgcagaggccctttctgcgctgcacgcagagctgggagcttcttcctatcgtctgcgtttgccggggcaaacgcctttcggtatgctgcgctgggctgagggcatctcttctccaccgccagattcgctgggatacgccaatctgatattggattgagctattccatcgtacctctgctaaaagcgctctccacagagcgcttttttatgccattttgatagaatccctgcacttctcaattggtaacgaatctctttaccaatactgattctacgccccgtattctgtataatggtaaatggccttattcataggtaaacggtacttttgaaatctatacgttcggaggatcagcatggattgtgaagaacgattgaaaaacatcgtagatggttttcagcgttgccgaaatgctttcaccgccattggtgatgaaacaaggcaattgattttactggtattgttggccagcgacctttctggcattcgtgtaggagaaattgccgaaaaagcacatctgacaaggccttctgtttcccatcacttacaaattctaaagaattccggtattgtatccatgagaaaagaaggcacaaagaattattattctttaagtatagacggtactcaatggaaaaacatgtccgcgttgataaacctcatttatgagggcgttcagcgcatcgaaacaagagaacatagcaaacaaaaggagaaagacgcatgatcttaattttttcaggcaccggcaacagtgcatatgtggcaaggcagctcggcgagcttctgcaagaggaaaccatagacgtatttgcgcggatccgtgacaaagataccactgcgctgcaatcaggccggccctggatcgtggtatgccctacctacgcgtggaggattccccgcatcttgcatcagtggctggaaaacacggcgttggaaggatgccgttcgatctattttgtcatgacctgcggcgacaatatcggctatgcggaaaaaacgctgaaaacgctatgtgctgccaaacatatggatttttgcggttgttatcccatcgttatgccggaaaactatatcgccctgtttaccacgcccacaaaagaagaggcattggttcttcttcgccgggcagagggcaaaattgccaaagcggcggacatgattcggcttggcaaacacttcccggagccaacgattcgttggcgggatcgattgagcagcggccttgtcaatgatgcattctatccgatgtttgtgcatgcaaagaaattttatgtcaaggaatcgtgtatttcctgcgggcaatgcgccaggcaatgtccactgcacaatattcatatggaaaatggcaagccggtatggggcaaggcatgtacgcattgtatggcttgcatctgtcgctgcccggcagaggcaatcgagtacggtaaacacagccggggcctgccgcggtatgtttgcccgaaataagcccgcgccattaaaaaaggccgcgtttgcggcctttttcttttatgatctgacgtatttttctacctgatcgccatagagctccttcaagcgctgctgcaattcctccttggccttttgtacggcctccgggctcagcaacaaatccaccacggtgtccgccagggttttgctattcagcataatgaatttttctccggctgggctatccacgatattgcggaattccaccgtatggttggagatcttgcgttctggcaaaatcgtcatatgcggattgatggctggaatcacatgcgaaacgttgccaagatcctctccgccgctgtccgccggcatcccgggctgcatgggctctcccagagccacgcagttttcgcggaaaaagtcgcccagcacactgttggggatacggtttttatatcccatttctccatgatattccactgtacacccagttgccgcggcccctgcttcgatacagccttccacctttttccgaacatcttccacgatcatcggcgtaggggctgccaggccaagggtcagctttacataatcgcgtacagaacctgtctgctcatagccctctacaaagccataatcgatgcgaacgccgtcctcggtctgctggcgcatcatagccacagcattaaagcacataatggccgcgtcaaaggcattctttcccttccaggggcgtgcccaggcatgggccgtctgtccatggtattcgatgacataatgacagctgcacaagcactcgccagccacacggctcatcgctgtggtaggatgcacggccatgcaggcatccacatcatcgaatacaccgcccttcaaaaggtcgatcttgccgccatctgtctcttcatacggcgtaccaatgacagagaatgtgcccttgatatcaaactttttcatggcttcgatcatcgcagccccagcacccatgctggccgctgcaatcaggttatgtccgcaggcatgatccaaaccattaggcaggcagtcgtattcggacagcactgcgatatgcggcccttccccgtttcggtaggtcgcaacaaaggcagtatctacaccggccgggttctccgtaacctcgtaacccttgcttttcagatactccacctgctttgcacaggctttatgctctgtatgcgctacttccgggttctggaagatatattggctgatctccatcagctccgagcggatggcctctacctgctggccgatgtattgtttcatctcctcttttcccatgggaaatgcctccttttttccactgattttccagattttattctaaaaataatgatagactttcatagaggaaaagtcaaagaaaatcttccgaaattcattttacaaggccatacaaacgtgttatcctataaaagaatagagagcgccctatcgtctttccaaggagggaaattctatgtttcaaaattctcgatacagtatcgttgtgaatattgccctattcctgctgggcatatattttgtagcagccccgaataccgcgttgccgacgattgttaccatattggccgtggcagcctttgtttacggtgcatggcagttgttttgttattatcgcgcaacgcaaaccggcgcagataccaacaaaccgctgcttttggggattgtatccattgttgccggcattttgcttttgatcttcaaaatgcagctgattcttggtgcgctgcccatcgtgtttgcggtttggatggtctttatcgctttccagcgtgtaacgcaagccatggctatgaaaaatgccggcgtaatcaactggtacctgccgcttatcactgctgtgatttcgtttattttggctatcattgtgctgacgcatatcatgcaggtgaatgcaatcatcacctccatgattggcatttactgcattgcgctgagtgccctgacgctgggtgaaatgctggctatcaaaaaataaatcttgccaaaaagcaagccatccgtttggatggctttttctttgagaaaaggaagtgatttttatgatacgcgcttacggcaatgctccttatcgggtagcgctattgcatggaggccctggtgcacccggtactttggcgccccttgcgcgcagattatcttgcttcggcggcatgttggagcacctccaaacccaatacgatctgccatcccttttacacaatatatcggaagagctttctccctttggtcccgttatagtggctggacattcctggggtgcgtggttagggctgtggacagcggcgctttttcctgcgcaggtacaccgtttgattctcattggaagcgcgccgcttaccgatgcatacgttccgcaaatcatgcaaagacggctggccaatctttcctcttcaaaagcgaactgtatggcaaacgcgcttgccatgctagaaaatggaaactcccagcagcgtcaaacagccatggaggcgctgccagcgctgctcgcacagtcggatgcatatcaaacagcgccggaagccgttattccgggtgatctatggccagaggatgaggccgcctatgccaacctatggcctttggctgtttcgctacgcactcaaggtgctttgctgcaatcggcactctctgtacactgccccattgacattatacacggcgcctgcgatccacatccagctgaaggcgtgtgtacaccgctgcggaagatcggcgttcccttcacacttcatcttcttccccgttgtggccatacaccatttactgagcggtatgcacaggacgatttttatcagttgatgcgaacgctttgctttgcataaaataacgggctatcgcctgtttttttattgctgttttttcatccccttcaagttaccaaaatgccccttagaggctgtgcacaagcttacgatgggcaccgctaccaaagaaatcagcataccgatgacgccgatcatgggcgcgtggcccacaaacccctctatcccagccagagccaatatcgtcatcaccagtgaaccgcctgcccctagcagcaggccggcccaagcgccctctcgtgtggtctttggatagaaaagcccccaaatatacggccctaaaaaagcgcctgctatgatgccccaagaatagctcattaggtccacaatgggaatacggaaaatcgtgacggccaaggatagtgcaatgaataatacgcacatgccgcgaagcagagcatgggtccttttttcgcggtttgtcttgatatgcttggccaccaaatccacagaaaacgaagagctagcggacaacaccaatgccgacagtgtggacatactggcagagagcaacagtaccagcacaatggccatcaaaatctcgggtacgatggaagtgtccatcagcatcgttgtcatgatattgacattgggatccagcgcttccggccctaagataacgcggcccatagcgccgcaaaagtatgcgccgcagccaatgagcagtgcaaatatcgtggaaatataggttgccttgcggatagccccctcatccttaatggcatagaatttgtggatcatatgcggcatgcccagcgcacccaggctggtgagaagcaccagccagaccaaatcccatccgttgctgcccggcgtataggcagcggcctgagacagcgcttcggaaacgctgccagtaagcgacacacccttggccgcaacaaagtataccagcaaacaaacgccgccgatcatgatgctgccctggaaaaagtccgccagcgctgcgccaaaatacccgccgaaaaagacatagagagccgttaagcatgcgatgagaatataacacacattagcatctatcccaaatgccgcagtaaacaacagattgataccctggtacacggaagcggaatacggaattaaaaatagaaagatgatgacggccgaaaaggattgcaaataagggcattcaaagcgcttggccaaaaactggggcatggtagacgcatccaacgcgtgggtgatgcgccgcgtgggccctgccaggaccagccatgcaaataagcaccccaaaatggcgtttcctataccaacccacatactggaaagcccaaattggcggccaagatcgctggcatagccaataaagattacagcagaaaaataggaagtgccgtatgcaaacgcgctcatccaagggccgacattccgccctgccagcataaaatccgaagtgttgcctgcccggctcctgctgtatatggctaccccggccatcagcagcaaaaacaaccccaatacaatgtacttagccatcctctttatccccttcaaaactttttagcattgtatcatgttacagcgacaaagtacaaggcaaaagagagaaaaaagtggaaatatcaaaaaaaggcgggatcaaccgcctcttttgcacgttattggatgcgttttgcaatatggcataggccccacaacgcctcatcctctttgggggaaaaggccgttggcagaccggtggcctgctcaatccgtttccgcatttcttcggatttagacaactttccaccgcaaagcacgatacggtctatcgccgggttcagcgcccttagcttggcaatggccgctgcataagcgtttgccaagccatccatcgttgcggcaaaaagattgcacgctgtaagattgtccttaccgatgttttgaatggcaccctcgccctggccaatgtaaaaatccggttttacggacagagcctgtgtatctgctttgacctgttgccacatcgccttccaaatatcctgcttatctaccttttgccctgtgattttttccaaaatatccgcataaaaatctatcacgacatccatggccctgccgcccggctggcgcgtgatcgtcattaggctgctgccctcaaaaaacggacgcacctccatatccgcctttacatatcctttgacaggcgcacagagaatgccgcccgtgcccagcgtgatcaccacggaagtagcgatgttttctatctggtctacagagccatatacgctggcctggtgatctccgatgtcggcaaacaacggcacgccgcgataatcgcccagcggctctgtctcacagacgatttctggaaagctgagcgcaccggcacctaccatgtcgatggtacgttggttccagcatctcttaggggcatttgcaaagccggtagatgcggcgctcgtcagatggcaagcatggcgctttccgccggacattcgataaatcaggtagctaccaagggtatgaaacatggcgtctgaaagatctagcgtatggtctttgagatacgaatacaggctgcaggccgcgatcccagccttgtatcttgtgcccatagagctgatggcttcctggcccagaaggccctgcaatttttccaaatcgctgccacccagcttgggacgttcggcacgggtatcttgccaacttacatagggtgtaatggcggtttctcctctggtcaggacaaagccgtgcatttgcgtgctgaataatatgcccttgacctctggttctttttcaatctgatcgtccaccaggccgatcacgccttggtagagcagatcggcatccagctcaaaacaggccgcatcctcattggccaggcgcgccggcgtcggcgttctggtcttatggaccaaggtattggcctccgtatccaatacggcggattttagaaagctactgccaatatccaatgcaatgattttcatcgtttctccctctttgtatgttgattacttttattatactaacgctcgaaatgaagagcaaccattccctttgattctatcattcacgtttggttcttccgtattataatctaaaatagaaatacgcataaggtggtgcatagtgaagcgttttttgtttcggcttttgcggcttatggtgggctattttatttacgccaccggtatggtcttctgtatgcagggaaatctcggctattctccttgggacattttaaacaacggttttagtcatatctttggttgcagttttggcacttccagcattaccatcgcttttattctcatccttgtattgctgctcttcaaacaaaaaattgggatcggcaccattggcaatatgatctttttagggcttttttgcgattttctattggaaagcggctggatccctttgatgcatacctggtacatgggcattctcttcattatcatcggcgccgcgattcttgcctttgctacttatctgtatgtaggcgccggattttacgctgggcctcgtgacggtatcatgctcttgtttacggaaaaaagcggatggccagtcggcctatgccgcattttaattgacattaccacagcgggcgtgggctatctgatgggtggctttttgggcattggcagcgttgtcaatgtgcttgtgatggggccaatgatccagttgatgttccgcatctttcattttgattccaaggccgtacatcatgaaagcgtagcggatacctatcgttttctgcgagatgctgtgcaggccaaacgggccgcgcatcccgtaaataaggattaagcggggcaggttttccccattacaaacgccgaatgtaccgcacaggcaaaacagcctgtgcgttttttcttgctataaaatatgctgctcactcagcaatgccctttgcgcccgccaatccggatagacctgctgcaaaacccggtaaaacgcagcgctgtggtttggctctaccagatgcgacagctcatgcgctaaaatataatcggtacagctcagcggcgcatgaacgagctttgggttcatggtaatcaccgccgtctgcacctggcaagtgccccaacagcgtttcatattgcgcagttttaaggtgggatatgggatatcaaacggctgaaaagcaggataaacggcttgtaatcgttgccggcatatggtctggtaaaggcccctcagcgctgtattcagcatcgcctgatttttcttttcctcgcctttatctttcacggccaaa

SEQ ID NO: 4304 - DNA, 3655 bp, Unknown
  16S sequences of unknown bacteria
cgagctataagataacggatgtaaagccgaaagctcatttagactataacggcgcgtcttggcgcggcgacgctattgagggcaaggtcacaaagaatattgccgtctgcccggactttacaaccaaaaggttttatcttgatgtaaacggagtattggacggagaacaggaggttactcttgacggctggtgcacctttgatgtttaccttgacggcaggctgtataaggaaaaggtttcggacttttatgaaaagataaagtacggcacggcgtatacaattacaaatatccgcccggcagagggcaaaacctttttcggcgcggttaccgaccttgcgccgtatcccagcagcaagcacagctttccgagatacccgtccgggctttcggggacaattgggttagataaccaatatatctttttagggcttgaaacagataagccccttgaagcggttcttatagaggcaaacgccccgtaccgcgaggaaacctatgttataacaagcgggtttatagtaaacccgtcgggcagagattacacgccggataaagacttaaaggcacggcttgaaataataacgccgtcggaaattatatacagtgaagaaaaaagcgttatagtccccaaaaaggataaaaacctttgctatttcaagtggcgagtgccgaaggatataggcggagaagtatcagcacgccttacggttgtatctgacggtaaggatatatttacggacgggaaaagctacgataccgtgccgtatacatatttaactacgcccgatacttcgtatgaggcggcagcgcccgcaggattcagtaaagcgtatccgccgggagagaccgagggctatgctacctggtgggaatatgtatatacagacaccggctttgaaaaaagaacctacggcataggaattgacggcagcccggacgcgctgtaccctgcgcgcggggcagataacaaaatatcctcgggcagagggttttatacgaacatagcggcgaatttcacggctgtttcgggcacaaaccttgctttatacaattcttatactgatatacagtatataacggcgctgttccccgaatttaattatcttcagaacaacgggaaatgcaaaacccttattaaaaatactttaaacggcttttttgagtttccggataatttcggttacggcaagcagcactttataccgctgagctaccccgacgggaattatgttattcagcttattaaaacagatatgtggacgcccgccggggctattacggctaaggaaaattcaaagccccttaaaatatccggcagcgtttacgatgaatactatataggacggtgatttttttgagaaatagaatatataaacttttgattgcggtgattgccttaataatgcttgtgtcggcattgcccctttcggccgcgcccgcggcagatattccgagcaaaatgcttgacaatatatatttagacgcgctgacctacacggggtataagacagatgtgcagaaagcggacggcagtatttttaaaacctacagcggcaatgctccggcgtcggtgcggtcgggcataggctacggcacaggtccgtcagggcttgaaaccgtggcggcggataacaaaacgggcaaagcaccggatattgcgaggtttaaagccaatgggctttgctgcgcttcgtatgtatcatatgtctactacaattatctgccgaatatagcgcgaatggatgtttccaaaattccgcagcccgcaaatccccgctcgcccatatcctataacagcgcggttgaaaattgggtgaagtcgggaggtgccagaagaatcgcatttacacaaggcacaaacagctttacaccgagcgaggaaatacctatcggctcccttatcgttttcaagcataaaactacgggagaaattgcgcatttggcactctatgccggatattatgcgggcaagcattttgtaacccacgtcggcaatgagcgcggacccgaaatttctaccgttgagggaatgagcaagggcagctacccggaggtggtaacgcaggttgtagtgccggatataggggagccgacaggcactatttcagtttataaaacagatgaaaacggcaagccgcttgccggcgctaagtttaaggttacaatggcggagcacccggaatattcttttcttataaacccgaccgacgaaaacggcaacgctaagatgaatatggggctgccctacggtaaatatattcttactgaaattgagttccccgaggggtatacatattccgggcaaaaggaatataccgtggagatatgcgatgaaacgcagtttgttacattaagggcagtaaataaacttaaaagctctaaactgaccgtaattaaggtggattccgaaaccgggcagaccgtaaggggcgttacgggatttaaaataagaaacacacaaacaaacgaagaaagcgaagtatattacaccgatgaaaacggttctttaagtttaccgaatgaagtaacatacggagattatgagcttaccgaggttgtaccgccgaacggatatgttttaaacacaacgcctgtttcattcggtattgacggcaatacgcccgaagttattatccgactttctgataagccggaaaaggggaaaatatccgtgcttaaaaggggcgaaatgttttcgtctgtaacagaagaaaacggcaaatatactcccgttcacagcgaaaagggcttaaaggaggcggaatttgaagtaaccgccgctgaggatatttatactgcggacggaacgctgagaatttcaaaaggcgcattggcagatacgcttgtgaccggcgagtacggaacggccgtaagcaaagagttatatcccggcaaatatcttttaagggaaactaaagcgccggaaggatatattataaatgccgaaccatgcgagataaccgttgtttcgggcattgtttcggcagaaatatttaacgaacgcaaaaagcaggaatttaagctaaaaaaggagcttgaaaccgatcaaaaattcgggatagggtttaacggagagattttgaatatacggttcgggctgttctcaaaaaccgagcttacggcgcttgacggcagcattattccggcggacgggctaatagaagtagcaacacccgacgaagacggttctttaagctttgcggcagatatgccgtataacgccgagtgctatataaaggagttggaaaccgacgagcattatattatttcagataaatgttattcggacggcgataccgccgagaacaaaattatacggggcagcattgagggtcttaaaaccgatccgaacggcagggttttaaggggtgcggttatagggctgttttatccgtttgaaaccgagttttctaaggataccgcaatagaagtctttgagaccgacgaggcgggcagatttttatttgaaaatgtgccatacggcgagtggatcattcgcgagcttaaagccccggacggatatattttatccgaagaaagttataccgtgacggtaaaggaaaacggcgaaacggtaaagcttaatattaaaaacagcaaagtacccgagccgccgtcggctcccgaaagccccaaaacgggagatacggca

SEQ ID NO: 4305 - DNA, 6714 bp, Unknown
  16S sequences of unknown bacteria
tgaaaggcttgcgggaaggccgcgcggaagggcgagaaaaaggcctgcgggaagggcgtgcggaaggccgcgcggaaggcgagcggaaagcgcggcaggaaatggcgcggacgatgctaaaaggacatttgacggtagaacaagtgatggcgtttacgggcttttcgcgcgcggaagtagaagaactggccagggaaaccggcacgcagggataaatggcgcaatgccagccggcagggcgctgtgcgcgggaagatggcggtaggctgccccggcggatccactcaagccatttttttcctaaaactttgaaggggccgccttttgcggggcggccccttggttttgtccaactttgcggttttactcggcgagcggcgcattggtcgcgcccgggtccacgccggtgtcgttcacgtcgccggcattttcgtccagcggggcggtggtggccgcgccgccttccaggctgccgggcatatcggtggccagttcgtccagcgcgccttccacggggttgtccgcggtggcggtgggggcgagcgaggcggtgggactgggctgcgcggtgccgctgctattccagcagcccgagagcatggcggtggcggcgagcgcgagcaaaatcagcgcaaatcgtttcatgataactcctccttgggcgcttggcgcatttggcggcgaacccgccgcggtagccgcgcccagatatttttttggggctatcctttattatggtaagatgcgggagaaaatacgcgtgtaggcaaaaattttctcatttggccgcgtcttgccgcaatttttgtagaaacgattggccgcgcgcgaaacggcgctattgcggacaattttccagatccgcgtcccacagggcggaaaacgcgtccgaaggcatgcgccaatccgcgcggggcgagagggacaccgagccgaccttcggcccatcgggcaggcaggagcgcttgaactgctgctggaagaagcgccgcaggaaggtcttttcccacttgaggatcgcctcgtcatcgtactgtccggcaaaggcgattttcgccaggcgcaaggccttttggggcgactcgccgcggcggacgatgtgatagagcatgaaatcgtgcagctcgtaggggccgacgatgtcctccgtgcgctgggcgatcacgccgtccactggcggcaacaactcggggctcacgggcgtgtcgagcacatcgagcagggcttcgcgcagcaggggatgttccgccgtgtcggccacatagcgcaccaggtggcggatcaacgtcttgggaatggaagcgttcacgccgtacatggacatgtggtcgccgttgtaggtcgcccagcccagcgccagttcggaaaggtcgcccgtgcccaccaccaggccgccgcgctggttggcgatgtccatcaaaacctgcgtgcgttcgcgcgcctgggcgttttcgtaagtcacgtcgtggtcgtcgggcgaatggccgatgtcgcgcaggtgggtgagcgtgctctcggcgatgttcacctcgatgagctgcgcgcccagcccttcggccagcttgagcgcgttggcgtgcgtgcgttccgtggtgccaaagcagggcatggtcacggccacgacgccgccctcgcccagcccggccaggcgcgcggcgcgcgcggccacgatgagcgccagcgtggaatccagcccgccggaaacgccgatcaccgcgcacttcgcgtgcgcgtgcgccatgcggcgcgccagcccgcccgcctgaatgcgcaaaatctcttcgcagcgctgttcccgctcggcggcgttttgcggcacgaagggcagcggcgcgacggcgcggacgagctcgagcgcttccatgcgcagggcgaaggggatttcgcggtgcggctgggcggcttcgcggaaggcgttcaagcggcggcgttcgctggcgaggtaggcgacgtccacatccgcgaagatcaggccgttttcccagcgggattccgccaggcgctcgccgttttcgtagatcagatcgtgcccggcaaagacggaatccatcgaggattcgccctggcccgcgtcggcgtacacatagccgcacaccaaccgcgcggactggctctccagcagcaggcggcggtagtccgccttgcccaccagctcgttggaggcgctggggttggcgatgacggtggccccggccagcgcgtgcgccacgccgggcgggttgggcacccaaaggtcctcgcagatttcgatgcccaggcagaattcgggcatgttgacgcagcggaacagcagatccgcgccaaagggcacgctttcgccgttgagcgcgatgttctccgcctgcgccgggccgggcgcgaaatggcgcagttcatagtattcggcgtaattgggcaggtgcgttttgggcaccatgcccagcacgcggcccttgtggatcacggccgcgcagttgtacaggcggttgcccaccgccagcggcaggcccgcgatggtcacgatgtccagcgcctcgctggcccggcacagttccttcagcgcgtccagcgcgccgcgcagcagcgtgtccttgagtaccagatcgcccacagtgtagcctgttaagcacatttcgggcaaaacgagcaacttggcgcgccgcgcgtccgccgcccgcatcatttcgatgatggcccgcgcgtttttttgcgtgtccgccagaaaaacctgcggcgtccccgccgcgattcgaacgaatccatcctgcatggcgcatgcctccccgagagttcttgcggattataccgctattataccgcgtttttggcccgcgcgaaagagcgtgaaagggaatttgcgaaaaactctggaaaactatggacaaggcggcgcaagcggctttgctgaactgtatcgcgtctgccgcgacaaaacttcctgccaaaattcgccggcgggcgcgcacttgcaggaggatggacaaacatggtataatagggcaagcggcccgcgcgggccgggagattcagccgcatccgtgcgcagaaggagggaaaccggatgatgcaaccgcaagagctacagagggagcaacgcttcgctgcccgcgtgcagcagctcctttcagcggccattgataaggcaaagggctttgccgacgagcacatggaatccattcgcctgatgctcgtcgacgcctgggaggagctgcgcctcaaacccacggcgctttcgcccaaggatttggaacagctttcgcaggaagtgcaccactttctcgcgcggcacgattggagcaaggagaacgagcgccagtaccagcagatgctgctcaatccgttctttgcccgcatcgatttccaggaggcgggcaatagcgaggtggagaagatcgtcatcggcctgtattcgctcaccgacccggccacgggcgagcgcgtggtgtacgattggcgcgcgccggtgtgctcgctgtattacgattccctgccgggcgaggtggcctacaacagcccctcgggcgtgatgcggggcaagatgctgctcaagcggcagtacaagatggagaacggccgcctcgtgtattatatcgacaccgaagtttccatcgacgatgagattctgctcgacatcctttccggcgccaccaccaaccacatgcggcagatcgtttccaccatccagaaggaacagaacgcggctgtacgctacgacaacgtgcgccttttgtgcgtggtgggcgcggcgggctcggggaaaacctccgtggccatgcaccgcgcggcctatttgctgtaccgctatcgcgattcgctggacgcgaagcgcattgtgattctttcgccttccagtgcgttcagcgaatacatttccaccgtgctgcccgaactgggcgaggaaaacacccgctcggccacgctgagcgaagtgttcagcggcattttgggccaggcggtggaaccgccgcttcagcaggtggagcgcctgatggagccaggatacgagctgcgccgcgcgagcgtgcgctataagagcggcgcggagtttctggcgcgcctgcgcgcgttctgccagcaataccgggaggaaggcccggaatttgccgatgtgaagttggaagagcatatcctggcggacgcggcatcgctgcgcgcgctgtatcgcgaggagttccgtctgctcgcgcccgcgctgcgcattctgcgcatccaaaccgtgctggagcagcggctggaagcgtggagcgcttcgctggaaaagcaatatagcgaatcgctcagcgggcgctacaagggcaaggatttggccatggcggtacacatggcggttacacagcggctgcaccccgtgcgcggccagatccggcgcatgttggagagccatccgcttgagctgttcgcgcagatgatgcgcggcgcgcccgaggaattggccgccgccgcgcgggaaaacgcgcaggccaaatgcgtctggtgggaggacgcgggcgccatcgcctatatcatgctggatctgggctttgccgcgcccgaccggggcatccgccacatgatcgtcgacgaggcgcaggattatgccgacgcgtcgctcgccgcgctggcgctgtattatcccgaggcgcaggtcacgctgctgggcgatcccaagcagcgcacctgccccggcatgccgccctgcgcgccggaaaattggggcgcgtgcttccaggtggaaaacgcgccgctgctcacgctgggccgctgctaccgttccagcctgccgattgcgcgctttttgaacgcgcttttgcccgatggcgatcaaatcgtgccctttggccgggagggcgtttcgcccgagttgcgcgcttacacggaagcagacgcggtggcgaccgtgcagcgcctgcgcggggcctatcaccgcgtggccgtggtcacgcgcaccaccaagatggcggaccggctcagccgcaagatcgagggcgcgtacctgctggacggcggcgacgacgcgttgttcgaagccacggatgtggccgtgggctgctaccacgtgatgaagggcatggagttcgacgccgtcgtggtggcctggcccgaggaagcgctcaccgacggcgagcgccgccgcctgtacaccgcgtgttcccgcgcgctgcaccatttggtggtgttcacgacgcctgaaatgatcgaaaagctgggcattgtgctatgacgcgcgcggatgtgttggtgctgggcgggggcgcggcggggttggccgccggcatcgccgccgcccgggcaggggcgcgggtgtgcctcgtggaaaaactgccgcgcgtgggcaagcgcctgctggccacgggcaatgggcgttgcaatttgacgaacaccggcgcgcgcgcggcggactattttggcgatggcgcgttcgcggcaggcgcgcttgcgcgcttttcgccggaggcggtgcgcgcgttcttccgggaaatcggcttggaaagccgcgaggaatacggcgggcgcgtgttcccgcgcagcaaccaggccgccgccgtggtggacgcgctgcgcctggcgtttgccgaggcgggcggcgaaaccgtggcggatttcgccgccattgcgctggaaccccagcggggcggcttttgcgcgcgcgccgcggatggacgcacggtttggggaaaaagcgccgtgtgcgcgctgggcggcatggccgcgcccgctctgggcggaagcgatagcgggctgaagctgatgcgcgcgctgggccaccggctggtaccctgcgcgcccgcgctggtgcagatcaaaaccccgcccgaggccgtgcgcgcgctcaagggcatccgcgtggaggggcaggcgcgcgcgtatgtggagggccgcgaggccgcgcgcgcggcgggggaaatcctctttgcggactacggcgtttccggcccggcggtgatgcaggtgtcccggccgctttcctacgcgctggcggaaaagcggcgcgcggaaattgccgtgtgcgccctgccggaggaagggccgggctttttgcgcgcgcggcgtgaacggcttgccggccgtccgttggaggattttctcaccgggttcgtgcccaagcggctgggccaggtgctgctcaaaaacgcgggcatcgccccgctttcgcgcccggcgggctcgctcgcggcgggggagctaagcgcgctggaggcgctgcttttcgagtggcggctgcccgcgctgggcaccgcgggctacgccaacgcgcaggtgatggccggcgggctggatacgcgcgatttcgacccgcgcacgctgcagtcgcgcaaggcgcccggcctgttcgcggcgggcgaaatcttgaatgtggacggcggctgcggcggctacaacttgcaatgggcctgggccagcggcttgctggcgggaagcgaggcggcaaagcgaagatgatgtatcgagtgaacaacgtgtccgcggggctggacgcgccgcttgcgcgcgttgccgcccgggcgctgaaaatcgccgagggcgaggtgctgcgcgtgcgcgtgcgcaagaaatccgtggacgcgcgcgaccggggcgacgtacactttgtgtactcgctggatgtggaaacgcggcggcgcgtgcccggcgcgcaggaggccagggaaacccccatcgcgcccctgccgcggcaggaatggcgcgcgcgcccggcggtgatcgggctgggcccggcggggctgttcgccgcgctcgccctggcggaggcgggcg

SEQ ID NO: 4306 - DNA, 32759 bp, Unknown
  16S sequences of unknown bacteria
tttctcccgtaggtcctgtcggacccgtgggccctgtttctcccgtaggtcctgtcgggcctgtcggacctatcggacctattgcgcccgtggggcctgtttcacccgtgggtcctgtcggacctgtcggacccgtgggtcctgtttctcccgtaggtcctgtcggacccgtgggccctgtttctcccgtaggtcctgtaggtcccgttgctcctgtttcacccgtgggtcctgtcgggcctgttggacccgtcggacctattgcgcccgtgggccctgtttctcccgtaggtcctgtttctcccgtgggtcctgtcgaacctgttggacccgtcggacctgtttctcccgtgggtcctgtcggacctgtcggacccgtggggcctataaatgtaaaatcatgcccgcaacaatcggacgagcagcacacgcggcaaaacccgcacttttttttatctttatcatcacataatggcaatagaatacacctcggaaattagttgcctttgatattatattcaaaaacgcagtttctcgttaatccgaggtgtataaaaactatatattaatgttttgattgacgtaaggtaaatatgcgttacggaaaatcggtccgacgaacaacataaaaattaaaacttgcgataaaaatttgcgataaacgcagaaaagaaattaaaacttataattttaaagatgcattttcttgttgaattcagccttaagcgctttccaataaataatcgtcatggtaagtccgttggcaacagcaaaaacaaaacatgaaaaagtcagccagaagggaaatttttcgggaataatccatactgcaatttgcgggataagcgcgtacagcgatacgataagcaacgaaaacagataatatttgtatttacttttttccactgccgccataacgtccaaagttatcatcattgccatcagaaatccgggcacggcatacaacaaagaaaatccgaacgcggaaaagctgccggttctgtcaaagctttgaatgatatccaagcaaacaagcgtaagcggcaaaactattgccagcacaagcaaaagcgaataaaatctgcgctttttgtaaatcgtggacaaaacacacaaaaataccgtcacgccgccgcacgcgacgtaagccgaccacaaactcgacggcgtcaaaagcacgtttataagcacgcatacaagaataacggtaagcgtaagaaaaagcgattttttccttaaaaagcttttatacgcgtcgcccttcagtttaagagagggataatttacgtatttttcctgttcggcgtaatcctcgaagcgattgctttcgcattcctccatccagcttccgcacaaaggacaatttttaagattttcgttgacgaacactttacattcggagcaatatttcatatttatttctccttacagttcaaaattcgattcgaccgcgacgggaatatccaattcgcgaagtttgcggaagaaatatttttccactccgctctcttctatcacgcgcgcaaacgtcagaacgagagtatcgttataggacgcgccgcacaacgaagtcagaatagtcgactggggaccgagattaaattcatatctcagtactttgtccttgaattcttgaggggccgctattcttcccagatttgaaaaagtagacgtagtaacgttgtcgctgaacatcttaagcgccagtttcattgccacgttcttcacgggcagaggaagcaaacggaaaaatttgtttttctgaatacgcacgttgaagtttacgtaagacttcagataatcgacattgtttaatttttcgaactgctgctttacgctttggcaaagggcgtcgaaatcgccggaattttcgttttctatatgcataagcgcgacgaaattacgaagagtcttgctttcgtaaaacttgcggatatttatgggcacgcctatgacgacaggcaatttgttttttctcagataaaaatttcggtcctcttctatcgcgcagataaggcatgcggttaaaagctgtcccacggtaagcccgcgcgcttttgcggctgcgtttatcgcggaagaacttattattccctttacggtaagcaaaactcccgcgggcagtttcttccccgaaagcctgtaagcctttttatcctttgcgcgcggcaatttacggttatcgaaaaactgctggtaactgtcggcaagttcttcgggtttaggcttgtcaagatggttaagacaattggttttatccgcgatttcttttccctgaagtttaaaatagcagcacaaaagcgaattaagaaacgttattcctccgtttccgtccgttgcgacatgcagaatttccacggctacttcatgggagaaataagttactcttataagagcgttgcgcgcgtcaagacctattttacggcagggaaaatccttttgtttttcgaccacaagcggcttgttggaaggctcgaggtaataccagaaaagaccgcgtttaagcgatgacgtaagcgagggaaatctgggtacgatcaggttaagcgctttttgaagcaatatcgggtcaacgggttctcttagtaccgcgctgacacggaacatattggaaatatcagcggtttccccggcgggaaaaataagcgcggcgttatcgagattaagccagcctgccacggggttctgctccttggcgatagacaaaagaagtttttccgtctccgcctctttatctacgggctttttaaaatcagtttctttcggctttttcgtatcggatgccttggcggaaccgtatttgcgaatttcggaaatctgcgctttttctgcccgtttttcctgcttgcgttttttcttttcctcggcggaagcaaattttttacgcattttttccgcttttttggcaagcttaagttcctctttatgcttgaatttcaaggtctttttataagactttgcctcaaccttggcgatttttttatccagtttttcgggattggaaattttcatttattctccgtaacaaatggcattaaaacttttgaaatcgctgcatatcctttaaccgtaatatgcagtccttccacggtaaactcttttttaagattgcctttttcgtctgaaagacaatcgtataaatttataaaattcaattgttcgctatcgcatttttcttttaatatcttattaacctcttttatccttttattcgtagctttccccgtaaacacggtgctgaacaaaatttttctgcgatttacgggataaagagagataacgttaatttctgtttctgttttatcgaatttgcttacaacggcaaaaattctttccgcaagcgcttgagccgtaagagtacgcgcgctctttcttatcatgtcgttgattcctatctgaagaaacagttttttaggcttaagtttcactacttcgctgacgcgatgcattacgtccgacgtggtgtctcccgcaataccgcggttgacgattttaacgtcggtaaattcttcgataggataaaaatccgtaagcgaatcgcctaagaacacgacgtcatgatttaaacggaattcgtccattatatgaaaatcctcagccttgtttacggctgccttttttacatatacggcgacagtgacataaagcataattatgaacagaagaaaacttgccaccgcaaccagcactatttccaacgcggacataaacgcccctccgaaataactttaaaaacaattaccgataaagtataacatatcgtgtccattatttcaactttttaataaataaacccgggattttcgttttttatcccgggttttcctttgattttaccttattatgtctgtcatagtactttattttagtcaaaaaaacaccatttttatgacgactattcggttatttaaatataatcagcatacttaaaccgcaatttccgataaaaaattatcttctcgccattatacaaacttataaaatatttacatgtttgcaagcagattttcaatgccgaagcggaataaaatcacgtaaaatttcatcccaaaagcttgacaaggacggctttttgcgcgtgcagtctgttttcagcctcgtcgaaaatttcggatgcgtgctcttcaaagactttttcggtaatctcttctccgcggtgagcaggcagacaatgcaacactattgcgtctttttttgccacattcataatgtcgtcatttatctgatagcttttgaaagcttttttcctctcttccgcctcgccttcctgtcccatgcttgcccaaacgtctgtataaatcacgtctgcgttttcggcggcttcgaacgggtcggaagtcaatgtcagcaacccgctttcctcaccccatttgacaagtacttcatcgggtttaaagcccgaaggcgaagcaacggaaattttcatgcccgtttttacgcagcccgcgataagagaatttgccatgttgttgccgtcgccgataaagcaaagcttaagatttttgaagcttcctttatattcgcgtattgtcataaggtccgcaagcacctgacacggatggcaataatcggtaagcccgtttatcacgggaatactgccgtactttgcaagtccttccacgtcgctttgcttgaacgtccttatcattattccgtcgagataacgcgaaagaacgcgcgcggtatcctgaataggctcgccgcgtccgatctgaaggtcgttgccgcttaaaaacagcgccgagccgcccaactgatacataccgacttcaaaagaaacgcgggtacgcgtggacgcctttgtaaaaatcataccgagagtttttccctcaagtctcttatgcgatataccgtgtttaagctcgtatttaagctgatcggcaagattaagtaccgacaaaatttcttcgccgcttaaatcggcaagtttaagtaaatgtttcatttcagcacctcgctcattattttaagtcccgtttcaatattttcccgtgaaatatttaacgcgggcaaaagccttattttgttttttgcggtcagtacgataagccctttttctctaaattccttaaccgcatccgccgcggaaattccctccgtttcaatgcctatcataagtcccatgccgctgacggattttacttttttcatcttgctaagcgcgttgtttatttcggctgctttttcttttacggattccataagactgtcagtcaagccgtcaagcactgcgcacgcgcctgcgcaggcaacgggattaccgccgaatgtcgagccgtgagtacctgccgacaaagtgttttcgcatttatcccacatcatggttgcgcccaacggaagtcctcccgcaagtccctttgccgtagtgacgatgtccggttttataccgtactgcatataagcgtaaagactgcccgttctgccgttgccagtctgcacttcgtccacaatgagcaaaatgtcgttttcgcggcaaaattcctccgtttttctgacaaagtcatgatttaacgccatgactccgccctcgccctgaacaagctctatcattacggcgcaggtttctttatctgctttttgcttaaggtcgtcgaagtcatttggctccgcgtagtcgaaccccgcaggaaacggaaaaaaataattgtggaaaacatcctgtcccgtggcggtaagcgttgcaagcgtacggccgtgaaaagaccctttcagcgtgacgatttttcccctgccgacgccgtatttatcgaaagagtatttccgcgcgcatttaatcgcgcactcgtttgcctccgctcccgagttggaaaaaaacacttttttcatgcccgtgcgtttgttaagcttttcagcaagacgcacgcaaggttcactgaaataaagattgctggtatgcgcgattttatccgtctgagcttttaccgcctgtacccaaggggcatacgcgtgtcccagaacgttgaccgctataccgctgccgaaatcgatgtattcttttccgcagtcgtcggtaaggacgcttcctttgccggaaacaaaaaccacgtcggcgcgcgaataggtattggctatgaaatatttatccgctgtctttacgtccatttacttttctccgatatcagtaaaacattgtcccgagtccctcgtcggacaaaatttcgattaaaatcgcgtgcggaactctgccgtcgagaataaagaccttttcaacgcctcttcttatcgcctccacacagcaatctattttaggtatcattccgccggaaattatcccttcgcgcatcagctgaggcgcctcgcttacgtgtacgaccggaatcagcgaagactcgtcgtttttgtcgcgcagtattccgcgtatatccgtcatggaaataagacattttgccttaagctcccctgcgatacgcgccgccacggtgtcggcattgatgttgtaaacgtttccgtctttgtcgcaacccactgtacttatgacggggatataacccgccgccaaagtatctgtaacgggacggacgtctatttttgtgatttcgcccacgtaacccaacttttcgtcgagaaccgaggcctcaatcatgtgcccgtcgatgccgcataatccaagcgctttaccgcccgaattttcgataaggttgacaaggtccttattcacttttcccgcaagcaccatttgcacgacgtttaccgtttcgcgatcggtttttctgagtccgcccacaaactcggagggaatattcatttttttcagcgtttcgcttatttcgggaccgccgccgtggacaagcacaacctttatgcctatctgccataaaagcactatgtcgcgcatgactgcatttttaagctgatggttaatcatggcgttgccgccgtatttcacgactacgatacggttgttgtattcctgaatgtacggcaaagcctgtaccaaaatttctgccttttcagcattgcttattttcataaataatctctccgtaaagtgtttttccgtttcaggacgttttaattaagtacggtaatcgccgtttattttgacataatcgtaagtaaggtcacagccccaggcggttgccgaataatctccgccgcccaaagaaacaagtatcttaatctcgctttcggaaagaattaccttagccttatcctccgaaaaatctacgccctcgccgtttttgcaaacctcgatactgccggcatccgaagcgaaagaaacccctattttcatcacgtcaacatctgcgcccgaataacctattgcacacaatacacgtccccagttggcgtccgcaccgaacatcgccgctttaagaagcgaactggttatcacgcttttgacaacttttgcggcggtttcgtaatctttcgcgccgcttgcaacgcattccaaaagtttggttgcaccctctccgtccttggcgataagacggcaaagataagtcgtaaccttgttgagtgcggctttgaacgaagcgaaatcttcgccgtcggcgtcaacggtttcattgcccgcctctccgcttgcaagcacgcaaagcatgtcgtttgtggaagtatcgccgtccacgcttaccatgttgaaagaggtttttacatcctcggacacggctttctgcagcatctcgggagttatggcaatgtcggttgttaaaaacacaagcatagtagccatattggggtgaatcattccgctgcccttggcaataccgcctatcgcgcatttcttaccgccggcggtaaactccacggctatttccttttcaatcgtgtcggtggtcataatggcttgattggccgcaagacttccgtcttcgcttaatgccgcgacaagactttccattccgtcttttatgggcgtaacgcttaacggctgccctatcacgccagtggaagcaactataacgtcgcttgtttttattcccgtgtgtttgcttacaagcgcgcacatttcttcagcgacctcttttccgttcgcgttacaggtattggcgttgccgctgttgcaaatcaccgcctgcgcatacccgtcggaaatattgttctttgtgacataaacgggcgcaccctttacgagattggtcgtatacactgccgccgccgaacaaagcttgtcgcacactataagcgcaaggtcctttttagccttattcttacggattccgcaatgaattccgcttgctttaaaccctttggcggcacacaccccgccttcaataattttcatattaactccgttaaaaatataatttccgcaataagacgttaaataaaatcagtttcacaataattaagtcccgccgtttcgtcaagcccgaacattaaattcatattctgaatagctgctcccgacgcgccttttcccaggttgtcgaacaccgcgcttaccgttatgcggtcctcgtttccgcccacgaaaatcctgaggtcgtctcttcccgacaaaagatttgcgggcacaaagccggcaagctcctcgtccatatacggcatgactttaataagttttttatccttgtaatattcggcgtaaaagtcgcgcagtttcattgcgcccgtcccgcccgtaagcgagcggtcaagcggcacggtaacttccattccgctgtaaaagtcgcatacaatcggtgaaaatacgggagaatttttaagtccgcagaccgcagtcatttccttgagatgcttgtgctgctgattgagtccgtactgacgcggagcggataaaagcacgcttttttccttgctttcgtattcggctatcattttcttgccgccgccgctgtaacctgtcagagaaaacacgctgagcaccacagacgcaggcactattccgcacttaacaagcggataaaccagcgtcacgaatccgcctgcgtggcacccaggaactgccactcttttggcggcgcacacttcgcttaatttatcctttgacagctccggcaatccgtaagtccagccgtctgcggttctgtgcgcggtggacgcgtcgattattttcacgcgcttgtttgtcacaaggccgaccgcttccttagctgcgacatcgggaaggcacaaaaacgttacgtcgcttttgttgatgcactccgccctggcagagctgtccttacgaaactccgggtcgatttctatcagttttacgtcgcttctttctttaagtctgtccgcaattctaagccccgtagtcccctcgctgccgtctataaaaacgttaatcattgtcatcctccagaaatccgcgcacaacgttaagctgcttttctacgctttcgggaccgggaccgccgtatacgttacgttttttcatggcgcttacaatatccacagcgctgtaaatatcctcgtcgaacagttcgctggcgccgcggtattcttcgatgggaagattgtcgagagtatagcctttttcgatacacagcgcaacgagtttacccgtaatcttgtaggcggtacggaaaggcattccttttttggtaaggtaatccgcgcaatccgtcgcgtttataaagcctttttttgcagccagcaacatgttttcaggcaaaaatcttgctgtttccatcatgtccgcaaaaattttaaggcacacgcaaaccgtttccacgctgtcgaacacaccctccttgtcctcctgcatatccttgttatatgcaagcggcaagcctttcattacggtaagaattcccataagatttccgtaaaccctgcctgttttaccgcgcacaagctccgcaacgtcgggattctttttctgaggcattatggacgaacccgtcgagtatgcgtcgtcaagctccagaaatttgaattcccagctcgaccaaagtatgacctcttcggcaaggcggcttaaatgcatcataattatcgcaagcgcggaagaaagttcgataacgaaatcgcgatcggacactccgtccatgctgttgaaacacacatcttcaaaccccaacattctgcttacggaaaaacggtcaatcgggtaagtggtgcccgccagcgcgcaagaccccagcggcataaccgacatatgctttttgcaatcctcaagcctgtcgaaatcgcgcatcagcatggcgcaataggccagcatgtgatgagctaacgtcacaggttgcgcgcgctgaagatgagtgtacccgggcataacggtcagcttattttcttcgctgatatccttaagcacggcaacgcaatattttaaagcggacataacctcgtccgtcttttccgcaaggtacagtcgcgtatccgtagcgacctgatcgttacggctgcgcgcggtatgaagccgcctgcccgcatcgcctatacgggcggtaagttctccctcgataaacatatggatatcttctgcgctgtcggaaatcttaagcgttccgctttcgatatcggcaaggatttcctcaagccctgccgtaattgcctcggcgtcttcggaagaaataatgttttgcgcgcccagcatacaagcgtgcgctatactgcccttaatatcggcggcgtacatttttttgtctacgccgattgaagaattgaattcgtccgtttcttccgcggtgggtttattaaaccttcccgcccacattttgtccattgtcttctccgtaaactagcgaaagcgtcccgcatttgtcaagacgcttccccgaattttattttttgtttttcttttccatcatggcttttactttaatgggcaagccgtaaagattaatgaaccctgcgctgtcattctgattatagacttcgtcttcgtcgaaagttgcgatttcctcgtcgtaaagagaatacggagaagtcacgcccgcatttatgatgttgcccttataaagtttgagtttgacgtcgcccgtaacagtttcctgcgttttgtccacgaaagcggaaagcgcttcgcgcaggggcgtgaaccatttgccaaaatacacaaggtcggcaaattcgtgcgacacgatagccttataatgctgagtgtcacggtcaagacacagcgtttccaatacctcgtgagcgcggtaaagaattgcgccgccgggggtttcgtaaacgccgcgggacttcatgcccacaaggcggttttccacgatatcggcaagccctacgccgttttccccgccgattttattaaggcaggtaacgatttccggtccgctcatctttttgccgtcaacggcaacgggaacgcccttttcgaaacttatggttacgtaaacgggcttatcgggcgcctgaagcggagaaacgcccatttccagaaagcccggcttatcgtattgcggttcaagcgcgggattttcaaggtcaagcccctcgtgcgaaagatgccagatgtttttatccttggagtaatttgtttcgcggcttatcttaagcggaacgttatgcgcttcggcataatcgatttcctcgtcgcgggactttatgtcccagatacgccacggcgcgattatcttcatctcgggtgcaaaagcctttatcgcaagctcgaatcttacctgatcgttacccttgcccgtgcagccgtgacaaattgcgtcggcaccctctttcaatgcgatttcggtaaggcgtttggcgataatgggacgcgcaaacgacgtgcccaaaagatattcgccctcgtatttggcgccggctttaagcgtgggaaaaacgtagtcgttgataaactcgtctttcaaatccatgacgtaaagcttgcttgcgcccgtctttttagccttttcttccagtccgtcaagctccgtcccctgtccgacgtcgccgcttaccgctataatttcagggtcatcgtaattttccttaagccaaggaattattatggacgtatccagtccaccggaatacgcaagtactatttttttaatctttttatcggttttcatgtgtccctccgctttttgcttttacatgatgtaaattatacacccaattggttaatcagtcaagtattttatgtataaatattcattatttttttgtattaatgtataatttattatgtttatgcagttttatacgcataatttgttttttatgcaaaaacctccgtataaacggaggcttatttgtcgtaaaggaattattcgttgttttcgcgtatgtttgcaatcatgagtttaagacggttttcctggttgacgttggtcgcgcttgggtcgtaatctattgccacgatattggcgtcgggatattcttccttgactttacggctcataccctttgcgacgatatggttgggcagacacccgaaaggctgtgtgcaaactatattttttgtgcccgttttggcaaggcagcccatttcggcggttataagccagccttcgcccattttgacaccctggtttatgagcttatccgcctcctttctgagctcttcgaaatcgtccatggggtcgaaaccgccgtaagacataacggtttcgttgagttttctagacagcgacagcagaattttataaagcaaggacgaaacacgggttacggtgtttttgaatccgtaaattttaccgtcgtttatgttgtttaccgtacagtaaagcacgaaatccataagtccgggaacgacgggctcgcacccctcgcggataaggaattcttcgaggtggttattggcaagcggcgaatatttgacgtaaatctcccccactattcccacgcgcggttttcttgcggagtcgcgctgtatggatgaaaaagcgtcaagtatcagcttgtaattctttttacgcttaccgaatccgcctttaaccagcttttcggcaagcgttttttcgcatttttcaaggactttatcggtttcgcccttggttttttcgtatggcttgcactgattgtacaaaagcatcatgaggtccccgtacaaaacggcgtcaagcagtttaaagagaatgggtaaagttattttaaacccgggacttttttcaagccctgaaaaattaagcgaaatgacgggaatttgcggatagtcgacttcaagagcctttctgagcaaatgcaggtaatttgaggcacggcaccctccgcccgtctgggaaatcatcaaagcggttttatcgggatcgtatttgccgcttttaagcgcatcgagaaactgcccgataaccaaaagcgcgggataacacgtgtcgttgtgcacgttttttagtccttcgtccacgacggcacgcgcggaattttgcaaaagctccattttatatccgtacttttcaaaaacctttattatcagtttgaaatgtatgggcagcatgtcgggcaccagaatggtgtgcgttttacgcatttccgcggtaaattgtgcatgagttttttccattttcttttccttattcgatggcggcgagaagcgaccttaaacggattttaattgcgccgagattgcttatttcgtctattttgagttgagtgtatatttttccgcgcgattcgagtatggcgcgcacttcgtcggtagtaattgcgtcgataccgcacccgaaagacacaagctggacgagattcatgtccttttgctccgctacgaacgcggcggcgcggtaaaggcgcgaatgatacgtccactgattaagtacccccaaagcgggagtatcggcaaaatcgcttaccgcgtcttcggaaacggaaaccacgcccaaagacgcaataagtttttgtacgccgtgattgatttcagggtcgatgtgatacggtcttcccgcaataacgactatgggcagattatgttcacgcgcgaaagcgataagctcctgtcctttctttaccacagccgaatggaattcctgcaatgcggcaaaacctttttccacggctttttccgcatcgctcggccttatcttatattcagccagacttttaacaagcgccgaaacaatgttctgcggtctgttcatgtctatgtatgggtatataaagttatctttgttaagctccgcagtgttggcgcgcaaaagctcgggataataagcgaccacgggacagttgtaatgattgtcgctgtgcccttcgtcgatattatagctttcgcagggatagaacacgaaatccacgcctttattcagcagattaagcacatggccgtgtacaagcttggcgggataacaaaccgtatcggacgggatggtgtgttgccccgacaaaaacagtttgcgcgaagactcgtcggatataacggtttcgaatcccagcgaatcgaaaaccgcgttccaaaaaggaagctgctcgtaaaaattaagacatagcggcaagcccacttttgccttgggtgacacggcggtgttttttattccgtttaccaaaaggtcgtacttgtaatcgtaaaggtcgggtaaaatatccgattcctttttcccctgccctttttcgcagcggttgcctgaaataagcttacgcccgtcggaaaacgtcagtacgtttaacgaacaatgcgcagtacagcggttgcagttggtgttgaatgacttgtaagaaaagttttcaagctgttcggggcttattatatccgatttgcccttgcttttctttttggcgtacaaagcggcgccgtaagcacccataagccccgcaatggcgggacggaccacttcaattccaagttccttttcgaaagcgcgcaagactgcgtcgttaagaaaagttccgccttgaaccactacgcgtttgccgagttcttcgggacttttggcgcgaatgactttgtaaatggcgttttttaccaccgacgaagatatccccgcggaaatatcgtccactcccgcgccgtccttttgcgcctgcttgacggagctgttcatgaacacggtgcaacgcgaacccaattcgacggggtgaagggcaaacagtcccaaagcggaaaattccgcgacgcccataccgagagcgttggcaaacgtctgtataaaagaaccgcagccggacgagcacgcttcgttaagcatgatattgtctatcgctttgttcttgattttgaaacacttgatatcctgaccgccgatgtcgatgatgaaatctacgtcgggacaaaattccagcgccgcggtaaagtgcgcaacggtttcgacaatgccgaaatcgagtttaagtcccgatttcagaagttcttccccgtagcccgttaccgccgaagacactatttgtattctgtcgcccatgagcgaataaagctctttcagtttatcggacacgacgtccaaaggccgtccgacgttttgagtgtaatggctgaaaagaattttgccattctcgctcagcagtaccattttcgtggtggtggaacctgcgtcaacgcccagatatgcgtttcccgagtatgttgcgatatcctgtctttccacgtcggctcgcgagtggcggcggacaaactcgtcgtattcttcatgcgaagcgaaaagcggtcgggaggaaaaaacgctttcattgggcttagagttgaatatcttgtccagaatgtctttggggtcttcccagtatgtatttcttgccgcgtaaagcgctgccccgtaagccatgaagcaaggcgcaaggtcgggaaaaaccgcgttttcggcactaagacccagagtcttggtaaaagcgttttgcaaagctttataaaaatgcaaaggaccgccgaggaacaaaactttgcctttaatctgcctgccctgcgcaagtcccgcgacggtctgatcgactaccgcctgaaaaatgcttgccgcaacgtcctcgagcgcggcgccctgattgagaagcggctgaatgtcgctttttgcgaaaactccgcaacgcgacgctattggataaacgttttttgccgccaaagcaagctcgtccagcttatcgcccgaaaccttgagaagcgtagccatctgatcgataaacgcacccgtgccgccggcgcaggagccgttcatccgctgttcggttccgccggtaagaaaaaggattttagcgtcttctccgcccagttccaccgcgcagtccgcgtcgggatacatattctttattgcaagcgaagcggcgtaaacttcctgtacgaaactcagtcccgcggccgtggacagtcccagccccgccgaacccgtcatagcgattttgaaactgccggaataaaaggaaaaaatacgtttcaactgttcgcaaaccgtttcctttaccttggaaaaatgcctgtcgtatacggaatgtactatatctcctttttcatcaagcagtatgcactttacggtagtggacccgacgtccacacccaccgtgtatttttgttccatagtagcaacctcgtttttcaatgaaccgtaaaaaatcacatgagccgttgccgaaaaaacagcggcaacttttatattacgtatttattataacatatcggaatcaaaatgaaaactgttttttgcctgccgaaaaagcccaaaacaagcggttttgagttaaaaacacacatttagcaacaaaaagccctataacgaattattaattcagtttttgtctttgccgcacggatacgccgaacaagcaggcaaagcgttgcggtttactaaatcgtaaaacctgtatccgcccgagaaattatagcagtcaaagccgttctgagttaaaatacggcaagcaagataacttctgagtcccgactggcacattacgtaaacgggttttgttttgtcgatttcattaagcctttctcttatttcgtcaagaggaatatttacaaagccttcagcgtgtccgcgcgcatattcgtaaggggtgcgcgcgtcgattttcactgcggaaagcggcaaagaaccgatatcttcgtaatggaattgtttgatttttcccgtaactatgttttcaatcataaaacccgcaacgttgacgggatcttttgccgaagaataaggcggcgcgtaagcaagctcgagctctttcaattctgctgcggtaagccctgcgcgcatggctgtggcaattacgtcaatgcgcttgtctacgccctcgcttcccgctatctgcgcgccgtaaattttaagcgaatccttatcgaacaatactttcatcgtcatgactttgccgccgggataatatccggcgtgacttaacggagaaagcacgactttatcgtaattctttcctgcggctttaagctgagattcgtttgcgcccacagacgccgccgtaagcgaaaacacttttattaccgatgttcccaacgagccgtcatacttgctgtttccgccggcaatattgtccgccgctatcctcgcctgtttattggcaggacccgccaaagaaataagagcgcgtgttcttaaagcaagattttccacttcaacggcgtcgcccacggcataaacgtcgggcgcagaggtttccattttttcgtttaccgctatactgcccttaatacccgtcctgattcccgctgccgaggcaagtgaagcatcgggagcaactcccgccgccagcaccaccatatcggtgtcaaaaattctgccgtccgcggttttcacagtcagcgcgtcgcctttttccgaaatggattttaccgcggttttcagcatcagttccactccgccgcgacgcatttcggcatgcaatatgcttgccatgtctttgtcaaacgggccgagaatatggtccgcaaactcaaccacaacggttttaacgccgcgcgcggcaagattttcggcaatctccagtcctataaatccgccgcctatcactgttgcgcgcgagggcttttgtttatccgcgaatgctttgattttaacggtgtcttccaagatgcgcaaagtaaacactctttctccgtccgcgccctctattcccgggttgacgggacgcgctcccggcgacagcagaagtttatcgtaactttcggtaaaagtcgcacccgtttcaagattacgcacgtctaccgtttttgccgcggtatcgatttttacaacctcgtggtgaacgcgcacgtctatacggtaacggctgaaaaaaccttcgggcgactgtaaagtaagctgctcgaaatcctcgatgactccacccacataatacggcaatccgcagttggcgtaggaaacgtaaccgcttttttcaaaaactatgatttccgctttttcgtcaagccttctcaatcgcgccgccgcggtagcgccgcccgcaacgccgcccacaattacaactttcataaatttatctcctttaaactgttcaggtttcttcggcaactgtaatcgctgatactattttgattatattttatttttttaagacaaaatgttggtgccgaagcaagaagtactttttttacacatcattagacaaacgggtgctaagctttccaagatgcacatcatacccttccttgacaagcgtaaatttaccgtccttaaacaaaagctcggtaaccgaggcattcgaaacccaaggtatttcgcccagctttttcaaaggcaattctttagccatacacataatcgcccttaccggcatggcgtgcgtaaacacaagtatgttttctccgtcgtgctctaaagcaagctccttgagttttcgggttactctttcgtagagttccttaacgctttcgccgttgtcggcgcgggcggaagctatgtcgtttttccaaaccgaataggtttcgggataaagatttataaggtcgtgatacggttttttctcccaatcgccgccgaaaatctctcggaatgcgggctcgggcacggctttaagattatgtattttttcactgggagcagcggtctgacgcgcacgcatcaagtcgcttgtataaattgcagaaaactttacgtccttaagatattccgccgtaagttccgcttgtttaactcccaaatccgtcaaagggacgtccgttcttccgataaatgcgtctattttgttgccttcgctttctccgtggcgcacaacgtatacatgtgtcattttgatatcctccgatatgattataccatttacttcacataaaggtcaaactaccgtatatgaaattaaagctaaattaaaaaaacactattgacattctttaatttttataatattattatacttagagtatgattttttaaataaatatttttttaaggaggagttatgaagaggattataggactttttattgttcttatttttgtcgttgtcccgctttcaatcatgatgacgggttgcggcgacgcagagcccaaagaggatcccaacctttcttttacgcttaacgaaagcgaaacgggatataacgtaagaggcaaaagcgatgttaaaaccacggttacggaaattaccattcccgccgaatacgagggaaaacccgttattgcaatttccgcaaaagcttttaacggctttaccgctttaaccaaaataacaatccccgacagcgtgacaagtatcttaagcagtgcttttgaaaactgccgtgctttgacaagcgtcactattcccgacagcgtgacaagcctgggcaaaacctcctttaaaaattgcaccgctctttcgtccgtagtcataggttccggaattaaaaccataagcgaaaacgctttcgaaggctgcaaggcgcttacttccgtcacttttcccgcagaactagaagaaatcggcaacaacgcctttctctcctgttcggctcttccgtcggtaaaatttcccgaaggactgctgaatataggcagttacgctttttcgctgtgttcatcgcttacggaaataaaacttcccgcaagcttaacttggataggagattttgcgttcggtcagaataacggcaaccaataccccggcaatctcataaaagcctacttctacggccccatgccaaacggaattaaccagtctttcggttatacgtgggatgccgaaggattcagagtttacgttcccgcacaatattatgaggattacagaaccgccgacgccgccgattggcaaagatgcgtcgtcgcctttgaccttttggaaacttttgactcggcagaagttccttacaacggctgaattacacatataaaacacgcaaaaacacaaatgtttacgcacactttcttaaaaaatagttttgttgtgatttaattataaaatatagtcgaaatattttcaattaataaaaaatcaaattaaaaaggcttttccttattaaaagaaaagccttttcagatatagcgaaaattatttaatgaacgccgcgaatgccttgtaagtggaatagacgtcggctttggaaacaagttcgtaaggcgcgtgcatggatatgacgggaactccgaggtctacggtgtcgatgttgagttttgcaatatatttggcaaccgttccgccgccgcccatgtcgactttgcccaattcggaggtctgccagcagatattgttttccgcaaacagttttcttatctcgcccacgaattccgccgacgcgtcgttggaaccgccttttccgcccgaacccgtaaacttgcacattgccgtgccgcaggaaattatcgccgagttgcgcttttcgtaaacggatgcgaaattggggtcatagcaggaagtaacgtcggacgaaagacatttggacgccgcgcgtaccgccgcggggtctatggagaactgtgcggaaacggcgttaatgatatcttcgaacacactgcactgcatgcccgtattgccttcgcttccgatttcttccttgtcgacaaggattgcaagcaccgtcctgtcttcggttgtatcgtctaaaagcgcggtaagcgcaggataagcgcaaaccctgtcgtcgtgaccgtaggcgcctataagagccctgtcaaagcccacgtcgcgcgcaggaaaagcgggaacggcggcaagctccgcacttaaaaagtcctcttctttcatgccgtacttatcggaaagaattttcagcacggttaattttatcttttccttgacgtcctcgtcgcagtaaggaagtccgcccacaactatattgaggtcttcgccgccgatggccttgttcatgggttgggtcacctgctctcttcccagatgcggaagaaggtcgttgatgtaaaaaacgggttcgtcaggattttcgcccacgcggatttcgacgcgactgccgtcggcaagcactacaactccgtgcagcgcaagcggtatcgtagtccactgatatttttttatgccgccgtagtaatgcgtcttaagaaggcaaaaaccgctgtcctcgtaaagcggattctgttttaaatcaagacgcggactgtcgatatgcgccgctacaatgcgaataccgtctttagtcaagtcgtttttacccacttttaataaagcaacgcttttatcgcgattgttgtaatagcgtttgtcgccgaccttcagcttgtcgcccaggctgtatggcttgtaaccctttgcttccgccattttaatcgcataagccactgcctcacgttcggttttggcaccgtccagaaactttttgtatccttcgctgtaatcgtacatttctttgatttctttctcggaagaaatctcgaaaaaattctttttcttataggacaggctttccataagcttctggcccttactctttttttcgtccattattctctccttttttcatcgggaaaagcccgaaaaaactaatttcggaataagtatattctttatttgaaaattagtcaagcggaatacgcgttccttacgcgaaagacaaaattgcaaaaggcaaaattaaggttttttgcgcaaaaaaatgccgaattttaaccttaaaaaaattttaagactttattttgtggtttttttacataaaaaaacggacggctgtttatgccgtccgattatattaattatttaatcgtcatcatccaaagacgcggccgcctccgattcggcttgagaaacgcaagttgtggcttcgggatatgcgcttaaaggaaaagaaccctcaaacggagcaaaatccgttttgattttcgtttcggcatttaagacaggtttagaatcgcaaacaaacgacggcttatacggggcaaaatctttcttttccggatttttgccgagtatataatcaaacggaactcctgtttccgattcaagtttttccacaaaacttttgtcgtaaaatttactgcggtctatcgacttccactttgcacggaaaagaaatcctgcggttatacccaacgcgtagataatcataaaaagcggaaacgaaattatcgcgggtaaagtttttctgagcggagtgcctatctttttcctgtcaagaaaaaataccagaaacgcctgagctatgaacggtatcaaaaaagcgcagacaagtattatgacgagatttgtaatttcccacacaaaccgcgcgtgatccaaaggttccagaaactgaccgaaaagtattatgtaataggcaggaaaccaaaagcagcacagtcccgcgatggggataaacaaaagcgtgagaaacatatcgagaaacgtatacttaaacgtcacgggaaataaagcaaggcattttattccgtgggtgaaaaacagccttaaaagtcccctccccatacgcatattgcgtttgaaaagctgtcctaccgtcgaaggctggtcctcgtaaaccacggcttcggacacgtaatgagctttacgttttttaaaaagctgattacaggtaaactcggcgtcctcgctgtagcccatggctttccagccgccgtcttcacggataacggacacggaaaacatcattccgccgcccacaagcatctcgcctattctcagcgcggaacgggcatgacaattaaaccggcagtcgcgaatataccaaaggcccgaaacgcccgcaactacgttttgggtaaggttggtcgcgtgattgtatccgcgcgcaagcgtcgcccccgaatcgaaagcgtcgttcattttgtctatgtaatcgggaagcggaaaattatccgcatcgaagagaataacggattcggcgtcgggaaaatcttcaagcatcctgttcagtccgaacttgagggcaaacgacttgccctgttttttagggtcgctttcctgccttatataaaccgtggcgcctgcttgccgcgcgattgacgcagtttcgtcagtgcagttgtcggcaactacgaaaatcctgtaaagttcacgcgggtacttctgaagcattaggtttcttaccgttgcgcctataacttcgccttcgttgtgcgcgcagaccaaaactgcaaacttatgtttgactttagccttcggatattgttcgggcttaagaaaaaacaggaaaagatatattacctgaaaagcaaacgcaaccgaaactatacctataactacattgttaatcgtttcaagaacggccattataaaaaaacacacctcgcgttgaagtcgctgctacacaacaagtataaaacatcggacgcaaaaaagcaaccgtaatctgcttgaaatacatgtaaattaacggcataaaagaaaagttttccaataaatgcgtatttaatgtgaaacaaaagcaacaagtataaattaaaccgccgtttttaatgcaattttactttttcacgctgtctcaatcacaaaaaaatgccgcgaaaaaggcattcccttatcgcggcaaaacaaatttatggaaattcaaaaactataactgcgcaagtcacatgctttctttaagaacggttaaaacgtcttcttttgtcaggactttatatccgcccgtattgataagcgtgctgtccactatcccttccagcatatcttgagtaacgcctaaatccgaaatcttcatgacaagtcccaaacggttcatccacttttccatttcgcaaagcccctcctcggcaacctgaaggtcggacttgttttgcgcgtttacgccccatacgttgacggcaaagcgtttgaattttttcaatccgtaaggcataatcaaacggtaatacgcaagcgacaccgaagaaagcgtcatgccgtgagtggcgtttgtatgcgcgccgatagcctgtcctatcatgtgcacttcccaatcggtttcctttcccatggcgacaagagtgttaagtgcccatgttgcggtccacataatattgcttcttgcctcgtaattcaaaggattttccaccgaatcaacggaacttttaatcagcgagcgcataagcccttccgaaatataatcggacgtgttgtcgtcgtcccctgaaaaatactgttccataatgtgcgacattatatcgaaaaatccggcaatcatctggtaacgcggaatagttaaagtaaattcgggattgagaattgaaaacttaggaaaaacgttatcgccgaaaacgtggccgattttcagtttttgcgcataattggttatgacggacccgccgttcatttcgctgccggtacccaccattgtaagcacgcacccgacgggtataatttcgttgtcgacgtcttcgaatctgataaaatatttatcccacgcatcttccttgcaataaaccgaaaccgaaacggcttttgcgtaatcgcataccgagcctccgcccacggcaagaataaggtcggcttttgctttttttgcgcgctctataccctcgtacagtttttccacggtgggattgggcatgactcctgcgtcctcaaaaatctctttgccgtttttcttaagcaatttcacgactttatcgtaaatgccgtttttctttatcgagccgccgccgtaaacgagaagaacgtttttcccgtatttgggaagttctttatcaagcccgttaagcgcgtccttgccgaaatacagtcttgtagggttgctatatgtaaaatctcccaacataaaaacagaatcctccttaattataaaaaattatattaaacgcttttacccatttcgtaggcttcaaaaactgcgtcttttccttttatatcgcctgctttttccacgcccgtgccgtaaacaacgcccgcgacggaaactccctcgaaacaatccgtccaacctttgacggctgttatcgcgccttccatagcgcttttgtcgtcctcggcggaggcggcaagcaaataaacttttccgaacctgtttttgcgcgcgtataaaggattaagcctgtccataaaagttttaagctgtccgcttacgctgtagtaataaacgggcgtcgcaaacacaagaacgtccgagttttgaaccgtatcgtaaagcccgttcataaaatcgtcgattacgcacctttttccgtccgcgcagcacatacagcccgtgcagaatttaagattattttcacgaagattgattttcaccgcttcgttaccgccgtcaattacgcccttataaaaagactccgcaagaatatcggaattcccgttttttcttggagaggacgatactatgaaaacctttttactcattgctattgtctccttcgattttttttatgactttagccggcactcccgccgcaacggtatttgcaggcacgtcctttgttaccacagcgcccgccgctattatgctgttgtcgccaacggttactcccggcaatatggtcgcatgggaacctatccagacgttattgcctattttcacgggtttaggcgtcatatccgcacggcgcaacgggtccgcaaggtgattgagagtggctatgacaacctgatgtcctataagcacgttgtcgcctatctccaggccgccctggtcctgaaaacagcatgccgaatttatgaaaacgtttttgccgacagttatgtttttgccgcaatcggtataaaaaggcggaaaaagcctgaacgagctgtcgactttacggcccgtcagctttgaaaagagttttaccgtctttaagggcgaattgttgcccgcgtttattttacgggttaacttttgcgcacgtgcggcaaatccgtgcatcaaagcatgaatttccgaaccagcgcatatcgtttttctttccgatacgtaatcaaaaaattttttatcgttttctttcataacaaatacctacttgattatgatatatcggaaaaaacgttttgtcaaacgcaaaaagataagttcggaaaaaaccgatttaagactgcgaaaaaaaatcaacacggaaaatgcttcgtgccgtcttttcagcagtcaaaatgtttgaataggatttttaagtgctttccgttatttatttttttcttattgagatttttgcgcgcgttgtgtattttgaatcggacgtatgtatgatttcccctatttcgtcggcgattattctgccttttcgcggattttttacggacgttatgccgccttttacttccgcgtccacatcgctgtattcaaacgcaaggtcacagttttccatggtgcaatccacaagcttcaggtttttgcagtagcagaaaggttgcgttcccttgatgtggcaacgcaacagagtcagtccttccgaataccagccgatgtactcgccgtccagcacgcaattttccgccgtgacgttttttgcgtgccagaacgcgtccttggtgtttagaacggaatttttgattataacgttttttacgtactgaaaagaatatttaccgttgaagttcaacttatctataaaaacgttacggctttccaaaaaggcgtattccgaatcgagagtaacgtctttcagtccgagtccggagcttttccagccgaactcgggcgagtgtatttcgcagtttttgatactgacgtttttacactccctcagtgcttttataccgttaagcttactgtcggaaattatcgcgtccttgtcgtaccaaagagctgcgcggcagttttcggtcatttcgcaattttccaatttcagacttttgccgtgccataacggatatctcaaatcgaaaaaacaatttttaaccgatattgcgcggctttctttcaaagccgattcgccgtcctcttctccttcgaagcggcaattttcgacaaccgtgttttcaatgccgtataaagcccgctccgatccgtatcttttgtttgaaatgatgcccatatccgtcacctttgtttgtagttaaattaaaatgcgtaaagcaaattgtttatcagaattttaaaaggttataaaggtcaaatatcaaaaaccgaatttccgcaccgggacggcattaaaacaattcggcattactgtttgcggcgtctttttctcacgataaaaaacacaacagcgcccataacggcaacagccgcaattaccgataacacaataaccaaagtttgaactccgttgttttcgggttgttgtggagtttcttccgtgtccgaaggagtttcgtcgggggtttcgtcaggattctcatcgggaatttcaggcttttcatcgggttcttccggcacggtctgagcggcatcgtattccgattttgtaaacactctgtccatgttatttttaccttccgttacagaaaaaccgatttcttcttcggtaaaagcgttttcgataccgtttatgcttacgcttaacgcggacgaaatttctttccattgcgcactgtaataattttgcatatcgaattgagaatgatattgctttataagacttacggcgtattctttggcttttgcaaaggcagaatttttatcaagcgtactcaatacctcttccgatacgtaagctttttgctccgcggtcaacgtatcgtaatctttggttattgaatcgaataaagaccaggctgaaaatttaatttcgtttttgggtaataaacaggcatcctccgcgcggacaatccaatcggacgcgcttaaaaaaacattaattcgcgctaaatccgaagaaagctcgctgcctgcaagcgctgccgtctgttctttgcatgttgaatccgtaagcgtcgaatagtccataagtttattcaattcggctttttcagccgcttcaattgctgcggctaaagcaagtttacccgaacctaaagataacggagggttataaacgccgctgagccttgacgaaaattcgtttctccaccccgaaacaatttcgtccactctgtcctcaagtgtaggaacgtttttaagcgcctgacggcaagtttctacttccgcccgcattttctgttcgtttttacctgcttcttttaacttttgcaatgatgaattataagaagaaaacagtttgtcccagtcttcggcaacgtattgcaccgaagaatattcttcaaatatattttgaatttgcaggacgtaaggttttgctatttcctcggccgtaagctcccaaacggcgtaaagaattacggtttcgccctcggcaaaagcaagattaagcactgcctgtcggtcggtaaaagcgacttttccgtcggaagtataagcccaaccgataaaatcgtatttaggacgcgcgaataagttttcgggaagaggcatcgattgcccgtattttaaggtaatctgttccatttcgcccgatgcgtccgaagcgtttgaatcgaatttcaggttataggaaacggcttcccactgcgcgtaaagcgttactttgtcgccgttgtattttttacccgcaaggttgattacgctttcgcccgcggaataaatttcagaaggattgtaagcgtcagtcccccacccgatgaaggtataaccttttttaacgggaatattgtctggcaaggcagtttccaggtcgtaataagtaactacagacgaaggaagtccgctgccgccgtttccctcaaaatttacggtatatttgttgggtacccttttgccgtaaagagtctgaccttgcgcagtaacgtctgaagttataggctgagtgtaaagctcgtcggcataccattccatattttcataaccggcaatgggatcctgttcggcaaaatcgtcgtaataaaccgtaaacccgtcaattacaggcaaaataatttctcttacgtcgttgttacgcaccacaaagccgctgcctttaagattaaggtttttactcatgtccagtttggtaagcttattatggtcgatatgcaaaaattcaagctcgctgagcccggtaacgtcaatatccgtaatcagattgtcaaacgtttcgataaacttaagctttttatttgtgcttaaatcaagacttttaagcaagttgtgtctgctgtacaatgtggttaattccgtaagtcccgtaagatccagctccgaaagataattaaattcgcagaataaggtttctgctttacttaatccgtaaactttaagaagcgtcaaacggttataggaacagtttatataatttaattcggtgttatcggtaaggtctaaagacacaatttcatgattgggcactataagttgggtaattgcggtaaaacagctgattccctccaaactttttattcttaacccgtcggaaggcagaatataaactgaagttattgcgctgatttcctcccgggtaagtacgccgtctgcgcccgctccgcccagattggcagagtttaatatccagtttctgaaaaccgaatcgggaaaattttcttcacttacggtaacgtcgccttctttgcttgtaacgtccgcttcttgcgcataagcgtaatttgccgcattaatcttattagtcgcaatacgcccgtcactgttttctgcatacaccgcggctgataaaacaagacctgccgttaaagcgataagcaacaaaattaatcttaaaaatatgttatgccctgatgctttcatgtttttattttgctaccgaaagacataaacaatgcaagagtcttaaataaaacgattagaaaaattaaaaatcatattttcagcatttcggttttacgacatgggcaaacaaaatcggcattgttagtttaaaacgcttatttaccgcttattttgcttgagttacggcttatatacagcgtcggcaaagacgtttatgcgctttatcagctcgatttcttcagggtcgtaaggacggtgacttatgcggaaaaggtcgtgcatccatttagtcaaatcccactccttaggagcggttccgttttccacgctctgccacatggactcccacggctcgaacgtctggctttttcctgcgacaagaccccagcaataacagttgactttttccgccatcatcagcggatattgatcgaaaatactgttgttttgaatcctgttaagccattcggtattgaaaagcggacggttgtatttgtttttaagcactttgataagcgcagccgaccttgtaaatatgccgtaatcatggtaacttattacgtcgcttaagtcaagcgccgcttgctgtatttccccgcaatttcccgtaaaatacagctcgcctttttcaaaatcgatgtcgtaactccatatccccgcggtaagcggctgtattgggttttcattccttgccacggcgaacatctcccgcatggcgtcaagactcatggagccgcgcctgccgtttcccggttcgttaaaaatatccagaacgaccactctttcgtcgtcggcatagcgttttacgatttcctttgtcatggcgataagattcctgcgtccgtcgggttcgtctacaaaggggttatatcccgcttcgccgtaacttttatgcggagtgttttttacgccgccgtgataccctaagtcaagcggctgcgggccgtatactacgggtacaaaaagcgatttaggcgggcaacagtcgttgccgaaagacaacatggtttttatcccgcttttataagcaagctctattatcttttcaagacgcgccatatatccgtcgtgctggtcgcgccacacctcacacgaattgataagccgcatagtgttaaaccctatgcttgcggcaagagcaaactccgactccattaagggcaaatggtctgcaaatccgtattcctgaaaaatttccacactgttacggcaatcggcgggacggtaattgaacccccttaaccaaccttgttttttgctccagtcattggttttttcgacgctccacttatccataaatttttcctcctgcgattttttcgtcaatccgattgatttttgtcatgcggattgtcataaacatttataaattttactgtcctcataaacactgccgcttcacgttaaaatacgataaagccgtttttttcgattcgcccatggagtgatatttcaaatactcggtttcaacgttcttatcggcaagataatcccttatctttttcatttcaccgtcgtccgaattaaatccgtctataacgggtacgcgaacgattacacgcttatcggttttgattaacttttcaaagtttttaagtataataccgttgtcttttcccgtaaactttttgtggcggtcggcagatatacattttatgtcgtacaaaaacacgtcggcatacggcattaccgcttcgaaatattcataggggacgcaacccgcagtatctatggcaacggatatatttgcgtttttgcacatttttgcaacgctagccaaaaattcgggatacagcatacactcgccgcccgaaaacgttactccgcccccgcaagcgtcgtaaaaaagcttgtccttttttatttcatcgaaaatttcgtccatagacaaacttttgccgtatatttttcttgcgcccgttttacataccgatacgcaagcgccgcacaaaagacattcgttgtttcccttagggcacaccctggcgcaggcgccgcaccccgaacatttttccccaaaaaaagcaagctgaggaaacggcgacttgccttcggggttatgacaccacgcgcagtcaaggttgcaacccttgaaaaatactgtagtccttatcccggggccgtctactgtcgaacctcttacgatgtcgaatatcaaaggaactttcatttttcacaatccgaaagagcttaagctttagtaagcgtttccatttcttcgtcggttaattctatttcgcagccgctgagattttccgtaaaatgccgcgcgttagacgacgcaaaaagcggtatgaccgtaggataatctttgactcggtaaagatttaccatccatgcgacaaccaatgcgtttgccgatacacccttatccgcagccatctcggttaaagtatcgtaacggctacccagaacgtaatcgggggcaaatcttgatttatccgcatatccgccgcccgcaagacacgaatacgcgacaagcggcaatttacggtcgcaaagaaaacgtaatctttcgcgcgaagtgaactcgttatacttatatttaggtggacacgcagccgaagactgcaaataagaaaacctttgctgcattgcctgaaagcttacgaaaccgcgctcttttgcgacaagattggcgtccataaaacgccagacgtcgtaattgcttgcggcaatcacgcgcaccttgcccttttttacaagcgaatcgaacgcttccatggtttcttcaagcggcgtagtcggatcgtcggtgtgcgcgtaatagacgtcgacgtaatctgtgttcagtttcctgaggctttcgtctatccaatattcgatttgctcttttttaagcccctgccctttgccgtggcggtcgaatccgacttttgtggcgataatcagtttatccctgtttccgcgcaaacgaagccacttacccaaagtggtttcgctttcgtcgcccgtgcccagccaatgagcgtaattattggacgtatctataaaatttccgccaccctcgacaaatgcgtcaagcacctcaaaagaatttttttcgtcagtcgaagtgccgaaattcatggcgccgagacacacttcgcttactcttaatccgccgaaatctgtttgtttcaatttttcatcctcg

SEQ ID NO: 4307 - DNA, 14125 bp, Unknown
  16S sequences of unknown bacteria
acacgcccacatacgatacgggaaagccgtttttcgggcagaagccgtagagcggcgaaagcgtgagcgacgagattatcaccgcgcttctgtaggaggcggcaaaccatatcgacgaaacgaacgatgcgctccagaatacaaacgagccgagcgcgagcctcgatgccgagcggtaagcggcaagcacaagtatgctcgcccagccgaggacgtatatgaccgacaggatcagcatggtattctccgcaccgacctgcgccctgccgttcaggtatccgataaacgcttcggcgaacggatcgaacaggcaaaggcttcccgcaagcgtgagcacgaacggcgacatggacataaggatcactcgggagcgcactctgaaaagacgtgcggtgaaaaagatgcacaccgcggcgaacaccgccgagattgttatgaccgcgacgcagaaggcattgatgttttcgctcccggaatcgatgaagccgaaaaacggcatgaaagcaaacgccgccggagcggtgagatatttatataggaaggtttccgcaatgccgctcgacgcgataagagcggtcgccgaaaccgcgatcaccataatccaataaacgagcgaggcgataagcggggtgcgagtcttagaccgcacgccgagatatacgagccctccccaggtaagaatgtaaagtatcggaatgtaaatgtgtctccccgacgatatcgataccgccgcatagctccagaccgtaaatgcgcagacggtgagtgcgaccgtcataacccagatgagctttttcatggagatattcctttctttatcctttcgttacgaaataatgtgtattcctttcgtttttccgtttatcctcacgctacaccgggcgcggcgttctgctcagatcatcatccaccggacgtgccgcgcggtctcagtctccgccgccgagccacctttcgtagtagaacagatactgctgggcaactcccgcgtattctccgaatcgacggtagtcaagcccgtcgggaaagcgctttgccatgatcctcttcatccagacgtcgatcgggaacgcatcctttctcccgaatccgaagagaagcacgcacgcggacaccttcggtccgacgccctttatttttctgagctcggcatccgcatcctcatactgccgcagcccggcgatcttttcaagatcggtctcgcccgacgccacacgccgtgcggcatcatatatgtacggggctcggaatccgcagcgtagctcaaacagcccttcctcccccgcgccgaggattgcctcgggcgtcgggaaagaatatctgccgccgcctatatcttcgccgtacctttcgcaaagtgcggcgattatcttctttattctcggaatgttgttgttctgcgaaattataaacgagatcagcgtctcccacgggtcctgacgcagtatccttatccccgctccgtgatcgacggcactgttcataaacgcgcggtccctttcgctcccgagggacgtgcgtatcctttcgtctatcgtgccgtagtcctcgtcaagcgaaagaaagtgagtccagaacagcctgtccgtgccgtccgtgatctcaagtccgccgtccgtgcggcgaaagcgcgcgtaattcccgaaggcgacgccttcgaagcattcctcctcgccgggaacggggtcaaaacggaagcactggccgcagtcaaacgtctttgtcacggaaaagtttccgacattctctattatcataagaaaaacacctccgtttgcgggatacccgatcgcggcacttgaaatttgcgcagcgataatgtatactgtatactgtaaatgtgctcggacgcaccgaacgtccggaaaggaaaagtacatggaacagatttatacgatcccggtgaacgaggcgttcgaaaaatgcgcctccgggaacatcgatacgaacgtaagcgaatgccgatgcccgttctgcgagctttacggcaaatacgaggcggatgagctcgatctcatcctcggagctgcgatgatggagccggatatacgaaaaaaaacaaacgaaaagggcttttgccgtcctcatttcgacatgatgttcagatacggaaagaatctgccgcttgcgctgatccttgaatcccatctcgatgaggtgaggtcgaaggtgacctccggctctctttttgcatcggcttccgcggcgcgcagcgcaaaaaagctgaacgcgctcggcgaaagctgctacatatgcgatcgcctcaactacaatttcgaccgttccgtcgaatgtgcggtcatgctttggcagagcgacggcgaattccgccgcaagtttgcgatgagcccgtatttctgcctgccgcactacaccgcattcgtcacggcagcacgggagcgcatgtcgaagaaagaattttcgtcatttttcgcggatatatctcacatagagtcacggtatttcgacaagctctcctccgacgtgtcgctcttcgtgaagaagttcgactacagatacgaaaacgagccgtggggcgattccagagacagcacggagcgcgcgataaaattcctgacagcggacatccatcgcgacagcaccgaaaagaagccgtcgggcggtctgacctgacgtaccgtcctcgcagtgcggtcaatatcaaaattcacgacggggttggcacaaaatgccaacccccgcgcattatctgcgctccttctgcgccgcttgagagcggctgtcggggcgctttttctttttttcaagatttccggaagatgcgataagcaccgcaagcagcacaagccctacggtgaagaagatctccgcaccgatgataaacatcattataacgttatcggttgcgatgaacgaaagaagacttgaacgccctctcaggtacacgatcaccgagatcaggcacaggacagcaaggattcccgccgttacgcggaacgatgtcttttctccgagatatttcataatcgggttctccgtattcctgcggcttatcgctatatatccgccgagcttttcaccgacggttcctccatgaagtctgatcgcctcgccgagcacggttatgcggcgcttgttctttttcattaccgtgtcgaggtgatccgagaggaacagatcgagtatgctgtctcccgcatcgtaaagcgcgctcttttcgttcggatgatttcccgatgcctcgcacatcacgcacataaagattacgcatgccgtgaccttgtacaggatatcgtccggcgtctgctcgattatctcgtcgtcctcgtcgtattccggctcgctcgattcgattatcgcaaacagcttttcctctatgtcgcggcgcacgatcttcccgagctcaaggtacgactgaacgagcgcgcccgcagcgatccctcgcagatccccgtcgcggcttcccatcggaatggtcacgctgagattatctcttaccgcacggcgtgcgtctcccctcagcgagaagactatgctgagcgcgtcctcaaatctggatttatccatgagcgagcttatccttgtgcaaagcgccatcacatcctgctcgctgaagctctgcttctgtgcgccgctttgcgcgtcggcacggcgcgccccatcgcgcggaaaacgagcgtttccgttctgtgcgttctgcgcacgtccggcgttctctttacccgcgccgttctgctttccgaaaagcccgtctacaagaacgtcgtcggtcgtctccgtccgcgttccgccgtcatatgaggaagcggcggtatcatcgggctcaaaatttttatccgtattatcaatcatcgaaaatgcctcccttttcgctttctcgggctgcagcgcagccctccgacataagcgcagttatctgcgccgtccgttctgcttcggctgcttgcccttgccgtacatcgcgcggcggaaaatgctcgctatgaccgcaaataccgaaataataacgggaactcccataaagaaggctatcgcctcaagcggagtcgtgaatcctttttttccgcccgaaatgttcgccgcggtatcgctctccgtaccgctttcggtcgcgctttcggtcgcgctttcggtatcggtcgggctctccgtgctttcggaatccctgtccgtcgtcacccttcccgaggtctgcgagcttgtaccgggattcggacgcggtgcctgagtcgtcgtgtcctcgggttccgccgtcgtcgtatccggctctatcgtcgcaggctcctttgtcgtggtatccggcttctcagtagtcgtatccggttttttcgtcgtcgtatcgtcttttttcgaggtgtccggcttctttgacgtgtccgggggatttgttgttgtatcgggtggagttgcggtcgtgtccggaggctcagtcgtatccgttgcgggagcatccgtcgttaccgccgggagatccgtctccggcggatcgcccggggcggcggcagacacggaatatacagccgcagacgacgcaatcaggactgccgaaataagtaccgaaattctgtgattcatacgaaaaaatttcctttctccgttcaaagcctccgcacggatttttcaaagctgcgcggaagaagtattttgaagagtgaagaagcggcgttcacggtgagcatacggttccgaccgccgcctacgttataatgtaaattaagaaatgcctttataattatagcccgatacagacgctttttctgcagtataatgttaaatctgcgcggcggcgcgcacaaacgcctgcgcccggcggcaaacgcgccgcccgcggtattatatgctcggctgagcgggttttattcctccgcaatctcctcgactgcgaaataccgctttctgatatgaaggaagaacaccgtgcaggtgataacggacacgatctcggctgcggggaacgcaaaccacaccgttccgacatcgccggtgcgtgaaaagataaacgcaaggggaagaagcaccgcgatctggcgtatgagggatatgcacatgctcttgaagccgtgaccgagggattggagcacggcggataccacgataccgtatcccgcgaacacatacgaaagcgatattatgcgcagtgcgcggcagccgacggtgagcatttcttcatcggcgttgaagagaagcagcagcttatcgggaatgacctgaaagacgataagtccgacgatcatcaccgcgaccgcatatattacggaaaggcgcacggtctttttcatgcggtcggggcgctgtgctccgtagttgaacgcaactatcgggatcatgccgtttgtcagtccgaacaccggcatgaaaacgaagctctgaagcttgaagtacgcgccgaaaacagagacgcaaactgatgaaaatccgataagtatgcggttcattccgtaggtcatgaccgagccgatcgagcccattatcgacgatgggataccgaccgcgaggatcgtccttatcgttccgatttccgggcgcgcgcctctgaagcgcattttcacctcatgattcaggcggtgattgagcacgaccgcaaagagcgcggcgatgcactgaccgatcaccgtagccgcggcggcacccgcaacacccatcggctcaaaggtgagtatgtcaccgatgccgggaagggttatctttccgaatatgaggatcgggtcgagaacgatgttgattatcgcgccgagcccctgcacaagcatggagagcacggtcctgcccgttccctgaagaagcttctctatgagaagctgagtgaacagtccgaaggaaaagacgcagacgatccacatatagtccctgccgtacgagatgatcgattcaatatcggtctggcttctcataaatgcctcggagaagaaaagtccgaccgcaaggaatatgagatacagaacaacatagacatacgcgccctgcaccgccgcatcgtttacccgttttgaatccccctgtccgagggaacgcgacagcagcgcattgacaccgacaccgatcccgacgccgaaagcgatcattaggttctgtatcgggaacaccatcgaaaccgccgaaagcgcatcctgattgatctgagcgacaaacatgctgtcaactacgttgtaaagagcctgaatgagcatagacacaaccataggcaggctcatcgtcaggagaagtcggttcacgggcatcgtgcccattttattctgtgaagtttgcattttgatctgttttttcctttactgcttttgctgattccgattaacgaggcagcgcacacggcctgcgggaatcccccgcctctgttatctgcgtattcaccgccggcacacacagatacgcagcgcttcgtccgtccgagctcagagtaccccgactccgggctctatgcagcaattctgctttgccgacacgatgtgattgcggcgaacgatcgcctgcttcgtgtttttcacgacaattccgtggtgcgcctcggggcactcgataatgttgtcctcgatcgtgacaagtccgtgcgccttggtggtgctgtcctcgcagtccatgcgcacataaactccgccgcattcggtaagacggcgtccgcagttgataaagcggcagcggcgcaccgtgacatccgccgtggagatgccctcatgccaccatgcctccgccgcgatcttgaccgcgcattcaaagacatccgacacggtgcagttttcgatcagcgcactgcggcactttatgagtattgaacgcgcgtaatgattgcgcgcgcggcagttcacgaattcgagcacgggaagctcgtcggggtccgcgataaaataatcgtcgaggtcatcgggaagcgcgcggtcaagcacgacatcgcagaagaatccttcaaaatcgggacggcaatcgacgacgcggtattcgccgacgctgagaagcgtctttttatcggtaagctcaagcttgtccccgatctcgggataatcgagcgactgcgcgtgcgttcccgtcggtgccttgatctgaagacggcagcgctctccctcatgggagatcacggtatagtaatatgtgtgcacgttgatcgaatcgtcgccctgaccctcgaactcgcagccgtcaagacgaagaagtccgcggcaggatgcaaaatgcgtcgcatctgtattcgtcgagatatggtctccgacggagggaattaccctcagacgctcgatgaggatgttctccgccttctgtccgacgatacccatgccgggttggctgtgtatcgtcacgtcgcgaagcacggtgtcctttgcgttctcgataagtatcgcagggcgcgaatggaacgagtgccacaggtaaagctcgtttccgacaaagcttttgtcggagcgctcaaggacgaaacgcgcgcggtgatcgtcgatataggtgaacgatcttattccgaaatccttgccgaagcgctccctatcgggcacataggtgcaatatcggggatagattatatcgggattgatggggaagttttcggggaagtcaacgaggatctccgccgtattctcgtcgcggtccagcgtcgtccacgaaatgatccttcctttggtgtacggctttctcacatggtcgatcgtaagaccgacgatctcaactccggagcagtcgcgcacggacacgggctccatgaaaccgtcgatcataagcgtcacgccgtccgcgataatgcggctgcttatgtgtccgctgaaatcaagtccgcggtcgtagcgaaaatccggcttgaacatcactttctccggatttgtgccgaatttgcccgttatcgcgttgttcatcgtctccctcgcaagaggagtggttatcacatattctcccggctcgacgaaaagcgtcattccggggcgctctctcatatacgaaagcgctgcggcaaagcgttctctgtcgtccgctcctttaaactgcgaaagctttatctcgttcatgttccgtatgctccttaattcattttccgtacctgccgcacatcagagcgctacactccccgctcctcggcggcagcgcgcccccggcagcacggttttatttttccccgcccggatttgacatccgtccgtcgcggagatacacgggcgaaagatatttcgcctcgaatttttctttatccgacgcgccgttccatgcgtcgatcgcggcaaagcatgctcccgatgccgtctgtgaaattctcatgcacggggacagcgcgggagaatgcagtccgcattcgtgcgccgcacgggaaagcgcctccgccgcatctccgacgaagtacaccgtctgtccgtactgcccgagcagagcgcaaagctccccgatcgggattatcgtatcctcgaaaagacgcacgggcttttcgccgcgcacgtcgaacgccgccgcatagacgttgccccgtctcgcatccgtgaccggaacgcatattccgtcagcccccgccgcggtatacgctgccgcttcaagcgcggataccccgacacacgggatccggcgcggctcgcacagtccttttgcgcttgacaccccgatcctcactcccgtgaaggagccgggacccgtcgtgcatgcgacgagcgatatttcgtcaaccgtcaccgacgacgcgccgagcacgttctttatcatcgggagaatcgtctccgaatgggtatgcccggcattcagcgtaaacgatgctgccaaagtcccgtttttcacgagcgcagccgaggcaaaagccgaggacgtatctattccgagcaccgtcatttccttatccgcaccgttcatcgaaagctttcacctttctttttcatctccggaatcgccgccgtccgcgtcggcgatatcctcgattccctccgccgtgatctcgcgttcgttttccccgatgcggcggatgtacacctttaccgcgttttcgggaaggtcgtctccgagcttatccggccattccgcaatgcagatgcccgacgagacatactcgtcgaagccgagcgaatcaagctcctcgggagaggaaaggcggtagaggtcgaagtggaaaagcggaatctccccgcgcctgtactcgttcaccacggtataagtcgggcttttcacgcggcttccgggtgagatgaccgaggcaaacccgcgcacaaacgcggtcttacccgcgcccatttcgccgtaaagtgcgacaaacgacgtttttttgtcgagaagagatgcgatatacgcgccgagcgcttcggtctcgtccgccgattttgtaatctttgtcataggatcaccgttttttctgataaagccgcaatctgcagcatacatatttagtatagcatatcgaaaggcaaagttcaacataaaaatcgcctgtgcggcaaaatcatgtgcatcaggcatcacggagggctgcttatgaccttaaaaagcgcgatccccggaagaatgtacacggcagacgccgtatcatgcgacaagagtgcgaaaatgaggctcgcctccgtcggcatcgtcccggggtcggcgatctttctcctgcggagaagccgcggcggcactgcggaaatttacgtccggtcgtcgcgcattgcgatcggcgcacgcctcgcctccgccgtattccttcgcccggcatcccctccgtccgacgaacggtgcgtctccgcatcatgccccggcacgcccccgcgcccgcagggagcgggagcaggactgcgcaagtccgccgaaggaggtcggaaaagatgaaaagctcacgatgtgcggactgccgcagcctccggtgcggcggcaccgggtgccggggcatgcgcaagccggaagccgggaggacggcggatttttcggcggcgctcgcggggaatccgaactgcggcaaaaccacgctgttcaacgcgctcaccggcgggcggatgcgcacgggaaattggcccggcgtgaccgtcgagcggcgggacggactttttcgcggggacggcttcacggcggcgatatgcgatcttccggggatatacgacattcgttcgcctctcgcggaggaaaaggcggcgcgtgaattcatagccggagacgaatgtgacgtgatcatcaacatagcggacgccgcatctcttgaacgaagtcttttcctcacgctaaatctgctttcgctcggcaagggcatgattctcgcggtaaacatgacggacacgcttaaaaaacgcggcttgtcactcgactgccgccgtctttcggctcttctcgggatcccggtgatcccgatctgcgcgctttcgggggacgggctcggtctgctcacggaggcggcgcggcgcgaagcacggagcgtgtctccgcctcccgcgcgtactttcgccgacgacgcggaagcgtacgctttcatatcatcaattctcgatcagtgcctgtcgggtgaggacagcgcgaaagcgcgcacagaccgtgccgaccgtgtgctctgccatcccgtactcgggagggtattcttcatcctgataatgtcggcggtattcgcgctcacctttcttctcggggatcgcgcaaaatcgcttctcgccgcgttgttcgccgctctctccgaactaatccgcgccgtctgcggcgggggtacgggcgtatttactgtcgatctcgtctgcgacgggataatcccgggagtcggtgcggcggcgtccttctttccggtgctgttcattcttttctttcttctcgggatacttgaagactgcgggtacatggcacgctgcgcatacctttcggactctctcatgcagaaatgcgcgctttccggaagggaattcattgtgcttcttctcggattcggctgcaccgtcggcgcggtcgcgtcatcgcgcaccgcaggcagcgaacgcggacggcggcggctgatcctcgctctgccgtatatctcatgcagtgcgcgccttcctgtcctcgcggtattttcatccgcctttttcgggaaatacgcatggttcgccgtaatcgcgctctaccttctcgggatatgcgtgtcccttgccgtgctgcgtctcagttcgggcataagaggcggcgacgctcttctgatcgagatgccggactaccgcatgccgatcgtgcgaaacgtgtttcgcacggcgctgcgccgctcgggggcgtacgtcgggaaagcaggcagtgtaatcctcgccgcgtccgcactcctgtggttcattctgaatttcggcgcgggcgggcgcgccgcctccgccgaagaaagcttcggcggagcgatcggcacacttctctctcctctgctctgcggagcggggctcggattttggcagattacgcttgcgcttgccgcgggattcttcgcaaaggagatcgtcgtctcgtcctgcgccgtgatattcggtctgtgcgaagtctcacccgcctccctcgccgccgcgctcggcagcatcggattcacgacggcaaatgcggcggctgcggtcgtctttattctcctttatccgccgtgcgtgtcctgctgtgcggcgatattctccgaaacgtcgtcggcaaagctcacgttcggcgtgtgcgcgctcagccttgccatagcttacggcgccgcggcgctgacgcacgcactgttctcgctttttgcatgacgcgcggtctgcgcacaaaaaaggacggcgaaaattcgccgtccagcaaaatcaggcaagcacctgaacgagtatcatataaacaaccgttcctccgccgaccgaaagaagggtattgcgccgccaaaggtggagcacgcagatcaccgcaaccgcaattatctccgccgcgccgtgatatccggagataaaatccacattgcgcaggcagtacacgacaagcgtggcgatgatcgccggcggcagtatcctgccgagataatcgaccgtctgcgggatcttccgcttgccgaaggcggcaaaggggatgactctcgtaagaaacgtcgcagcggcggcgaccgccactataagtaccgaattccagaaggaagcgtgcattttttattcctcgatttttattttcattttgctacacggtttattccggcggcagcgcgcggtccgtacctcacagatcggacgcgccacgcgaaatttcacgaaaaactctcaaaatccctctccggagcgattttgcgcatgatctcgtttgagcgtcacatcccgcccgagcgctccgccgccttttcgagcggctttttcagcgccagcaggacaagcacggtaagcacaagcgacgggaggataaacgaatccgcgccgaacacgatcaggcagagcactgcgcatgcggcgccgcagtacacggggatatggcttttcgcgctcttccactgttcgaggagaatgatgacgaaaagcgcggtcatcgaaaaatctattcccttgaagtcgaacggaatgagcgcacccgccgcggcgccgatcaccgatcccacaatccaatagatatgatcgagcagcgctatgtaaaacatgcactgcccattatcgacatacgcagggtattccgtcgagcagaggacggaatacgtctcgtccgtcagggagaaaatcatatacggatacgccctccccgtttcgcggaatttttcgataaacgtcaaaccgtagaatatgtggcggctgttcacgaaaaacgacattgcaaacaccgttgcgagagactcggcggatgcgagcagcgacacaagcagaaactcgccgctccccgcgtaaaccgtcagactgcagaaaaaagcccaggcgggggcgtaccctgcctgaactatcattatcccgaaagccgctccgaggaagagatacccgaaaagcaccggaagcgacttcagaaaagcatatttgagcgtaccgtaattcttcatttgacgccttccacgccgctcagtcacgggcgaccgtcagtttgattataagatcaatatcgtcggcctgtccttcgccgccgagcgccgcgcggcatcttctcaccgcaccgcagcgcgtgcatctgtgggttattatgtatccgcggcggctgtcgggctccgccgagatcggctccatgtctccgccgcactccgacgcgcggtccccggggttttcatcaaggtgacgcgaccaaaggcagtacgggcagtgatttctcgacgaatatccgagaggagaaatctcgcgtccgcaatgggtacagacgaatccggaatcgtttttcgcaaatcttttcgtttccactttttatccgagaagccccttcgcaagcgcggacgcttccttccagcttccgctcacgcagaatatgacggtgccgccgttcgactctataaccgcattttcaagcttcggaacatcgtcgggcttgtaggttgcaaaagcctgcgtgcgctccttcacgcgctcggcgagaagcgacttcacgctctgcgcatccgcgtcggactgcacggtaaacaccgcaagctcctccgcactcgcgccgcccgccgcgtatgcgatgcatttcgtcccctcaggaagcccctgatacataaattcgaccgcttcgggctcgacatactcgatggcgattccgaattccacgccgtttttcattttatcgcaaatctcctcggcactcagcgtttcgcggggcgaggtctgcgccggattctccgtcggagcggcagtgctttcaccgccgtcaccgccgtttttgcaggacacaaacgagccgagcgcgcagagtgcgagcgtcaggcaaagaaaagcttttatatttttcataaaaatctccgttccgccgcccggggcggcatgagttactcgcggcctcgttcggcgcggcttcggatatcgatatcattccgtgaatccttataagaatccgcggtgaaagcggcggcttcgccggctgcggctcatgcagattcatcccgtctcggtcgggtgccgtactctcccggcatatgccgcggcgaagcaagcattccttaaaaactctgccgccgtctccgatcacgcttcacggaaggtgcatcgggcaagcgcggtattttccgttgccgaaggggtgtgccgacaccggcgcaggtgcacttcggctcagcccatatgcgagagaatatagtcgagccaatgatcacagtacgcctttttcagatgaactccgtcgttagaggcatcggcgggaagaactccgccgt

SEQ ID NO: 4308 - DNA, 16728 bp, Unknown
  16S sequences of unknown bacteria
gctataggctccggattgcaggcgcagggacccccggccaccacaagcggagtgccattgcaacccctgccgcaaaggccgcatacagcgctaccgacgataccgacattccggtcatcttctgcgccgtaaacgatcccgtcgccgcaaagcttgttcagactgccgacgagcccggagacaaatgcaccggaacctccgacgttctcgaccttgaggctcaggtcaacatgataaaggcaatgcagtccgatgttaagaaaatcggtattctctacacctcttccgaagacaattccattgcaaaccttgcaagatttaaggaaatctgcgacgccaagggtatcgaggttgttccctccgccgttcagaatgcttccgatattccctctgccgccgacgagcttgcttcaaaggttgactgcatcaacaacttcaccgacaataacgttgtaaacaatctttcggttgtgctttcggctgccgacaaatataagattcccgtatacggttccgaggaggagcaggttaaaaacggctgcctcgcatcggtttccatcgactatgtcgctctcggaaaggtcaccggtcaaatgggcgttgatgttatcggcggcgaagatataaccaaaatggccgtgaaaaccataaccgatgccactccgattgtcaacaccgatgtgcttgaaactctcggaatgactcttcccgcagattatacaaacgctcagacagttaagagcaactgatttttaaggagattgccgaatgttgtcgattttaagctcagcagaggtttttatttcaagcggacttgttttttcgcttattgccatgggatattatatatcctatcatattcttgattttcccgatctgactgtggaaggaacctttctttcgggagctgtcaccttcggactgtgctgttatcacggcatgaacccctggatcggacttatcggagcctttgttgtggggtgctttttcggattcataaccggaattctcaacgtaaaactgaaaattcgcccgctgctttgcggaatacttgtttcgacaatgcttattaccgtcaatcttattgccacgtcggccggaattgtgggagattttacgggtcaggaaagctcgtccatctccttcggccgctcggttaaaacccttcacgactatttcttcggaaatctgattccctctaaggtcagcggcattgccgttcgcgatcttgttattttccttgtcattaccgttgttttaaagctgctgctcgacctttatcttaaaaccaagaacggacttttgctcagagcttcgggagacaatcagcaatatgtcaaaatgcttgccaaggacccgggcagaagcaaggttatcggtcttgccgtgggaaacggtcttgcggcgatttcgggagctctttacacgcatatcagcggaaacgtcagccaaagcatgggaataggcaccattgttatcggtcttgcctcgcttataatcggtctttcccttttcaagggcgtaaagttcttaaaacccaccacaaaggtgattttcggagcgataatttatcaggcatgtctgacggttgcccaaaagctcggtgttccgagcgcctataacaagctgattatggcgctgatattcacacttgcccttgttttaagcggcaaattcggaaaaaaaggaggtaattcccgtgttgaagttaaataatatcaaaacggtttttaacaaaggcacggttgacgaaaccaccctttttgacggatttaacctgaatgtcgataaaggcgaatttgtttcggtaatcggctcaaacggcagcggaaaaaccaccatgcttaaccttatttgcggctcgctttttcccgacggcggcagcgttgaattcgacggcaggaatataaccaaaatgcccgaatacaagcgtgcaagatttctcggccgagtttttcaggacccgaagcttggaacctgcgagggacttaccattcttgaaaatatgtcccttgccgacaacaagaacaaggcctataatctcctccccgccctcaacaaacggcgtttcgattattaccgaacgctgcttgaggaatgtgaactgggtcttgaaaaccgcatgaacgttcctgtgggaaatttaagcggcgggcagagacaggcgcttgccctcgtcattgccaacatgacaaaaatcgacatgcttattcttgacgagcatacggcggcccttgacccgaaatcctcggagataataatgaagcttaccgataagtttgtgaaaaaatccggaattacaaccatgatggtgacccacaatttgcgatttgcaatcgaatacggttcacggcttattatgatgcacgaaggacactgcgttcttgatttaaagggcgagcaaaaacaaaatgcctgcgttgacgacattttgaagcttttcaatgaaataagtattgaatcaggtaactgaaaaaattccggagttcggttttgcagccgaaaatccgggatttttttattcctccgacggtgatattccgagaattccgtcggcctgagccgaatcgataagctcgaccgacctgagatttttttgaataatgtcgttgcgcttttgagcgtcctcgattgttgagccggcctcgtcgatttttttctttgttttggcaagcagcagctcaaatttgtcatactgtgttctgaccgcgccgagcaccttccacacctcagaagcctttttgtcaagagcaatggtcctaaatcccacgcgcagcgtgtttaaaaaggcggttatggttgtggggccgcaaatcatgacgcggtatttattctgaatttcctcgcaaaggccggggcggcggagaacctcggcgtaaagaccttcggtggcgagaaacataatggcgaaatcggtggtttttggaacgtcgatatagaggtcggaaatggtttttgcttgatttttaaccgtttgttcaagggcttttgacgcagcctccatggcggctttgtcggcattttcggcggcgtcgcatattctaatgtagtcctcttgcgggaatttggagtcgataggcagccaaacaaattttccttcctcggttctcgaaggaatttttacggcaaattccacccgctttgtgtcgtttttggtggagacgttgcattcatactgctctttggtgagggtttgttcaagtatgttgccgagctgtacctcggcccatgttccgcgcgacttcacatttgtgagcactctttgcaaatccccgacgcttcccgcaagcttgtgcatttcgccgagagattcgtgaacgcttttaagctgttcgccaaccaccttaaagctgctgtcaaggcgctttgaaagggtgtctgtcagcttttcatcaacggttagccgcatttcctcaagctttttttcgttgctttgctgaagctttgaaacattttcggtcagcgtaacattcagcttatcgctttgtctgacgttcatttgctgcatttcgcggatgagctgattcatatccttgaggctgtcggccgtttccttgcggtttctttgaaattcatcggccacatagccttccatgtggcggaaattttgctcaagaccgtccgattttccgcttttgcggctgcctgcgagaatgattatttcaagaacaacaattattgccgcaagacaaagtaaaatataaagctccatttttgttaccgtactttcatttgatttgagaatattttatcacacggcggtgtttttgtaaacagcatgaaaaagctaagtcccgaaaatggtataaagaaacggaaggcttttaataaaaccttccgtgattgtgctcggtaaaattattttttaaatttcccgaaaaaagatttgcgctttttatagttttcgtccgaaagcgtcgctccgaattctttaagagcggacttttgtttcgaattcagatttctcggcacctcaagcacgattctgacatactgatcgcctctgaccgaggaatttatgcgggttattccctttccgcggagcttgaaaatgtctccgggctgcgttccctccgggatattatatttaacgtttccgtcaagggtgggaacggtcagctcgtcgccgagagcggcttgggtaaaggttatgggaaaatcacaccaaacgtcaaagcctctgcgctcgaaaatcggatggggacgaaccgaaacggtaatacgaagatcgccggccgggccgccgttatcccccgcgtgtccgccgccgcgaagcacaaaggtctgaccgtcgtcgataccggcgggaattttaatatcctcgcttctcgtgcggcgaacctttccctttcctccgcaggaacggcagggtttttctattatcttaccggttcctcggcattggtcgcaaactctctgagactgcattactccgaagggggtgcgctggcttacgttgatttgtcccgtgccgtggcagctcggacaggttttgggctgggagccggcctgggcgccgcttccgccgcaagtgtcgcacttctcgattcgtgtgacgtttatgtttttcttgcagccgaaggccgcctcctcaaaggaaatgaccacggtggcaccggcgtcctcccctcttctcggcgcattggggttgcgggttcgcgcgccgccgccgaaaaagctgctgaaaatatcaccgagatcgccgaaatcaacattgtatgaaccgccgccgtatccgcccgcaccgaagttggggtcgacacctgcgtgtccgaattggtcgtatttagcctttttttcgctgtcggacagaacttcgtaggcttcgttgacctctttaaacttttcctcagcagtcttatcacccggatttaggtccgggtgatattttttggcctgctgacggtatgcttttttaatctgatcctccgacgcgcttcggtcgacgccgagcacctcgtaataatcgcgtttatccgccaagtttattcactccaaaatcggttagttctttttgtcgtcgtcggcgtccttataatcggcctcatagacgttggaatcgctgccctgagcgcctgttgctccgtcggcgggatttgcaccctgttgtgctgcggcggcctcctgagcggccttgtaaaccttttcggaaatcttgtaaatttcctgctggagagcttcggacgcggtcttgattttctcgatgtcgtcgcccttaagagcttccttagtttcgtcgattttagcctgtacggcggatttttcgctttcgtcaagcttgtcgcccatgtcggttatggtcttttcgcactgataaaccatctggtcggcattgtttcttacgtcaacgtcctcacgacgctttttgtcctcggcggcatactgctcggcttccttaactgccttgtcgatgtcgtccttggacatattggtgctggaggttatggtgatgtgctgctccttgcctgttcccttatcggtggccgaaacgtttacgataccgttggcgtcgatgtcgaaggtaacctcaatctgaggaattcctctgggtgcgggggcaattccgtcgagatggaaaacgccgagggttttgttgtcctttgcaaattcacgctcaccctggagaacatgaacctcaacagaggtctgtccgtcggcggcggtggagaaaatctgactctttttggtggggatggtggagtttctttcgattaccttggtgttgattccgcccatggtctcgataccgagagacagcggagtaacgtcgagcaaaagaagtcccttgacgtctccgccgagcacaccggcctgaagtgcggcgccgacagcaacgcactcatcgggatttatacccttgaagggttctttgccggtgaaattcttgattgcctcctgaacggcgggaatacgggtggaaccgcccacgagaagcaccttgtcaaggtttgaagccgaaaggccggagtcggaaagcgcctgctttacgggacccatggtggcctccacaagatctgcggtcagttcgttgaattttgcacgggtgagggttgcctcaaaatgcttggggccgttggcatcggcggtaataaagggaaggtttatgtcggtggaggtcatgcccgaaaggtcaatctttgccttttcggcagcctctttaatgcgctgcatggccattttatcgccggtaaggtcaatgccgttctgctgtttgaaggtttcgaccatccagtccataatgcgtttatcaaagtcatcgccgccgagacggttgttacctgcggtggcgagaacctcctgaacaccgtcgcccatttcgattatggacacatcgaatgtaccgccgccaaggtcgtataccattaccttttggtcggtttccttgtcgataccgtatgcaagagcggccgcggtgggctcgttgataatacgcttgacttcaaggcctgcgatcttacccgcgtccttggttgcctgacgctgagcgtcggtaaaatatgcgggaacggtgatgaccgcttcggtcaccttgtcgccgagatagctttcggcgtcgtttttaagcttttgaagaatgattgccgaaatttcctgaggagtgaagtcctttccgtcgatgttgaccttgcgggcggtgcccatgtctcttttaatggacgatatggtgcggtcgggattggtgattgcctgtcttttggcaacctgacccaccattctttcgccgtccttggaaaatgcaacgaccgaaggagtcgttcttgcgccttctgcgtttgcgataacaacgggctcgccgccttcgataaccgctacgcaagagtttgtagtaccgagatcaatacctatgatttttgccatttttatttcctccaaatcagattgtttattatattttgtgccgcgtattttcaccgtttggcattgaatgtattttatttgcagttagcaaccgaaaccatggcatggcggataaccttatcccccattttgtatccggtctgcataacctgcgccaccgtgttttctccgaggttttcgtcctcgacctgagcaacggcgtaatgtacctcggggtcaaaaaccgccttttcacactcgatttcttcaagcccgagcttgtcaagcgcatcggtaaaagatttgatgctgagttcgacgccctttttaaattcgtcagagctttgatcggcggccttcactctcataaaattgtcgagcgccggaagcagagattttataacctcggcacgggggtccacgccgatgcgctcggtttcccgctttgtacgctttttataattgtcatactcggcggcaagcctcaggtaaaggtctttctgttccttaagctcgttttccagcttttcgattttttcaagattttcatcggtcttttcggcctgctcggccttttgttcggttttctcggtttttgtctccttaaccgaatccgtttccttttcggtatgctgctttttttctttcaaaattcacacctcttaaatatttttcaaaagtattttttcgattgccgaagcaaaatattctatgctggggatatagtgaaaataatcaagccttgtggggccgattattgctatctttccaatcatgtgagagctgcccgcatatcctgccgaaatgatggctgcggacgaaagcgcctcttcgtcggtttcctcaccgataagtacctcggttttttcgcccactcttttaagtatctgagagagcgattcctttctgcttaaaaagccgagaatatttaaaagattttcctctgtcatgtctccgcggaaaagcagatttgtttctccctcaaagcggtattttatgtcgacaaaatcctgaaccgtcaggaaaaagccgttaagcaccgaggaaagggcaagcattttgtcaccgagcataggggcaagggtctgaacctgtgccggggtgatgttacaaagctttttgccggaaaacgccttgttgattacctttacgaaaagatcggcgtcgtcggatgttatgcttacatcgcaatggcaaaccctgttctttatcattcccgacgaggtgagaaccgccaaaagcaggattccccttcccattgggatgacctcgacctttgaaagagccgcatccttgtccaccggaacggtggtaacggcggcgcagcgggtaatgtttgcaagcaccgttcccgccttgaccataaaatcgtcgggattgtcgacgtattggggaagcgcattgtcaataaactgtttgtcgcggtcggaaagcttatatttcttcataaggctgcttacatagaaacgaaagcccttgttggaaggaatacggcccgccgaggtgtgtggctgaacaagaaagccgagctcaatgagctcactcatttcatttcgcaccgttgcggaagaacaggccgaatcaagggcactgcacacggcttttgagccgacgggagcgccggtggcaatgtactgctcgacaatgtttgacagaacgagcttttttctttcgctgagttccacttgattcacctcccatgtgtttagcactcattacctcggagtgctaacgtaagtataatttaccaccgcctgaccttattgtcaataccattccgtgaattgtttgttaataatttatgaacttcttgacctttcttgaccaaatcaattacatttttttacggttgaattcggcatagccttaatatataataattgtaaagtttaagcgtgaggaggagaaaccgggtaatggctaattttacaaagcgtgaaataaagaaaacctttgccgagcttctcaatcaaaagcctttaagcaaaataagcgtgaaagatattgttgaccgctgcggggtcagcagaaacaccttttactattattttgaggacattccaaccctgcttaacagcattgttgccgaccaagccgacgagcttattaaaaatcattcgacctttgacagccttgaggactgcgtcgacgttatttttaaatatgctcttgaaaacaaaaaggccgtgcttcatgtttatcagtcgctcgggcgggaaatatacgacgattttcttgtcaaagcctgcggatatgccgtgaccgaacacattaaaattctcacatcggatttgaatatttccgacgaccagcgaaacgcggtcataaaattcacgaaatgcacccttataggcgcctgcatagattggataagcgagggcatgaaggacgattataccgaggacttccaccgtctgtcgcgcatgtgcagggagcttcttgacagatttgtcgaacagcataaaaaataatatttaaaataattctgtgcctctcggctgccggcgtttaagttttcggctccgaggggcattttcgaacattttcgataaaatgcacaaaaatgtgacattgccgattcattgacagttttaatcaaagcggtgccgagtataatataatcgtaaatcacttatatcttgaaaggagcatatatatgcatgaatttaaaatgaggtcggtggctcccatgcgcgttgcaaaaacgggatatatcgccgtttcgattcttcttgcagttctcggcattgtgcttatcgcatggccgacattttcggtaaacgctttgggggttatatgcggaatacttctcattctgttcggaggggtaaagcttgtgggctatttttccaaggacctttaccgtcttgcctttcagtatgatatgcccttcggaatacttcttataattctcggaataatcatgcttatccatcccggaaatcttgcaagctttatttgcgttgttttcggtctgtcggttcttataagcagcctgtttaacattcagaccgccctcgacgccaaaaaattcggtataaatcaatggtggctgatatttgcgctttcggtcattgccgccgtttggggacttattcttgttttccgtccctccgaggcagccgacgttatggctgttctgctcggtataactcttctttttgaaagcgccgttaatatctgcacggttgtcacttcggtaaaaatcgtcaaaaatcaacatcccgacgtttatgttgaagaggattattattttgacgataaaaataataacaattaagtaaatcaacacagacaaaggagaaaaaatatgagacccgtaaaaattctttccgattcctgctgcgatctcgacgccggactcagagaaaaatatgatattgattatttgagaatgaaaaccgtttatgaggataaagagcagtcggcaagccttgattgggaatactattccccgagagagctgtatgacattatgagagagggcggccgcgtgctgacggcgcaggttcccgttgaggagtttcgccgcggatttactctttatcttgaaaaaggctttgatattgtttatatcggctgttctcttaagcagtcaagctctgtcaacaccggtattgttgtggccaaagagcttgccgaaaaatatcccgacgccgaaatttattgtattgattcgcttaacgcctgcgtcggcgaaggtatgcttgcaattgaggcggcaaaaatgagagacgaaggtctttcggcaaaggaaatcgccgataaggtgagcgaaaagcgcaattttgtcaatgaatactgcacggtacatacccttgactgtctcaaacgcagcggccgagtaaaggcatcgtccgcatttttcggaaaccttctcggtgttaagcctattattatttcggataaggtcggaaaccagacacctatcaaaaaggtaaagggcagaaaagcttctcttgaggagcttgtaaatcttctcaaggagtcgatcgtcgaaccggaggaacaatgcgtatatgtcgctcacgccgattgcgagaccgaggctgtaaaacttgccgagcttatcaaagaaagaataccctgcaaagaagtgcatataggatacataggaccgattatcggagcgtccatcggacccgaggcgctggcgattttcggattcggtaaggaagttacttttgaggggtgaaatcatgcagtcagcaactctcgacggacagacatttaaaaagctgttaagcggcggcgccgcaaatcttcagcagaattccaaaacggtggacgaccttaacgtcttccccattcccgacggagataccggcgaaaacatgagccgaaccataaggggcggtctttccgaccttgagggatacggcggaaactctatttacgaggctgcatccattctcgccgacggaatgcttctcagcgcaagaggaaactcgggagttatcctttcccgtcttttctacggcgttgccaagggtcttgaggacaaaaaggaggccaccgtcggcgatatggcggcggctcttaaaagcggagtggacagcgcatattcggctgtggcaaatcccaccgagggaaccattctgacggttgcgagagaggcggccgactatgccgcgtcccgaataaacgaaaacagtacgcttgaaagcttcggaaacgattattataatgagctgtgcgcctccctaaaaaggactcccgagcttctttcggttttgaaagaggccggcgttatcgacagcgacggagcgggtctttattacataatggacggtatcatgaaaaccgtgaggggcgagcagcccgaggcgacggaaatttccgtcgaacaaaaggacggacttgacctcagcctttttgacgaaaacagcgtcatgacatacggatattgcaccgaatttttgcttcgtctgcaaaatttcaaggtaaatatcgatggactttcggttgaagatatgataaaatggctaaatacggtcggagattcggtggtggcgtttaaaaacggtacggccgtcaaggttcatgtacatacgctcactcccggaaaggtgcttgaacattttcagcagtacggcgagtttttgaccgtgaaaatcgaaaacatgacccttcagcacagcgatcatgacaaaaagctcggagaaaccgctccagaggtgagcagaaaaaagtatgcaaccgtaaccgttgcgacgggacagggcataaagaaaacctttgaggaactcggcgccgactatgtcatattcggcgggcaatgccaaaatccttccgcagaagattttatcgaggcctttgacaaggtcaacgccgacaacatttttgtgcttcccaacaacggaaatatcgtgcttgcggcaaagcaggccgccgagctttataaaaaatcggctgtttatgtcgccgaaagcgagaacatcggcgagggatatgcagcgcttacaatgctcagctatgattgcgacgatcccgaaacaattctcaccgatatgcaaagctcgatgtacggagtcgttaccggaatggtgacaaaatccgtcagagatacgagcctcggcggtcttgacataaagaaagacgattatatcggcttttcgggaaagacaatgctttccgcctccgaaaacaaaatcgatgctgcggaaaaatgccttgaaaatctcgacgccgacgatcatgaaatacttattgcaatttacggcagcgacgcttcagatgatgaaaagcaaagctttcgccgtatggcaatgcgccgttttccctctctcgagctttatgagatagacggcgagcagaaggtttatgattttatacttatcttagaataaactttagaaggtgaagcaatgtcgcttgactttaccaaacaaatgaaaaaagaatacaccataattgcccccgatattttcccgactcacatggagcttttgtccgagcttttcaggcagtacggatataagcttgaggtggttcactatgagggcaaggaggttatcgacgaaggccttgcccacatacataacgatatgtgttaccctgcgatatgtatggcgggacagcagctttacgcccttaaatgcggtgatttcgaccctcacaagtctgcgcttattcagtttcagaccggtgggggttgccgtgcgtcaaactatatttgtctgctccgcaaagcacttaaaaacatgggaatggagtatgtacccataatttccttaagctttacgggaatcgaaaaatacagcggatttaaaattactccgcttatgctgctttcgggtataagatctcttgtttacggggatatgctcatgctgcttaaaaatcagactctcccctatgaagtcaacaagggcgataccgacaaaacggtcaagaaatggattgatattctgaccgagcaattccgtcataaaaaggggcttacctcaagagctatgaagaaaaatctcgagggaatcgccgccgactttgccgcaataaagagagaaaagaaaaatcttaaaaaggtcggaatagtgggtgaaatatacgtcaaatattcctccttcggaaacaacaatcttgaaaagtttttgctttcacaaaattgcgaatatatggttccgggtgtgctcggctttttccaatattgcttttcgaacatcgaaaccgaccataaatattacggcggaagcaattttgtgctgcttgccggcaaaactgccgaaaaaatggccgacggctgggaaaagcttatgattgacgtgctcaaaaaatatcccgagtttactcccccgtcctccttttccgacataaagaggactgccgagcgggttattgacagaggagtcaaaatgggcgagggttggctgcttccgggggaggctgcggaccttatcgaaaaaggatataacaatgttatttgcgcccagcccttcggatgtctgcccaatcacattgtcgcaaagggtaccgtaagaaagctccgcgagctttatccgaaggccaacatattccccattgactatgacgcaggtgcctcaaaggtcaatcaggaaaaccgcattaagcttatgctttcaatggcggatgacgaaaggaaaccgaaaaattgaagaaattaggattggacatcggctcgaccacaatgaagtgtgtgttgattgacgaaaacgaaaaactgcttttttcaaaatacataagacatcaggccaaaattgctcaaacggcggttgaaattctcggtgaggccgagaaatactgtcgcggggaaaaggtcggcgtttccatgtccggctcggcgggaatgggtgtcagcgaaaagcttgacattccctttgttcaggaggtttttgccgaaaagattgccgtgaacgctttgaatcccggaaccgatgccgttatagagctcggcggcgaggacgcaaaaattctttttctcaccggcggatttgaaatgcgcatgaacggcacctgcgcgggcggaaccggcgcctttatcgaccaaatggcttcgcttatgaaggttaccccatctgagatgaatgagcttgcaaagtctcatgaaaacacctgtgtaattgcttcccgctgcggagttttcgcaaaatccgacattcagcctcttttaaatcagggtacgagacgggaggacatttcggcgggaatattcaaggcggtggtcaatcagaccattgcgggtcttgcccaaggcaggagcataaagggaaaaattctttatctcggcgggccgctcacctttttgtccgaacttcgcagctcttttgacgaatctctcggcaccaagggaatttgcccggaaaattctctttattacgttgctctcggagcggcatattccgatgtttacagggaaatgagtcttgacgagctttgcggtctcttttcgaaaagtccctcggcgtcgggatatgttcattcggctccgctttttaaaaacaaggatgaatatgaactttttaaactgcgtcatcaaaaggcgtcggacggcataaaagaaatagaccgtccgaacggcccaatgtgtctcggcgtggacgcgggctcgaccacggtcaaaattttgttgatcgataaagaaggaaacattttccgtcccttttatgcctccaacgacggtgatcccgtaaccgccgttaaaaactatttaaatgacatataccgcgattttcccgatattgaaattgcctcgtccgcttcgactggatacggcgaggagcttgttaaaaacgctttcgggcttgatttcggaatcattgagacggttgctcattttactgcggcaaaaaaattccgacccgatgttgattttatactcgatataggcggacaggacataaagtgctttcacatcagaaacggagcaatagataacatttatctcaacgaggcctgttcctcaggctgcgggtcgtttttgcagacatttgcaagcgctctcggctatacaagcgagcagtttgcgaagctcggcctttttgccgacgcgcccgtttctctcggttcccgctgtaccgtttttatgaacagcgccgtcaaacaggcgcaaaaggacggagcaagcgtggaaaatatcgctgcggggctgtctgtaagcgtggttaaaaatgcgctttacaaggttataaggtgttcctcggccgacagtctcggaaagaacattgtggttcagggcggcaccttccttaacgactgcgtactgagagcctttgaacaggaaatcggacgtgaggttatccgtccgaaatatgctcccattatgggtgcctacggcgcggcgctttatgccatgaataacgcgagcggaaaatcctccgttttgaacagtcggcaaatggcggaattcaaacatgaggttaggtcggtcaagtgcggaaaatgcaccaacaactgcacattgacggtgaattccttcggaaacggaagaaaatatatagcgggaaaccgttgctcccgtcccgtttcgggcggaaagctgagggaaaagctcgatatttatgaatataagctttcgcttttaaagaaatattccgacaaggaatttgagtctgataaaaagactgtgggtttgccgcttgggcttaatatgtatgagctgctgcctttttggagcacttttttcagaaaactcggttttaacgtgcttgtctctcccctgtccgatcgaaagatatatcttgaaggacagcataccattccgtcggatacggcctgttatcccgccaagataatgcacggccacatcgaatggcttttgaagaacgacccggatgttattttctatcccgacatgagctataacgtggaggaaggcctcggagtcaatcattttaactgccctgttgttgcatactatccgcaggttattaaggataatgtttccgagctttcaaaaaccgtgtatatttgcgactttatgagtcttgcaaatcccaagcagtttgaaaaaaggattttcgatgttattacaaaatattttccgaacataaccaaaaaggaaataaaatccgcctgcaaagcggcatacgaagaatacgggaaataccttgaaaacatcagagaaaaagggaaagaaataatcgaaactgccaagcaaaagggtatgccgattattgttcttgcgggacggccttatcatcttgaccctgaaataaatcacggtatcgacaatttgctttgcgagcttggcgcggcggtcattagcgaggacagcgtgagcggcgccgttgaccccttccctgtggatgtgagaaatcaatggacctatcacgcaaggctttatgccgcggcaaaatttgtcggtgaagccgataaaaagaccgacataaaccttgttcagcttgtgtccttcggatgcggagtcgacgccgt

SEQ ID NO: 4309 - DNA, 1613 bp, Unknown
  16S sequences of unknown bacteria
ggtggccgccatgaccggatcgacgacgatgcgctctgcgccatgctgcttcaggctgtccgcgatcgtttcgatcagcgcgcctgaggagaccatgccgatcttgacggcatccggacggatgtcggtaaatatgcagtccagctgctctttcaaaaactgaggcgatgcctccatgatatctgtgacgccgcaagtattctgggcggtcagggcggtgatcgcgctcatggcaaatacgccattggcgcacatcgtcttgatgtctgcttgaataccggcgccgccgctggaatcactgccagcgatcgtcaatgctgttttcatgatatgagctcccttctgacaacatttcgttttctatggcgaaagaaagtggtgcccccgatcttccgcaggttcagatgagctttcgctcatgcagcgcatggatgaaagcatccgcgctcatctgttcgtcgatatagatctcgctgagctgccgcagcgttttttgatcatgatgcgcttcacttacgccgatgccgtgaaagccagcactgagtgcggtgcgcaaggcaaagggcgcatcctcaaagacaagcagctcgcttgcgtcgagcgcgagcttgcgcgcgcatgcgcggtagacatccggatgctgcttgcccgcattgacttcctcacagctcatgaatgccgcaaaccatgtgtccaggccaagccgtttcagcgcagcctgagccagatcgagcgatccggatgtggcgatgcttagcttgaactgccgctgatgcagttcctgagcgatatccgcaacgtgcgtccgtgccttcacttgatgcagatagaaatcgcgcatgatcatatccagctcgttcaggatatcctttacgctttcctccagcgcatactgcgtcttcatccacatggcgccctccgccatgctgagcgatgacagttcctctcgcaatgtgggcgcggccgtgatgccgcgctgacgcagataccgttcgcccaaggtatcccagatggccagagaatcgagcagcacgccatcgacatcaaagatcgcgccgccgatcatgaggccagcatcgccatcgtcttttgctttaatcgtgcagtggctttgcgaatatcatcctgcgcgaagatggcgctgatgaccgcgatgccgcagatgccgctgcccgatagttcgatgacattgtccgcagtgatcccgccgatggcgatgaccggaatatctacggcagcgcagatcgcacgcaaagtctccatggataccgcggccgcatcatcttttgagccggtcgggaagatggcgcctacgccgagataatcggcgccatgggcctgggcgcgcagtgcctgttccaccgtttccgcggaaacaccgaggatcgcgtctttcccaagcagcctgcgcacatccgccgcttccatgtcgctctgtcccacatggacgccatcagcatggatctgcctggcgatatcgacatcatcattgatgacaaaggggacatggtgcttgcggcacagtgcctggatcgcttttgcttcttgcaggaaagaagcttgatccagctgcttctcgcgcagctgcacgaaggtcgcgccgccttcgatgg

SEQ ID NO: 4310 - DNA, 12258 bp, Unknown
  16S sequences of unknown bacteria
gcgagccgcgcctgcagcgcggcaaggtccgtcgccggtccgtcgccggtcaggcggatacggtaatgatggcgcgtgctgtccttgggcagctggcttgccagatcggccagccgggctgctggcacgtccagaatttcatagcggggagcgtccagcatttgaaagtgcagctggacctggtgcggggcggcctgtactaagtatacgccctttggaccggtttcatcaaagccgcggcccagaaagcagccgggccaagcgtaggtgacgccggtctccgttcggcaggcggcgcggcggtggatatggcccagggccaggtagcacaggccggaggcggcgatatccgccggggaggccgtccgataagcagggccattggggtcgccatgcaggaccatgaaatgcggccgcccgtcctgcggggcgtgaaagcccgccagggagggcaactgcccatcacaaaacgcagcgccggagacggtgcagtcgcccaggtccagcgtttcgatctgggacgacgcgaaaatatgcacctggctgggccagacatagcgccggtaagggctgttcggccccatgggatcatggttgcccggggcgataaagacctgcgctgggcattcggccagggcctggcgcaattggtcgacggtatcgcgatagactgcgccggtatcgaagaggtccccggccagcagcaccaggcggcagcccgcccggcggcagaggcgggggaggaactccagcagctggcgggcttgctggcggcgctgggctgcttgttccggtggcagcccggcaaagggcgaatccagatgcaggtccgccgcgtgcagcagcttgattggctcaatcatagagagcgacctgctcgacgctgcggcatttgccggcgtctgcatcaaaggtgaagatggcgccctccagtttgcagggccctggcgcgggctcatagcggccggccaagtcaccccggaattttgcgatggactgcgctggcttgacgcccagaatggagtgggccgggccggtcatgccgaggtctgtgagatagccggtgccgccgggcagaagctgggcgtcggccgtggggacatgggtgtgcgtcccccagacggcggtgacacgcccggccagcatgtggcccatggccagcttttccgaagtcgcttcagcgtggagctcaacgaagatcagcttcgtctcaatgcgctttaaaatgcgctcgacctgcaggaaggggttttccggcgtgtaatccatcccacagcggccgatgaggtcgatgacggcgacgtcgccaaagtccgtttcaaagatgccccagccgtgccccggggcctggggtgcataattggccgggcggagcaggttcgggcggcttttggcatagggtaccagctcccggcgaccccaggtgtggttgcccatggtgataacgtcggccccggcgtcaaagatgtcctccgcctgctggggcgtgagccccagcatagaggcgttttccccgttgacgacggtgaaatcaatttcatacctgcgctgcagcgcgggcagttgacggcataaataggcgcagccgctgggggcgacgatgtcgccgacggccagcaatcttcgttccatgtaggttcctcccagcatagcttctttgacggtacgtaccagcaaaacggcagttctctcgttcgtttccgctatcataccattttttccgggaaagcacaaggccggaaaccgacgcacgcccttgacaaaccggtgcacagccctataataagtattatgatacgacgaaacggagggcgaccgatgctctataaagatttgatggacaagctgatgctggggcaggacctgacccgggcggagctggagcggaccattgccgggatcatgacccaggaactgacccaggtccaggtgcttggctttcagatggcctttttgatgaaggggccgacgccccaggagctggcggactatgcccacgccatgcgggccaactgcacgtccatcgacgctgcgtctttcggtccggcgctggatatcgccgccaccggcgcgggcgagcgagcgggccggttggcgcctgctgtcgccctgctggcagcagcgccgggcgcgccggtcatcaagcaggtgcgcaccagcgtgccggggtatttcggcagcacaggcgtcctggcggcgctgggcattgacgtggcgggatcggaagccgaggccaaggcccagctggcggcagcggagacggcatttttggacccccgggcctttcacccgtcgctggcccagacgctcaacgatgagacagaggcccagatccgggcgctgacccagacgatcatcggcccgctgatgaatccggcgatgatctccaatctgctttttggggtccatgatcgggagacgctggagattttgcaggaggcgatcccagaaatccccggcctgcgggcgttgctggtacagggcgcagacggggcagacagcatcacgctggacggcccgtcagatcttctgcgctgggacggcaccgcctggcaggcgcagacggtaacgcctgcagcgctggggctacggtcctgctcctggactttgcaaaagacggagaaggacgccgagacggcggcgcagatcacggccctgctgcggggtgaggtgcatgatgcccggcgggatgtcctgcttgccaatgtggcagcggctctttgggtcagtggtcaggtcgagcgcttagcggatggggtctgcctggctgcgacccggctggaccggggcgacggtgcgcgccgcctggaagcgctgcaggcgctgcaccgggacgcggtgcgggaaaagggataaaacaaagcacaagaccttggagagccaacagctttccaaggtcttattctttaaaagtgcttgggcggtttccgcttcgggtgcgggttggcggggctctcgggctgggtcttgcgcagggcgatgatctggtcgcgcaggacggcggcgtactcgtactccatcatccgggcggcctccttcatctgcttttccagcttggcgatctcggcttcccggtcggccttcgtccgcagctggcggcggcggtcggccccggcgtccttggagatctcaatgagggcgcggacgtccttgatgatcgtcttggggacgatgccgtgggcgtcgttatacgcctgttggtagctgcggcggcgggctgtctcgtccatagcgctgcgcatggcggtggtgatatggtcggcgtagagaatgacccggcccccggcgtttcgggcggcgcggccgatggtctggaccaagctggtctcactgcggaggaagccctccttgtcggcgtctaagatcgctaccagggagacctccggcaggtccagcccctcccgcagcaggttgatgccgacgaggacgtcaaacttcgccagccgcaggtcacggatgagctccatgcgctccatggcgtcgatgccggagtgcatatagcggacgcggatgcccgctttttgcagatagaccgtcaggtcttctgccatttttttcgtcagtgtggtgatcagtacccgctcctgccgggcggtcacagtgtgaatctcctggatgagatcgtcgatctgcccggcaatggggcggacgcagacctccgggtccagcaggccggtgggacggatgagctgctcggcgacctgcccggcgcggctgcgctcgtactctgccggggtagcggagacatagatgacctggccgatcttcttctcaaattcctcaaaattcagggggcggttgtcaaaggcggaaggcagacggaagccgtagcgaacaaggctctccttccgggagcggtcgcctgcgtacatggcccgcacctggggcagcgtaacgtggctctcgtcgatcatcagcaggaagtcgtcgggcatatagtccagcagcgtcatcggcgcggagccgggggcgcggccggagatcacccgggagtagttctcgatcccggagcagaagccgatctcctgcatcatctcaatgtcgtagctcgtgcgctgacgaatgcgttgcgcctccaaaagcatattattttcttcaaaatatttgacccgttcctccatttcctgctcaatttctacgatagcgcgctgcattttttcctttgaggcgacatagtggctggcgggatatatggcgacatgctccaggattcggttcggcatcccagtgacggcgttgatctcagaaatgcggtcaatctcgtcgccgaagaattcgacgcggatggcccgcccggcccagtaggtggggtagatctccacagtgtcgccccggacgcggaaggtatttcgcgtgaaattgacgtcgttgcgttcatagcggatctccgtcagcttgcgcagcagctccacctgagagcgctcctgcccgctgcggagggagatgaccatgttcttatagtcaatggggtcgcccaagccgtaaatgcaggagacggaggccacaacgatgacatcccgccgctcaaacagcgacgatgttgcgctgtgccgcaggcgctcgatctcatcgttgatggaagaatccttctcaatatacgtgtccgtatgggcaatataagcctcgggctgataatagtcgtaataggagatgaagtactccacggcgttttccgggaaaaactccttgaactccgcgcagagctgggcggccagggttttgttatgggccagcaccagcgtgggccggttgacagattggatgacattggccatggtaaaggtcttgccggagcctgtcacacccagcaggatctgctcggaaagaccggcgttcaggccatggaccagcgtatcaatggcccggggctggtcgcccatcggctggtaaggcgcgtgcagtttaaaatccatgtggttccctcctccggtgaaaaacggtttggccgccatctagtatagcatgggagtctggcggcggcaaggcttaggcctgcttaaactgactgtagtaaagcgtcgcgtagaagccgccccgggccagcagtgcggcgtgatccccctgctcgacgattttgccgtcccgcataaccagaatgatattggcgtcctggatcgttgaaaggcgatgggcgacgacaaaggaagtacggccctgcatcagggtctcgaaggcctgctggatctgcatctccgtgcgggtgtcgatgctggaggtggcctcgtccaggatcagcatcggcggcaggcagagcatgacccgggcaatgcacagaagctgccgctgcccctggctgatggcgtcgccggtgaggacggtatccagcccctggggcagctgccggataaagccccagcagtgggcggccttggcggcttggatgatcgcgtcctctggtgcgtccgggcggccaaaggcaatgttctcccggacggttccgcccttaatccaggtatcctgcaggaccatgctgaagctacggcgcagtgcggcccggggcatcgccgtgaccggcgtgccgtctacggtgatgcggccaccgtccggctcgtaaaagcgcatcaggagattgatcagcgtcgtcttgccgcagccggtggggccgacgatggcgacccgctgcccgggctggacggtcagattcaggtccgtgatcagggggcgggccttgtcgtagctgaattggagctgctccagcgtcacagcaccctggaccggctccggcgctgctatggcggcggacggcgcgtcctccggctctgccggttctgccagcagggagaagatccggtctgcgcaggccagcgcattttggaattctgtaacgacggcgctgatatcgttaaacggcttcatatactggttggcataggccagtaggatcgtcaggccgccgacggtcaggctgccgccggggatcaggaagatgcccagcagcgccacgccggcatagatcaggctgttgacgaaccgggtggaggggttggtcaggctgctgtaaaacacggcctgctggctgcattgcatcaggtcctcgttgatggcggcaaagcggcgggaggcagtctcggtatagtcgaaggcctggaccagcttttgaccgccgatcatctcgtccaccagcgcggtctgcttgcctcgcagcacgctctgctgctggaacagccggaacgaacggctggagataaaccgggcgaccagaaagctcaacggggtcaggaccacgaccagcagcgagacggagagatttttagagaacatgaacaccagcgtgacggcgatggtcaggccccccgtcagcagctgggtaaagcccagcagcaggccgtcactgatgacatcgatatccgccgtgatgcggctgaccaggtcaccgacggtgtgaccgtccaggtaagagagcggaagcttttgcaggtggcagatgctctcctcccgcagggactggactgtccgataggtgatgcggttgttgatgcagttagagatccaattgctcacggcggacagcgccaccagaatgctgatttcctgcagataatgggcgaggcgggcaaaatggacctcacctgccccggcaatctggtcgatggcgtcgccaaagagaatggggacatacagctgcagcacgacggtagcggcggtcagcagggtgctgaccaccagagcaggccaggcgcggccgatgcgccgcagcagctgggccaggctggcccgctgggcagagcgtttgaaagaagctttagccatgggtcttccctccttgctgctgcaccgcgtcctgcgtgaactgggtgcgatagatatcctgatacacggggcattgggccagcagcgccgtatggtcgccgcagccagccagggcaccgccgtcgagaacgagaatttgatccgcctggcggacgctggcgatgcgctgggaaatgacaaagaccgttgtatcgtgcagctggtgcagggcctggcgcagcgcggcgtctgttgcgtagtccagcgcgctggcgctgtcgtccaggactaggagcttcggctgccggacaagcgcccgggcgatggtcagccgctgcttttgccccccggagaggttccggccgccctgttccagaacaaaatccaggccgccgggcttgtcctcgacggtttggcgggcctgggcgacggtcagggcctgccagagagcctcatcggcggcgtcctggtcgccccagcggaggttgtcccggatcgtgccggaaaacagggtcgcctgctggggcacgacggcgatctggcggcggagcgcggcctggtcatagcgacggatatcctccccccagagcaggacgtggccggaggagacatcgtaaaagcggcagagcagatgggccagtgtgcttttgccgctgccggtgccgccgataatcccgaccgtctgtccgggctgggcggaaaagctgatgttccgcaagctgggtgcacctgcgctggggtaggtgaagctgacatctttaaatgtcaccgccggggtgcccggggcagcctggggtgctggcgctgtgccatttgccatcgagggatgcacctggaacaggctggcggcccgccgggcgcaggcgacagatttattcagcgtgatgaccatggtggcgagcttgatgagctccaccaggatctggagcatatatttatacagcgcgacagcctgcccctgggagagccgcccgagctcgacctgtagtccggcctgccggatgagcaggacggtggccaaattgatgagcacgtaggttaccgggttcatcagggcggagagcttgcccacctgcaggtttaaccgggtcagtgcctcgttgctggcagcaaactccgccacggaggcgtcctcccggcaaaaggcccggatgacccgggcgccggtcaggttttcgcgggtcagcgccgtgacccggtccagccccgcctggactttgccaaacaggggcacgctccggagcataatcccgaggatgaccagaaacagcaccgggatggcgacagcgaagacaagggcgcagcgggtgtcaatgggaaaggagaagaccagggcgcccagcacgataaacgggctgcgcaacagcagtcgcaggcttagattcaggcctgtctggacttggttgacatcgtccgtcagccgggtgatgagggtatcgctgcccagagcgtccagctccgggaaggagagcgtttggatatggtcaaacagcgcctgccgcagaccgccggcaaagccgacgctggctttggccgcaaaaaactgggcgacgacactgaagcccagaccgacggcggccatgcccagcagcgcggcaaaatagaggagcacggtacgcctgccgctgcccagggccccggtgtcgatcatcgcggctacgacgatgggaacgagcaggtccagcaacgcctccagaagcttgaacagcggggcgagaatactctgcgctcggtaaggttttaaatagatcccaagacttcgcatgtggtgactccgtttcgtgtgattgcggcaaactgtaccggtccggctgcgtatagcttgcccaccggtgggaaaatgatgaaaaagggacccccggcgcactgtagccgccgggggtgagaaacgtgttattgcttttcgtcgaaattgcggtagcggctataggccacgacaatccggcgattgggctccgtgccggtggagaaggtggtgacgtccggcatatcctgcagggcggcgtggatcacatggcgctcataggcgttcatgggctccagggtgatgtttctgcggtatttcgtcacctttgcgccgacctttttggccaggcgctgcagggattcttcccgctttgcccggtaggactcagcgtcgacattgatgcggacccgctttgtctcgccgcggttgacggcgtagtttgtcaggtgctggatcgcgtcgagggtgtcgccgcggcggccgatgagcgcacccaggttttcaccgacgagctcgaccatgtaagcgtcctccccagtggcgacggcgtggggcacggcatccgagcccatgtgggttagcaggccctgcataaaggcttcgatccgggcttccatcgagccgggggcggccacagggtattccttcgggggggccttcggcgcagcgggtttcgcttcgggctgcggtgcggggcgcttttcctgctgcggccgggcaggcttcttttctgcgggctttgcgggagccgcaggcgcagcgggggcctgtgcggcaggctgcttggcggcaggcttttcttccttcggcagccgctgctttttcggcttggagcgggaggcggcagacagtgccggggccggcactgcttccacttccgcatccggggcctcgtaggtcaccttgaccttggccgggctggcaccaatgcccaaaaagccggattttgcattttccaggacctcgacggagactgcgtcgcggtccattttcagttcattcaaagcggcctggatcgccaggtcaatggtttttccggttgcgataatacttttttccatggtacgctcctgttattccttcgcagagccgttgggcttctggtagcggtcggccttataggcacggccccgggcgtaggtgcgctcgccgacggcggcgtcgctctgttcctgcggcgcggcttccggggcggcccctgtttcctcggcgtgcttccgggcgtatgccttggcggctgcttctgcttcttctttttgccgctgctgcagcttcttcttgctggtgttttccacggcaagatcggggttcttttcccggcgcagcgcgcgtctcttctctttttctgcttcgatccgggccagttccgcggcgtgcttgcgcttttcctcgtcctcggcgtcgtagatcttccggtagtgctttgtcaggaaatagtcctggatcatgccaaatacggcctgggcgatccagtaaacggagatggcggcgggcatggtgaagcagaagaccagcgacatgatgggcataaacagcatcatggacttattggtctggtttgccatggcggcagctgcgtcatcccgctcaccctgggcgttggtcgcgacctggttgttcatcttctggctcagcagcatcgaaagcatctgcgtcagcgcagcgacgatcggcaggacgaccaggccaatggcggcccaattcaggttttcaattttccagatcttccagtccggcacctgccccaggtcgatgcccaggaagttgaagttcaggctgtgcagggttttgccgaggtccggcacccagtctttgatctggtctgcatattcgccgacatggctggcggcgatcatctgatggtagtagtcgttggcatgcgcaaagagcgacggggctgcttttttgatgctctccagaatgagcgccgcgttctcgctggaaacgtgcatcatatactggataggctggcggatgacctggtacagcgggatgatcacgatcagggggatcagagaccacaggcagccgccggtcatggaaacgttttcgtccttatagagcttttggaccgctttttgataggattctttgtcatctccgtatttgagctccagcagcttgacctgcggagagatacgcgacattttcatcatgctcttcttgctcttggcactggtcggataaagaatcagcttcaggaccagggagaacaggatgagggccaggccgtagtttgctgtccagttgtacagccactccagcacatagccaaatgggactttgataatatcccaaaagccgaatgctaggatcatgtttttcctccgttgtgtgtgcgcgccctagggcactggatcgaaatagtcccctttgtaaaagggattgcatcggattagccgccgcaatgccaaacggccgcccttccatgcgccgtattttgccactgcctcataggcatattggctacaggtgggggaaaaacggcagcgggcgggaaaggccggggaaatacagcgctggtagaatcggattattttgagtaaaacgcgcgtcacccttcttcgtcctttccgacaaggattcccagacgcttggctgctcccagatacgccgattgcagtgcgccgaagtccgccgtcacggcgcggcttctggcgacgacgacgatatcatagccggggcggaagcggctctcattgagccggtagacctcccgcaggcggcggcgtgcccgattgcgcacgacggccttgcccagctttttgccgacggtgatcccaacgcggttttcctgcagatggttgggctggcagtagagcaccaggtaacggttcacggcggaatcgccgcggttatagagcttccggaagacatgattcagtttcaaagatctggagaagcgcataataacctcccgcagcccggcaaacacactaccgtgccgacgcgccggaaaagcaatgggcgaatagatatacatctactcgcccttaacatctcattagcatctggattgagcattgttttgcggccagggcttttaagcagacaacttggctctgcccttggcacgacggcgtgcaagaactttccggccgttggcagttgccattctctttctgaacccatgcactttggatctgtggcgctttttgggctgataggtacgcagcattgtatacacctcctgaaaaaatatgctcaacagctgtctccagccgcagcgagtcccgtaaaataccccgtcataggatggggtcatacagttagtattataacggctgtttgcggtttggtcaatcatttttttaagaaatacgaatttttcgccggattttccggaaaccacaaaatctggggctgcacctgctagatattggggcgaccggcagcccggtcgacttgacagacccgggttttatgataaaatcagcgtaacagaggcggaaaggtggggcttgtgatgacactgcaggaatattttaacgcaaacccaaagggcgcgctggccttgtccggtggagtggattcggcgtatctgctccactgcgcccaggcggcaggcgcgcaggtgcagccctattttgccgagacccagtttcagccagcctttgagcggcgggacgcggcgcagctgtgcagcggcttggggctgccgctgaaggttttggcgctggatgtcttggcggacgcccaggtgcggcgcaacccgccggagcgctgctattactgtaagcggaaaattttctctgccattgccgccgctgcggcgcaggacg

SEQ ID NO: 4311 - DNA, 5164 bp, Unknown
  16S sequences of unknown bacteria
gtcttctgcccgccgctgaactcgttcaccctgcgctgcagatcgctctcatggaagccgaagcgcgtaaagacgctgcgcagctcgctctcccagctgtagccgcccccggcctcatactgttcctgcagcgcggcgtacaggttcaggttcttctcgctgggatcgtccgccatggcgatggccgcttcattgagccgctgctccagcgccttcagatgatcgaaggcatgctccagctcctgctgtacgctctgcccttcatccatgaacgtcgtctgtgcgagatagccgatgcgcacgccgttctcgatatggatgtcgccgctgtccaggctttcctcgcctgcgatgatcttcaacagcgtcgtcttgccacagccgttgcgcccgaccaccgcgatcttttcattgttcctgatctcaaactgaatgttgcggaagatgacactggcaccgaacgcctttgatcctttgctgatctgatacttcatgtgcctctcccctttcgtctcattgctggctcagatccagcgcatcggcaaagccttccacgatgccccggatcatcgtctccttattttcctgatagctgcgcacatcatcgctgtcgctcaggcaggcgaagtcaaactccatcccctgcatgccgttcgcttcgctgtacgcttcgttctgctggctgcgcgtatccatctgtcccgcaaacgttgcctttcctccggcttcccggaacaggaaattgctgtcatagacgagacgaccgtcgtccccttcgctgctgaacgtggagaacacgcccggcacgctcgtctccgaggtataggacgaagagccctcgatgccataatgctcgcgcagataatacatgatgctgttggtcagatgattcgacgactggatgccgtgatagctttccaggccgcttctgccctcgccgtaagtgaagccgatgctgatcacatatttcgcgtccgcctcgtaccccttggccacgcggctgttctctccataatactccaccagctcatcctcgccgcgcgtgatgatgacattcaggccatagccctccagcaggtccttcatctgcaccgcgatgtcataggcctcctgcgattcgcggatgccgttgccctgcaggccgtaatccactccgccccagatggtcgtgtagatgccgaagggatcgatcatcacatccgcggtacgggcatccgccgtcgctgaggtcacgttgaggaacgcatagtgctgatccagcgatccgccgtaatcatccaggatgctgctgtcggcgatcagctgcacccgcttgacctttccgccgcggcgcaccgtatcgaacgtctcgctttgcaccgatgaagcgaacacggcgcgtttcagcgtaaagctgtccatgatgtagatctcataagtgccttcttccagatccggcagatagatctgccgatccgcggcatcaccgaccgtaaaactgtactgtgtgccgctgcagatattgaccagctccagcgtcttgccgacgatcggatctccctccccgtcataagggtccatatataaagccaggctctctccgtaaaacagataatcctccagctcgatgatttcctcctgctgtttttccagctgttccctgatctcgtcagggccccatccgcacgcctgaaaatgaccgcgcacctcctggggttctacgacaaaatggtaaagaagaaaggagaccaggatcagcaaagccgccgctgcgatgacgatgcgccatatccatttgcgctggcgctgtctaggctcataacgcatgcacatcctccttctcagaattgctcataacgcataataagtataacagaaaccataaaaaatacaatgcgcgcaaaagaaaagagacaggaccgtgcctgtctgttcgatatcagaatacgaggttgcgcggcgtacgcgggaacggctccacatcgcggatgttctgcatgccgctgagatacatgagcatgcggtcaaagcccaagccgaagccagcgtgcttgcatccgccgaagcggcgcaggtccatataccactgcaggctgtcactctccatgcccatctccttcatgcgggaggccagcacgtcataacgctcctcacgctggctgccgcccaccagctcgccgacgcccggcacgagcagatcacaagcggccacggtcttcccgtcatcgttgagccgcatatagaacgccttgatgtccttcgggtaatccgtcaggaacaccgggccgttgaccaccttctcgcacagatagcgctcatgctcgctctgcaggtccatgccccactcgatcttatcgttttcaaacttcacatcggcctgcttgagcagctcgatggcctcggaatacgtcatgcgcttgaattcgctgtccctcaccttggtgatgcgcgcgatgcattccttgtcgatcatcttctcgaagaacttcatctcttccggcgcattttccaggcagtaattgatgcagtatttcaccatatcctcgatcaggtccatgtcatcttccagatcggcgaaagcgatctccggttcgatcatccagaactcagaagcatgacgcgtcgtattggagttttccgcgcggaacgtcggtccgaacgtatacacatcgcggaaagccagtgcgaacgcctcgacatgaagctggccggacaccgtcagggaagcgtgcttgccaaagaaatcctcatcgtatttggcatcgtcccgcgtcgttacggtaaacgtctctccggcgccctctgcgtcgttgcccgtgatgatcggcgtatgcacataaacgaagccttgatcctggaagaattcatggatcgccatggacagcaccgaacgcaggcggtagatcgcatagaacgtatttgcccgcgggcgcagatgcgggatctcccgcatgaactcaaagctgtgccgcttcttctgcagcggatagtcatggtcgcaggcgccctccagctcgatctccttgacctggatctcaaaaggctgacggccatccggcgtatagacgaacttgccggtcacgctcagcgcgctgccggtcgtatacttggccacttcctcaaagttcttgagatcgacatcatagaccagctgcacattgcggaaataggtcccatcattgagctcgatgaagcccagctttccgctgcagcggttggtgcggatccacccctgaagctgcacatactcgatggaatcgagctcgacatgtgagccgctgaacacgatctcatacagctcacggacggtcataaactcaaacatactgtttcctccctcatcaacgaaaaaaacgtccctgtcatccaggaacgtgatcttacgcggtgccatcctgattcgcgcgatatatgcgcgcatctcttcatgattaacgctcatccacggaaccgtctacttggtttctccggttcagctccgcagctgttcccctcaggagccgacgcttctgtcttccaccatcacagaatcgctttccgtccgcttttcctgccgggttctgcttcatcgcctggcatttaatgaattcgtctcaaagacgagttcctgaatagatgataccacatccacggtcttcaagacaacccctttgggcacctgaatgtgctcatgcgtgaaatcgaccagaccggtgatcccgcacgcgatcagccggttcaccgtcgcctggatatccttggagatcgccaggatggcgatacggcatccctccgggatcttctcctccaattcatccatggaatagaccggcacgccgaacgtctcgccgcggcgcgaagggtcgatatcaaaggcacaagtgatctctccgaccacatagtcccagcggttgtatttcatcagcgccctgcccatgtttccggcgccgaccaggatgatcttctcatcgaagtccatccccagctgctgattgaagatgtcgatcagcaggttcacatcatagccatagccctgtttgcccagattgcccaggaaggaaaagtcacggcggatggtcgtcggttcgatgttcaccacgctcgccagctccttggacatgatccgctgcgttcctccgcgcttcagcttgcgcagcgccttcaggtagacaggatatctctgcagcgtcgcctttggcacgcttttctgtgtcatacgcatcaccatccaaagtatagcatagttcacgctgtttgtgaacttttttagttattgaacttatatgaacgatcaaggacagcgcaaggctgtccttttggatcatttcatagaaaaccggtcgtaaaactccatctcctccaacacggaagtatcctcgatcggattgtcatccagccgcagctcctgcagcagctcgaggtctttcagcggagtgacatccgtgatataattggccttcagcgtcagggagcgcagatacttcagcgaagacagcgggctgagatcgacgatcgcattgtgatccagccgcaggtaagagagatactccagcccggagagcggcgcaagatccgtgatgatgttgttgtacagatcgatcgtgcacagattcttcagatccgagagcggcgtgatgtcggcgacattgttgttctccagtccgagcacctccagctgcttcatctcttccaggcaggtgatgtccttgatggaattgttgcctacattgagcaccgtcatgcgctcgcaggaacgaagcgtatcgatgcgctcgatcaggttcgtgtataagttgagctccaccagacggcgggaatttttcaagaaatcgatattgcgcagctgacagtggctggccttgaaatacaccagattctccagatgcttcagcgcgctgcaatgctcgaggtggttttccgaaaggtcgagcttctccagctggttcagctctgccagcacgctgacatccttcagccccgtctgcaccatgcgcagctcgcgcagatgcgtcagcttcttgagaaagctgaaatgactggggtggttataagagagattgagcacttccagatgctccatgtccgccagcacgctgtaatccttcagatacggacagttggacacatccagcgagcgcaggttcttcatggacgtgagcggcgagagatccgagaacagattggtggacagatccagcacctcgac

SEQ ID NO: 4312 - DNA, 2671 bp, Unknown
  16S sequences of unknown bacteria
taacaacttcctgtttattattcataagggaatttctaatattgtctatgcttgtatcgccctcaccattaaattcatcatttaagatgtttaattgctctgcatcatttatagttgctgttcttaccataacgacctccacaaatttaagtttgtctaattcttcctacgctcattataagggattttctaatagacttcaagtgttattatacttcttggtgggagcgggtatgttcttattcttcctctgtgtcctcttgttcttcttcgctcttaaagtcttgcttgccaaggttttcccttgcggtctaattggcgaacactcacggcggtgtatttcattgctcaatccccctttggttaaaactgttccgcaaatcacactattaaaataccgcaaatgttccgcaaagtcaagattgttccgtaaaacaagaaacccgaaaacccttgatttgcaagggttttcgggttcttaaatctctcaaaagggtgcgggatttattcccactcaatcgtggccgggggcttgccggtgatatcgtacaccacgcggttgatgccctccacctcggtggtgatgcgcgcagttacgcgctcgagcaggtcgtagggcaggcggtaaacggtggcgctcatggcatcgatggagttgatcgcgcgcagggccacggcgtaatcatagctgcgcgaacccttgcgcacgccggtggagcgcacatcgagcagcaccacgaaatactgccagatgcgcttatccagcccggcggcggcgatttcctcgcggaagatggcgtccgcctcgcgcaggatatcgagcttttcgcggttgacctcgcccagcgtgcgcacagcaaggcccgggccggggaacggctggcggtggatcagctcggcgggcaggcccagcgccgtgccgaccgcgcgcacctcgtccttaaacagctcgcgcaccggctcgatgatggcctcaaagccgatcttctccggcaggccgcccacgttgtggtgggctttcacgctggtgccgtccacgccgaagctctcgatcacatcgggataaatggtgccctgcaccaggaaatcgatcttgcccagcttgagcgcctcttcctcaaacacgcggatgaattcctcgccgatgatcttgcgcttcttttccgggtcggtcacgcccttgagcttttgcaaaaagcgttcgctggcgtccacgcagatcaggttcatatccatgtgctgcttgaacatcttttcgaccatggcggtttcgcccttgcgcatcaggcccgtatccacgtgcaggcaaatgagctgcctgccgatggcccggtgcatcagcgcggcgcacaccgaggaatccacgccgccggaaatggccagcagtgcgcgcccgttgcccacggtttcgcggatgtgcttgagttcgcgctcgatgaaggcctccatggaccaggtcggttcgcagccgcaaatatcgatggcgaaattgtggatcacggccaggccatccgggtcgttctgctccgggaagaattgcaggccgtacagcccgcgctcttcgcaggcgaaagcagcggtcagcccgctgccgctggcgatggcggaaaagccctccggcagttccagcgcgtccacgcgatcaaagtagcggtcggtatcgcctaggcccttgaacaggggggacggggcaaaggaaatctgcgcggtgcgcttttccatcacagggcccagcaggcgcgcgcccatatcgcgcgcgagcaaaagcgccgcgctgccaatggccaggacgggcacgccgagctgatagaccgcctgcgcgcagccgccaggagtatcgtcggaaatgtcgcgcgggttgccaatcatcatgatgccgcggggattcttttcccgcaccacatcaatggaaaccgtgtagggcacgacttcgcaatacacgcgctcgccgcgcaccttgcgggcgatggactggctctgggaaccgctgaaatccaggatcaggatcatattgttgctcatggcacattcctcactcttttaacattgcggcgggcgcttgcggacgatatcgatcttgcgcagaacctgctcggaaacgtccacgcccagcacggtcatgatttgcagcccatagatcatcacatcggcaaattcctcggcgatcagcgctacgcgctcgggatcttccccgcgcatcagcgcctgtacgtccttttcttcgagccactggaaatgctccagcatttccgccatttccacggtcatggccatggccatgtgctgggggttctggatgccgttgtcgccccagcccttatcacggcatagctgcataacgcgcgatttcagctcgtaaaccgtcgtatcccggtctgccatgtgagttcctcctcctgccgtatgggcatttgcctatagtataccacagattgtggcatttgtaaatccatgcgcgggcgttttctggaatgggctggaaaaactccgccttgcgcagcaacggaacaccgggccgctaaaggtggcgtggtgcgaagatgcggaacgaccatgccgaattgtggaaccgaagccctttcgcgctttaatcgttcccggcggcgtgtacggcggggacggggcgatttttgcgccggaaaatcccattttccagagcaaaaatcgtttc

SEQ ID NO: 4313 - DNA, 2792 bp, Unknown
  16S sequences of unknown bacteria
cccgcgtctacctccaccgcgcgaacatgctaatgccactactaaggcttatgcatgaccgcgcgactgagctgtttatgggggcgaagacggaagtatattgctaaaccgaactccaccgcgagccggaactcacagaggtgcggcgtttgagcatctctgtgcgccctccgcgtaggagaatacaattaaatcgaaaagacgccagtcttttcttctatcttcttcacttgaagtttaagtgagacttaaaaaaggaaagcttcatagaaaactccagttgtctaaggtaaggttcataagggcgaaacccgcgccattatctcgtctgcgcgcagcttgtccgttttgtaggcttttcgcaaaagctccgacggaatgtattcgtcgtatttctcaaataccggacactccgtcgctccaacgagagagtccacatttatgccctctcttgcaatcttctcttgaagagacgaaagaagctcctcccctctcccgccttcgagcttgaacgtcatgtagtagcagccctcgaattcaattccgctcagcttgtatctgcccgcgttccgcacaagataccgacgcatcgtcctgaagctgcgcgttccgagccacgggaagtacgcccacgtgtagccgcctaaatgcaccatgcagctctccgtcagccccgtgttccttgcaagtgctctcgccactctaagcctcttcagcgcaccctcccgcaggtacggatattcggtgtcctcgcgaagcacacggcgcatcctctcgagaatcttcgtgtgtatctcgccgtagtcgcccggccagcttatctccatctttccgcgaacaggctttacgtagattaggtggcgcgggatgtcaagctcctccacttcccatactcgtccggcaagcgcgaatctgtctccgacgggcggcggtgtcgtgataactccaatctcgtccgattcacagcgcacggtgtagtcctccgtgtccttgaaaaccgcgtagaacttgaacgaattcacgagcttttcccctcgcagccctacaataagctcccgctcgtccgtcatctcaagccagtcgttctgtatcatcgacagaagcaggagtttataatctccctcatcgatgtactcaaacggcggcagggacagcaccttcgcggcaagctccttcgtccgtatagcacccgaggacgcgacaatcgacagggtttgctgaaacaggagcgagaacgggcattttcgtatcgcgggcggctcgatgaagcgttcctcaatgtacagctgaactatggcgatggcttgcagaagctcccacgggataagctgcggcaggggagtgttcgggagcggattttcctcgcggaataccatcatcatctccggcggatctccgcgtcttccgcttctaccgagcctttgcaggaatgacgaaaccgagttcggcgagccctgctgaatgatacgctccagccgtcctatgtcaatgccaagctccatcgtaacagtcgcgcaggcaacggcggatacctcgtcgtccttcattttcagctccgcttcttcacgtatgcttgcggaaaggaagccgtggtggatgaggaatcggtcgggctctccgcggtattcggcaatctcacgcagggtggcgcagatgtattcggtctcctcgcgcgaattcgagaaaacgatagcctttttgcccttcgtcgcgtcgtagatgtactcgtagccggggtcaagtgaaaaggtttcgctccttttgttcccctcgggagtgggttcttcggcggagtcggctgacgcaatatagaaatgctccatgccgagtctccacttcaccttagccggaggaatagcggggattcttgtgtcgcgaccgcttcccgagccgagccatgccgccgccttgtccatgtctccgagggttgcggaaagtccgatcctgcgcggagagacacctgttttgtcacggagacgcgcgagcaggcagatgatctggtttcccctgtcacttcccatgagggtatgaatctcgtcgattacgatgtaccttagatccccgaaaaggcgtatgaggtcggaggagcgtgtcataagcatagcttcaagggattcgggcgtgatttggagaatgccgcgcggatttttgagggctttttgcttatgagaagccgcgacgtcgccgtgccaatgaaaaacgggaatgccggtttcatcgcaaagctcggagatacggagaaactggtcattgatgagggatttaagcggagctatataaagtgcgccgaatgtagcgggcatattgtcatagaactccgagaggatggggaaaaaggcggcttccgttttacccgacgcggtttgagatgggagaaggatgttatcgggtgtgccgaagatgatctccgccgccgcgacctgcacgggagagagggactgccatccccgagagtagatgaactcccttatgaagggagagtaggaatcaaaaacgttcattattcttttaaattagcaaaattttttccttagactgcttcacccttctatgagacgaaatttcgtcagcaagaaagagcgaagctattttcttttccttagactactaaagccttctaagagacttccctgatgtaagtttcacttaagatttaagtgagaagatagaagaaaagacttacgtcttttcgatttaattatatcacctgcgggtgaaggtcgctcctacgcggagggcgcacaaggagtctccagagccgactccttgtgaatctacgctcacggtggagt

SEQ ID NO: 4314 - DNA, 20158 bp, Unknown
  16S sequences of unknown bacteria
ctctcggaggacgacgtcgccgcgccggagtctgtctcctatttccgccaggtggcggagctggcggaggcggaggggagccaggtactgcccatctgcgcgaagctagaggcggacattgccgagttggacgacccagaggaaaaggcgatgttcatggaggagctgggcctgcagacctcgggcctggacctgctcatccagcggagctacgcgctgctgggtctgatctcgttcctgacggctggcagtgacgaatgccgcgcctggacaatccgcaaggggacgaaggcgcctcaggcggcgggcaagatccacacggactttgagcggggctttatccgcgccgaggtcgtcgcctttgatgatttgcaggtgtgccagaccctggccgcagcccgggccaagggcctgctccgcagtgaaggcaaggagtatgttatgcaggacggcgacgtggtcaacttcctgtttaatgtttgatttagaatatcggcagcaaaacaggaggcgctgtgggaaaaaagaagaaaacaaagccccggcgtccgccgctgtcactgctggaccgggggatctatgcggcaggttgcggactttgctgtgcagtttggctgggcttgagctttttgagctattttctcggagaggtggctgccacacgggatgcgtcggtgatcgcctatacaaggggtgcttccagcgtgctgtgcttgccttgggcgctctatctgtgtttgccgctgtttctttggctgcggggcaaatgggaaagcaagcagccaatttttgggacctggaaatatcactatggcaaagcgccgtgggcggcggattgctttccgctgtttgacgagcgccggcggcattgcaagcgccccaggatgcaggcgcaacggaaggaacgcgcattctggctgcggctgtggctctgtggattcgtgcttgcaacggcgctggcttgcatgagtgtttatggtcgggtgtgtatgcgggcggaccatacgatcgcggcgtactctgtctttgaccaggagaaggcggtttattccccggatgcttttgcgaagctagaggtctcggtatatgtccgcaaatactatatcggaagccgcagttgggcttaccaggtcgtgatcacgacgcaggaggggcgcgtggtgcactttgcctgcagcaattttgtctgccgggacggggagaatactgacgatcttgcgctggacaggatgcaggagatcaaggcactgtttccgccggaggtgatcacaatcaaagggaagaagtattttgcagaagccgcaaaagagcggaatttgacgtcccagcagcgcgctaagctggcccgactgctggaattagaagaaaattgaatggaaatcacaaagacgtgctgcgtatttgccgcagcacgtctttgcagtttatttctaatgtatccttcaatcaatatctcgctggacttcgatgggctcttccaggcgggtgggttctttcaggaggcggcggaagtatttcagggcctcggcgtagtagaagccgtcgacggtgcgctcgtctaaattgaaggtgtagtcgacatagcggcgcacggcgagggtgccgtcctgctgtggctccaggacccggcgcttgcagccgaaggcgcagaacaccggcaggttgccaaagtcgtagaggtggtggaacaccggcgggattcccagagagcccatggaggtgaagaagatcgagccgtggaacgggctgacctccagcaggaccttgggcagcaggccgaaatagtccagcatttttaggaaccagacggtgaattttaagaagacgccggggatggtcgacagggcgccggcgacgcagtcgaagaaactatctgctgcttcgttttgcgtttcggcgacggcactgcggaatttgtgataaatctcctcgacggtatcggtcggagtcaggtgtagcttaatgaccgtatctggtgcgtctgtccgcatttcctttttgacaaccatgcaaacctggatatcattgccgcgggcatagaccttctggccggagagaaagcggttgcagcccgggtagcgggcgatgcagcggacgtaggctgccatgatcgcctccgtgatgccgaagccgggcagacctgccttgcgcttttcccggatatagcgctccagggcgctgatctcgatgctgtcgcggataaaattcgaggcgccgttgcggtcgggcatgatataggtcgtgacctgggccatgggggagagggtgcgcagacggcggccgtcgctgcggtcgccccaggtggggtgatacaggctgtccgtatgggtgcggatggaaaggcaggtgaagaagacgcccagggagaacattaggtccgggattttcatcaggtattgcagcggggagacaccggcgaggtaaaaagccttcgtctcgtacgcaaagtatgcgctgacacccagaaagacgacccagagcagggcaacccggcggtaataccccgcggtgacctgccggtacaggacccaaagcgccagatagacgatccagtggaccagcacaaattgcttgtgcatcccggaggccagcgtgtgctgggcgagatagatcacgatcaaaaacagggggaaggcagtccggtagaaatgctccctcccgtcaaacagaaggatcgcggcgtaaagcagcgttgctatgaccggcaggacgatctggaaccacaccgtcgttgtatctgctcctttctggcagaaatatgcgatgcggaagcctgccgagcagacaaatagcaaagccgcgagccagatcagcacgtctttcgcgctgacgtaataattcgctcttttctccatatgacaattatagcatactttaaaaggcgtggcaaattttatttcggccctgggtatatttttgcaatatatgtagattttgaggagtgcagtgcaggaaaaatgcagcactgcggcaagcgggccacaatgctgcacagcttaattttccatctgctttgccaaaaatccagcgacggtctgggccaggcgctggtcgccctcgccgggggcctgctcgtgctcgtccatcagcagcatgacgcatcccataagatcgccctgggagacgatgggcgcggcgatgccaaggtgatagcggtcggccgtctcggcggcccgcagcttggcgctgcccggcgtgtagcggtagcacttgcgccgctccatgatctgatccagatctgccgagttgggcttgtccaaaagctcccgccgtggcgcaccggccagggcaatgatgctgtcgcggtctgaaacggcggcgatatgccccgtattttttccaatggcgtcacacatctgcacggcgaaattttgcagatcacccatcggggagtattttttaaagatcacctcgccgtccttttccgtataaatttccagggggtcgccctcgcggatgtgcagggtgcggcggatttctttggggatgacgacgcgaccgaggtcgtcgatcctgcgaacgatacctgtagccttcataaattctcaagcctttctcattgattttctgcgatttttgctgcggggggatttttcggggcgcgggagctggggaaatgcggtgtttggggatggtttccgcccttattatccgcagttatttccagcttattctcccggcggtacaggtgggcaggtccagcgctttggcgcacggaatgggatgtttacaattcgttcaccgaatggcggcgaaagtgtgctatactatttttgtaatgaccgcctgtttttcgtcgcctttgcgcgaaaatgcggtgcggaatcgttggcgaaggagcagcgtatgaacatcctgttttttctgaccccgaaggcttcctgtgattacttatatgatgactataccatccgtcaggcgatggaaaagatgcagaaggtcggctattcggctatccccatcatttcccgggacggcgcgtaccgcggggcgctgacagagggcgacctattatgggcggtgaaggacctctgccagatggacctgcgcaagacggaggagcactccattatggaaatccaccaccggcgggacaaccggcctgtgccggtttcgacggagatgagcgcgctgctctttgcggcgtcggaccagaacttcgtgccggtcattgacgataagggcgcgtttatcggcctcgtcacccgccgggctatcatgcagtattggctgcagcattttgatacgtcggatatgtgaaagcgtgcgcgaaaggatacccgttcctttttcgcgcacgctttcaaacgagaaccgctgcgctgggttctcgtttgaggggattgcagcccgctgcagcgcactcacagcgcgccaatggcgcgctgttcgcacgtttgcgggctgagaagtatttttcccgacgtacatgccgccggaaaaaatgattttggctttatttgcgccgtgcgcggcgcaaactctgcgaggcttttttgcaggtggtgctgggggtcacttggcgaggtagccgccgtcgacggggaggaggacgccggtggtccagcaggctttttcgccgaggaaataggcgacgccgtcggcgatataggcagggtcgccgtaggaacccatcgggatgcggccgcacagctctgtgcgggtcgcgtcctgcgccaggtaggcggaattatgctttgtggggaccgggccgggcatgacggcgttgacggtgatgccgtatttgccgagggcctcggcggccatcctagtaaaggaggagatggcgcccttggccgcaccataatgcacctgggtcgcgctggcggagacggcggtgatggaggagaagttgacaatgcgcccatggatgccccgggcgaccatctgcttggccagctgctgggtcaggataaacggggccttcatattgacgttaaaggtgaaatcgtagtgctcgatggggatctccaagaaatcctcaaacaggcacacgccagcgttgttgacaaggccgtagatatcgccgcaggcgttgatcttctctgccagggcgaagacttcggcttcacgcgaaaggtctgcctggaaggcggtaaactggactccggcgtcggcgcagacctgacgggccgctgtgatatcgccgctgttatagtgggcgatgatgtcgtacccctcctgcgccaggcgggtcacaatgccaaggccgagccccttggaagcgccggtcacgacgacggtttttctgctcttttccataaaatcatcgttcctttctgctgtgcgttaaaatgctgcgccgcccgcaaggggctgggcgcggcgggtttgccgcgcggaggatcgcgctgcttctagtatagcaggcggggcggggaatttccatccctaccttgtaattagctacagaaaatgcggcggcgggtattgcaattggggaaatcgtatgctataatttgactacagtcaatactaaagatagtatttcaattagaactccggtcaataattggaaacaaagcctagatacaaaggaggaatgccgatgcggggattgcaggaacgcgggattatccggcggaataaaatgctgcatgctgccattgcgttatttttagagcacggctacgagaagacgacgacggcccagatcgcccggcaggcggggatgtcgcccgcctccttttttgccgcctttgaaaataaggaggcactcttgctggcgctgacgaagatcatgttctccggccaattccagaaggcggagggcatgctggcggaggtcaaaaacccgctgctgctctatggcttggagacggcgctgcagctgcacatcacggagctgtcagagcctctgcgggagctgtacgtcacggcttacacgctgccgacgacgtcggatttcatctaccgcagtatgctgggcaggctttgcgagatcttccggccgtatctgccccaggcgcatgagaacgatttctttgagctggagattgcctctgcaagtgtgacccgggggtttatggcgcgcaaatgtgatatgtactttacgatggaacgaaagctgcggcggtttctgtcctgctgttatcggctctatgaggtcccggcggcggaatacgcgccggtcattgagaagatcgtgcaggcggacctgcggtccgccgcggagaaaatgattgccagcaccgtacgccaggcggagctgggctttgaaggggagctggcacggaatacagcgcgggaagcgcaataaggaggaaactatgaaaaaacggctgctcagcattctactgtgcctgtccatggtttttggcattgcggtgcctaccatgacgccccaggcggacgccgtcatcggtgcggtcattgggaccggcttgaagatgtgtacctcgattgtcaacggctgtatcaaagcctgcaagaacgacgccgacaagggcgccggtaagggcgtactggcgatgttcaagtatgccgcggcggacttcaccggcatcgacttcggcggcagctccgggggctcgacccaggagactgtcatccagaaggtcgacctgagccaggtggaggccgagctcaagaacatcaactcccagctggagaagaacaacgccgccatctatcagctgcaaagcacggtctcaaacggcctgcgcagcctgtctcagcagatggagggcctgagccagcagatcaaggatacgaagctcgagctcaaatacagtacatacctcgacacgttctttgacttcttcaacgaatactacgagggcatcagctattatgacaagctgatgacgaacatgctggcaaacggcgcgtcggacgagtaccagaagaatctcttcgaccagttctaccagctgcaggacgtggaatacagcggcagcctgcactcggcggtcgataagctgggccggtatctgcagggcaagtacatctattccagccccggcagcgtcatcgatgttttgtcccagtactatatcctggcctacaaggatggcggcatgagcgaggaagacgcccgggccaaggcagccgagagcacccaggatatgatcagctatctctattacgcctatgtcatgggtgtctattatgagcaggccatcgccctgtatcagaccggcgtcatcgacacaaacggcggcgtctacacgacggacttcggcaccaagctgacccagggccagatcgataccacgatcgccgccctttggagctccgtggagctgacggcgggctgcgtcctggccgatatgcgcagtaactaccacagcgatgcgcccatttccctggtctatcagaccggcgaaggatcgctcctgaaccggacagtggattataatcgctttgcagcggagcccggcggcagcttctggctggcggacccggcggaggagctgaaaaactacttcgatgacgaattctgcgacgcttttaccggtatcgcaaagctgagcatagagaatggcagcacactcacgatccatgatgactactacgtccacattaagacccccgaggagcttggcggcggcagcagcagcggcgaaggtattacgatcatctcccccaccacccccagcggcacctatactgaaaagctgcacgtgacctttggcgggcagaccgtccacacctatttcatcaccgtttacaaggaaacgggcggcggcacctttgccgcaggcttgggcacggcggactatccctatgtggtcaagacagaagtgcagtttaattccatcaagcagcacagtgacgaccactttgtgctgaaggcgaatctggattacagcaatctgggtgccagccccatccagaaattcaccggcagctttgacggcaacggctataccatctccaactgcacgattgactcaaccgtgtatcgtgagaattcctatgtaggtctgttcggcgagctcactggcacggtgcggaatctgcaggtggaaaatataaaaatcaatgcggtcaacagctgcgtcagcgccagttcagtgaccaccaagatgtatgccggcgccatcgtcggatacgtcaacggcggcagcctgctttactgctccgtttcaaacagctctgtcagcgcgacaaacagcggcagctacggcgtctgccatgccggtggcgtagtcggcagtgcggcgaacgcgacgctgaccaatttggtctgccgcgatacctctgtcagcgcttctgcaaagtacgagagcactgtatcggactatgacgggcaatttgcccatcccggtgatcccggctgggcggttgcaggcggcctcgtgggcgcgagcgatctttcggatctggtacgctgcggctatacccagtccgagggctataccggcaagatcaaagccacgggcggtaccggcgcatgcgctggcggcctgatgggcacattcatctcgggtacggttttttacaactacgcccccaagctttgctgggcgacgatggccacagccccggaggcgacttcgaattacaccagtgtcaacaaggattgcatccggtttggctccgtggcaggctacggcagtacgccgatgcgggtcctctacaaatactggagcagctatcccgaagacctccgcagcaaattcaacagtgtcagatggtggcttgactacgaagcggtgaacgtcaataccatcaacaagcaggcgttcattgatttcatgaatgatcccgatatcaacaataccgactataagcagtatctggcctttgacggctttgaagagcgcagcgacggcagcggcctgaaccccctgttccagttttcctccggcagccggctggatgtagatcagtccctctttgatctgccggtccggcggacctatgtcgagggggactatatcgatctcactggcctgtacagctatcagtgcgtcggcctggagaagcagagtaatatcacttacccgtatgtgcgtatttcccagggcgcggggcttttgaacgcgccgctgacggcgggtacgcataccatcgaattgactgcatccaatggcagcccggtccgcttcaccatcgaggtcctgcccgcgtcccacatctatctggagtcgttcgtcaaagcgcccacctgcacggagggcggcgagtcggtccagacctgcctgcactgcggcgcgcagaaggagcggaaggagctggaggcgctgggccatgattcggtccttgtagatccgggctatccggcgacctgtacctcaaacggcagaagccccagctatcgctgcagccgctgcggtctggagtctggctgggggcttatcctggggttccatatctattccgagcacgttgatggctacccggctacctgcaccaaggacggcatgacggaaggctatatctgtgcaaactgcggtgcgatcggcagcggctgcgagccgatccccgccacgggcaagcaccgggcggtgaccgtcgagggctacgccgccacctgcacggcgacgggcctgaccgacggcgagatctgcggcgactgcgataccgtcctgaaagagcagaccgtcatctccgccacgggccatcacgatgtggagacgacgatcctcgccgcgacgtgcgtcgctggcggcgtgaaggagtttagatgcagcagctgcggcaatgtctccaagctggagaatatcgcgcccctgggccatgactacaaggccgccgtcacggcgcccacctgcgaggccccgggctacacgacccacacctgcactcgctgcgccagcagctacaccgacggctacaccgcccccaccggccacaaattcggcagcggcaccgtcaccaaagcggccacctgcacgagcgagggcgagatgacctacacctgctcctgcggccagactcacacggagcccatcgcccgcatcccccacagctataccccccaggtgacaaagcctacctgcaccgcaatgggcttcacgacctacgcctgcacctgcggcgacagctacaaggatgactacaccctgcctaccggccacacctggaacgacggcgagacggtcacggccccgaccctgacccacaccggcctgctcctgcagacctgctccgcctgcggcgcagaacgggagacgatcatccccgccctaagcagctgcgacggtggcgagggctgcccgagccacgccttcctagacgcgccggaccgcaaccactgggcgcatctgggcatcgacttcgtcctcaagagcggcctgttctacggtacgtcggaccagaccttctccccggacctggccatgacccgggcgatgcttgtcagcgtcctgtaccgcctggcaggcagccccggcgtgaaggacgtcaagaacaacttcacggacgtcccggcggacgcgtattacgccagcgccgtgatttgggcgaaccagaacggcatcgtctacggcacatccgagacgaaattcacccccgatgggaacatcacccgggagcagctggcggcgatcctctaccgctacgcgcagaatgcgaagtacgacacggataaggtcgcggacctgacggccttcccggatgtggacgatatctccgcctatgcccgcagggccctggcctgggcgaatgctgagggcctcgtctccggcacgctggcatcggacggcgagacatatctcgacccccagggctatgcgacccgggcccaggtcgcgtccatcctgatgcggttcgtcaagaacattgtggaaaaataaatcaaaccatataagccatattcgatagaaatcatcagaacgacaagcggcaggtacgacctcgtacctgccgcttgtcgcggttatccggaattcaggattcctaaacgcagtgcaaaacgcagtgcaaaatgtggcaaaaaagcggtgcggggaagcgacgaaggcttgccccgcaccattttctggattatggacgaaatactgtagcggagggaaatgccggtaggtttgcatatgtgaagaaaaaatcggccatgctccggttgctgaattagctgcgcaggccggcgtggtggcctgttagcttgtgagatgaccgttatcagctgctacaatcgtcagaaatgcgcatgcttgcgccggagcgcaccttggacgagcgcctgctaattgccttttaccgtaataatcgcctcgttggagataaccttgccgccgctggcgtcggtaacggtgagacggtagcggtaagtcccttctgccatgggcgcgtgtaaggttgtggtccaagtggtatccgttacgttttgctgtccatgaattccgctccacatatcgtttttatactcttcgacgcgataaaagtagggagcgacgccacctgcaattgtaattttcagcgtatttaaataattgcctggagaaacggtcgcattggtggggtgggcggtgatgcgcaggtcgctttttacggtaatgatggcttcattggaggtgaccttggttccgctggcgtcggtagctgtgaggcggtagcggtaggttcccggcttcaagggagcagctccaccggagttccatgtggtgaaggttacatcgcggtgctcggcaataattatccagcctctgccctcatagtattgttcctttgcataatgatagggctcgctcccgcctgcaattgagatgttgagggtggtcagcttgctgttgggagcgacggtcgcaccggtggggtgggcggtgatgcgcaggtcgctttttacggtaatgatggcctcattggaggtgaccttggttccagagctgtcagtgactgaaatacgatagcgataggtgccgggagtagtcggcgcattgccgttaaatttccactgggtgtagacactctcgtgctcgccgaggagcttccaccctgtgccttcgacatacatttctacttgataatagtaataattcggtacaccgccggagacttgaatgttcagtgttgtcagcatttcaccgggctggacagtcgcattgcttgggtgagcagtaatgttcagtgggcctcctgaaacggacagggtaacctcctcggaaacaacgcggtcgccgttggcatctgtgacgataatgtgataattagcggaccctggcttatcgcgagcagttaatgcggggtcccaactggtctgtgttgtcggttcgctggtggcgacatcaatccaggtgttgctgccggtatcaaagccctcggctctgtagacatagggagccttgccgccggaaatggaaatatgcatcgattggaaaatctcgcccggcgctaccgtgctgctttgcggctgctggacgatcgtcaacggaaggggcgccggcgatacaactttggtgatataccggtgcaggaaagagacaatctgcgctcttgtgcagggggcgtttggggcaaagcttgtgggcgtcacaccagcggtgatgcttttttccgccgcccacagaacggctttataataatactccgatgcccgcacatccgtaaaggggtttgtgctggtagcagcagcgggagacccggccgcccgccaaaggaacgttacaacctggctccgggtcacagtggcctctgggccgaactgcgttgctgagatgccataggtcacgcctttttctacggcccagaggaccggagtatagtaataggcgctggctgcaacatcagtaaaggggttttctgttttctggggcgtaggcttgcccaaggcgcgccagaggaaggcgacggtctggccccgggtacagggggcattcggcgcaaagctcgtcggcgtcacaccggcggttacgctattctccacagcccatagaaccggttcataaaaatagtccgagctgtttacatcgtggaacggattttcggctgccagggctgtcgtgcccagcagcaggcaaaggatcagcgccaatgatagcagcgcggtacagcggcgtgcttttcttgttttcattttgattcctccccgttagaattaaatttgaattaattttaagcgaatagttcgggtattgacagtcgtttcaatggctttaagaatgctgcaactgcaatcgcgtccggcggtggaaagcgattttatccaccgcgtaagtcggaggctttgctcgtggcgtgcttgctgcagctttgctttgaagtcagaacagactgcgttgggggttccattgcccctttctaagcgacacggttcactgggggaatgatctcttttgcttttacatcacctgccttttttgcatcattacatcctagcaccatggcaacattacaccatggcactgttgtgtacctcgttgcacgttctggtttttacaagcgtttgcctggctgcttttcacaggcaacggcttggctgccgcaggcgggaaagctgctgcccgtctgccgacggaataggctgcctacctgctgcccggtggctcataagaatagataaatattggagaataaagcttatgctgtgcgccagcgtatatggacgcaaggaagcctcctcccaggattctatccatattatatcgtatttttctctaaaatgctatgataaaattgcattatttttgtgttaagctgccatatagaaacatttcattgcagccaggcagggaacgataatgctctgctgcttggccttttgcttgcggagaagcaaatcagagagattggcgtaagggtgtgcccccgccgtcttcggcgaggagcgctttaagctgcagctgacggtcacgttctaagaaaatacagcgccgcgccctgggcgccccggtgcgcggcgctgcacgtttgcggaggccttcctgtgcttttttcagaaaaatggtcaatgggcattgacaggggaaaacgcgccgtttatagttaaaagaaatagaaaggcacatcgccctttttggaaaggggcggcagggaattcggtgcaaggccgaagcggacccgtcactgtaacagcgagcgcagcgcagaatgccattggggtggcgtccctgagaaggcgcgccgcgcgatgaactggagccaggagacctgcgtgactttggaaaatggctgcgggactcagttgcattttggaaggtgcaggcgcctttttgcagagcagctggcaggctgcttcttttttgcccgggcagcggaagagaacgtaagagaaaccaaaagatcggagtttgaacgcatgaaccatctaactgcattactgctgggctttggtgtcgacctgctgctgggggacccccggtggctgccgcacccggtccagggtatcggctggctaatcggcaagctggaggcggcgctgcgccgctgcttccccacaacggagcggggagagcgccgcgccggggtctggctggctgccttgacggtcgggctgacggggcttaccacggggctgtgcctgtttttggcggggctgctgcatccggcggcgcggtttgcgctggaggtcgtcatctcctggcagattttggcgacaaaatccctgcggcgggagacgatgaaggtcgtccgggccctggagcatgggacgctggacgatgcccgccgggcggtcagcatggtcgtcgggcgggacacggcacagctgacagaggccgaggtcttggcggcggatgtcgagacggtggcggagaacgcagccgacggcattctggccccgctgctgtgggcggcggtcctggggccggtgggcggcatgtgctacaaggcggtcaacacactggattcgacggtgggctaccagaacgagcggtatctgaattttggccgggcctcggcgctgctggatgatgcctgcaattgggttccggcccgggtggcgggctttttggggcgctgggcatgcagctgggcgggacgcatctctatttcggcaagccggtggtcaagccgaccattggcgacgcggtgcggcccatctgccgccgggatgtcaagcgggccaacgatcttgccctgctgacggcgctgctggcccttttactttttgatgtactgcccctggtgatttggaggatctggctatgacattggaacacggcggcgatctttttgccgcgcagcaggtctattctggggaaattttggatttttccgtgaatatcaaccctctggggcctgccccccaggcgctggaggcggcccgggcggcattggaacgggctggggagtaccccgaccccctgtgccgcgccctgcggcaggccattgcggcacgcgatggcgtgcagccagagcaggtgctctgcggcaacggcgcggcggaggtgatcttccggctggcgctggcgctgcggccccgggctgcgctgctgacggccccgacctttgccgagtacgaaggcgccctgcgccaggtgggctgcgattgccggttccacctgctgcgggaggatgtgcagtttgacgtcacggaggagatcttgggcgcgatcgaagcgcccatcgagcttgtcgtcctctgcagcccaaataatccgacggggcgggtcatcgcgcctgcgctgctggagaaaatcctggctcggtgccgcgtcattggggcgcggctgctgctggatgagtgctttttgccgctggcccaggcggggccgggcatggctccgtacctggcggcgtggcccgagctctttttgctgcgggcgtttaccaagacgtatggcctgccggcgctgcgcctgggttacggcttgggggaggcggcgctggtggagcggatgctggcctggggcccgtgctggaatgtctcgggcccggcccaggcggcggggcttgcatgctgtcagttgccccagtggccgtctgacgggcgggcgctggcggcaagcgagcggccccagctgctgcgtggcctggcggcgttgggctgccgggtcatcccggggggcgcaaactatctgctgttctgcctgccgggcgtttttgatttaaaagaacggctgctgcggcagggcgtcttgctgcgcagctgcgcgaattaccgcggcctggggccggattggtaccgagtggcggtccgccaggcggcggagaacgagacactgctgcgcgctttgggcgcggcattggaggattgaccatggcaaacccgatcatgatccaggggacgacatccaacgcgggcaaaagcttcctagcggcggccctttgccgcattttccggcaggacggctaccgggtcgccccgtttaaatcgcagaatatggccctcaactccttcataacgttaggaggcctggagatggggcgggcgcaggtgatgcaggcagaggcggcgggcatcgcccctactgtggagatgaaccccatcctcctcaagccgacgaatgacaccggctcccaggtgatcgtaaacggcgaggtccggggcgtcatgagtgcgcgggactattttgcctataaaaaggcactgatccccgaagtgctgcgggcgtaccggagcctggcggcaaagtatgatatcatcgtcctggagggggcggggagtccggcggagatcaatttgaagcaggaggacatcgtcaatatgggtatggcgcagatggcgaatgccccggtcctgctgtgcgcggatatcgaccggggcggcgtctttgcgtcgctctatgggacggtggcgctgctggagccggaggagcgggcccgggtcaagggcttgatcgtcaataattttcgcggagataaaacaattctcgaccctggcgttgcgatgctggagcggatgacgggcatccccgtcgtcggcgttgtgccccatctgacggtggacctggacgatgaggactccctgaccgagcggttcgactgcgccgggtcccgggggcttttggatatcgcggtcatccggctgccgcgcatctcgaattttacggatttcaacgccctggcgcggctgccggaggtctcgctccggtatgtcaagcacacgtcgcagctgggctgcccggacgcggtcatcctgccggggacgaaaaatacgatggaggatctgcgctggctccgccagagcggactggaggcggccatctgcaagcatgccgcaggcggcggggtcgtgatcggcatctgcggcggataccagatgctctgccggtctatcgcggacccagcgggggtcgagtccggcggcagtatccggggcatggggctgctggcggcggataccgtcttccagggcgaaaaagcccggacccgggtcacggggcggatagaacatgcagcgggcatcttccgtgctttgaatgggacggcattttcggggtatgaaattcacatgggcaggacctccggccagacgaacctggcggtcctggagtcgcaagggcaagagaagctggacggcatggcaagcggcaatatctggggcagctactgccatggcatctttgacgagggcggattcgcccaggcgttttgttcctgcctgctgcgggccaaggggctggacccggcccagggcgtcgaggattgggcggattataaggagcggcagtatgacctgctggcagacggcgtccgccagtcgctggaccttaagaaaatttacgagatcataaatcgcggcattgaactgccgtgacgcgccccttgcggcgcgggatgaaagaagggaggggcgtgccatgcgccttgtgcgatcaggcctagactgccatcgtgcgcccattgcgctgcgggagcagctggccttttccaaagagcggacctcgcagctgctgcgcgccatcgcgcaggcgccgggggtcgacggctgcgtattgctttcaacctgcaaccggacggagctttatctgacaggcgcggtccaagaaccgttccggctcctttgccaggccgctggtgtggcagcggagacatttgccccgtatattgtgacgcaggagggggacgatgccgccctgcatctgctggaggttgcctgcggcctgcactcgcagatcttgggggagaatcagatcatcacccaggtccgccaggcgatggagcttggccaggcggcggggacggcggacgcggccctggcggcgctgtttcgccgggatgtgacggcgggcaagcgggcgcggacggaggtttcaatcgaccggggcgtgccatctatggggacgcgctgccgggaggtcctggcgcaggagctgggcgggctgcgcggcaggcgcatcctcgtcatcggtaacgggcagatgggccgcctagcggcatcgctgctgcaagaggccggggcccaggtccaggtgacgctgcggacgtaccggcacggcgagaccatcgtccccgccggatgcgggacggtgccgtacgcggcgcgggttgccgcgctgtaggggctggacgccgtcgtctccgcgacggcgagcccgcattatacgctgacactggcgcagttgcaggcggttcgccatccgcccaaagtggcagttgatctggcagtgccccgggatatcgaaccggcctgcgccgcgcgtctgcgctgctttgacgcagacgccttgggcgcgggcggccccggcagccatgcggagcttgctgccatgcggcgcatcgcgcaggaggaattggagaagtatctgcagtggcagcggcatcaggcggcctcggaccggccgatgcgctttccgctgtttttggatttgacgggcaagaccgtcgtcattgttggcggcgggacgatcgccgcccggcgcatcgggacgctgcggcgctttggtgcgcggatcgtcgtcatcgcgccgacgctgaaggcgcggccggacggcctgacgtggctgcagcggccctatgcaccgggggacctggacggggcgctgctggccatcgccgcgacagacgaccgggcggtgaaccgtcaggtgggcgtcgacgccaggcgggcgggtatccccgtctccgtcgctgactgcgaggcggagtgcacgttttatttcccagcgatctgcaccggacaggacctggtggctgggctcgtctccacggggaaggaccatcacaagacggcccaggccgcccgggcggtccgcaagacattggaggagctggaatgaagatcagagttggcagccgcgacagtcggcttgcggtgctgcaaagcgaaattattttgcggggcatcgccgcggcggccccggcggcggagttggaattggtgacgatgaagaccaccggcgaccgcatcctgcacaagccccttgacgagatcggcggcaagggcctgtttgtcaaggagctggatcagacgctgcgggacgggcgggtggatttcaccgtccactccctcaaggacctgcccctggatgtgccggaggacctgcccctggcggccttttcccagcgggcggacccccgggatgttttggttttgcctgcgggcgcggcggcgctggatccgacaaagcccatcggctgttcgtcccggcgtcggcagctgcagctgcgcgcgctttaccccggtatggagttcgcgccggttcgggggaatgtcctgacccggctgcgaaagctggacgagggggcgtattccgccctggtcctagccgcggcgggcttgcagcggctggggctgctcgaccgcatcagccggtatttcagtgtggaggagatgctcccggcagcggggcaggggattttggccgtgcaaacccggcgtggcgtcgactgtgcgtgcctggcacaggtgcacgatgcggacgccgcctgctgcgccgcggcagagcgggcttttgtccgaacgcttgacggcggctgtacgtcgccggtggcggcctacgctgtggcagagggcgaacgcttgcttttgaccgggctatatgtcagcccggatggacgaattacgcgcaagggtgcgctgcaggggaaaaaggaagaggcggcggctctgggcgcgcgcctggcggagcagctgcgagaggaggcggcgcggggatgatgggcagtgtgaccttagtcggcgcggggcctggcgacccggggctgctgacggtaaagggcgagcaggccctgcggcgggccgcttgtcagcgccagccccggctgtcggagatcgaccggcagctgcggggcaccatgaccgagctgtttgccgcctccctgcgccggggggaggggggcgctcccacggtggaggaggtgcggcggaagaacctggccctccagcagg

SEQ ID NO: 4315 - DNA, 13099 bp, Unknown
  16S sequences of unknown bacteria
gaagtagaaatctactaccgcttcatcggcaaaatcgactgacctttcttttttatccaacaatatctttaattaagggagacaggcctttccgatcaaggcaccgacttcattgcccgcttcgatcatgccgctttcgatgcccaggttgcagatcgttccgccctccaccatgtggaacagaccgaccgtatcctgctgttgatcgatatgcagatcatagatgacatgccctgcgccatcgaacgtgccgctgaagcggttcacggaggccatgccggcaaacgcgatatccttcatctcgatatcggcgctcatccgataataagctgcggcacagtctgcagagatatcgatcatgcgggccatctcgaccagatcttctccatcctggatcagatacggatcttcctcggtccctgagccttccaatgacgtgatcaccatgacctttccagaaaattccggatagccttcactgccctgataccaggtgtcatagccttcctgaaggccgtcattcagctggccatagagcacgccgttggtgaacgcttcctgttgcagcgcgatgacttcttcccgctcagcattgccgatgccagcgctgccggccgggtagaacacgttatgcatcacggtgtcatacgcagcgtctgcggctgattcatcgtagccaaacgccgttccggcatatcgtacagaagcagagacatccgcgatggaataacagttgcgcactgagccctccagtgccggatcgatgctgcggttgaccgatccgcacaggccgccgactgattcttcgccctggatagttccccaggcataacagttggctatggcggaattattgaacatgccgaccagaccgccggtgttatgtccgccgctgacctctgctttggagaagcagttcatgatcgtagcattcatcgttcttccgatgagcgcgccggtctggtttccgccgctgatcgttccgctggcgatgcctacattgcggacagtgccgttttccacgaaggcgaacagtccggtgttctcgctgtcatccgtgatctgcagacctgagatcacatggccttggccatcgaacacgccgctgaaatgtgtggtcttgccgatcggatcaaaggcttcatcctgcaggtcgatatctgcagccagacgataatgatcatccgcaaatgatgcgtctgatgcgataagagaagacatcagccgcagatcggccgcagtgctgatcttgtatgggctcgcggaggtgcctcggccgaccaggccgcattcagacatgccagtgtcaaattcaggcacatcccattctccgctcacccacacgctccagtcttcctggcgctgtgcattcagcaggtccatcagcgtgccatccgcgaaatcggctgcggaaatgccctgcactgtcgcgatggtattatttcccaccggcgccatctgtgactcttccggataatacagctgtccgtaattggtcacatatccagccgctgactcatcatagccgatgagcacgccgacattcgatccaccagatacggtggctctggtatagcagttggcaacgtttgattcatacgcaggatcgatgctgcggttagcgccgccgagcagaccgccagccgtcacgccgctggcttcgaccttgccccaggtgtagctgttgtacagatcggagttgttgaacatgccaatgaggccgccgacatcattcgatcccgatacatctgcctttgagaagcagttgatgatctccgcatacatcgtccggccgaccagaccgccgacgcggatcgtccccttgaccgttccgctctccacgccgacattgcggatcgttccgcgttcgacaaagccgaacagtccggatggctcgctgctcacatcgacattcaagttcgatacggcatagccgtttccatcaaaggtaccgctgaatttgtgatcgttggttccgatcggcataaacgccgcaccctcaagatcgatgtccgcagtcatctcataactgctgtttccatattctgaatctgcattgaccagatccgacatttcccgcaggtcagcagcgttttcgatcagataaggatcttccgtagttcctgaaccggaaaagggcgccgctgcctggatcgacactggcagacattgcacgcacagcagcaatgccgccagcgcagaaacccattttcgaaagctcttcattcatttttccaagtataattattataattatgaccatttcctttcttctttacttctcagaaaacgcaaaatgaatgggcacccttacggccgagaagaaaagaaaagctgccgtaaacgtgcccatacattcatctacgatacccactggtaccacctcctccccgcgttcagtatagcatcgtaaaaaaatgctgtaaacactttcttccggagaatagtaggttgaacaaaacacatcctgaagtagtcatcatcgctcatccgcatgatgatctcacgatcgttcacccctcgttctgcttatccagcaaggatcatcgctctgtctgatcagatgcctgatctgttaacctttcgcttgatcatcgatgtgttagttccttgcggatctgatcgatcaatatcaagtcagcaggtaaccactctacactatttaattcctctgcgctcagccatttgctcgcttcatgttccaacaataccaaatgcccgtgcttgaccgtacaccaataacaatccatggataaatgaaatgtcggatagtcatattccaccgtatccatatatgcattcacttctatctctgtatccagttcctctttgatttcccggatcaatgcttgttgcggtgtttctcctgcctcgatcttaccgccgggaaactcccacccgcctttcagttctccatatcctcgctgtgtagcaaataccttatcgccatgtttgatgatggctgcaactacttttatcgttttcatttctttgtccgacatatcgaaatgtcgcattgcccgatcattcccatatgcttttcctttctattcatacgattaccgctgttgatcttacggtctcttgatcttcacgccttggtgatatagtcaaatagatcctctcgaaccaaagtatccagatgccattcaatttctacggccgttttatctgtattggtcatgacaaacgtcttcgctttgccgcttggtgtcatggttcccatataataaaactctttggagatcttgtcttctttatttttgcgtacgaataaatgaacagccacgcctaattcttttgaccgcaaaaaggtctgaacatcctctgattcaagcgttcttccgctcttggatatagcgatcagcgttccgctattctcaaaatgatcttcatatttggtcgtatcactgatatcatctggtttttcataattgatgaagaccggaaatgtctttgtgtgacgatcatatttatatccgccaatatttaacggaacctcacttttctcccaattcaataaacggcacacatcctcatatgtatatttttgatagagcgtcaaattggtatcacgataccgtttcgcataatctctgagatatcttgaaacaccgaatgcaatgagttcctgcacctgttgcttgaaggcatcatgacataagcatcgctcaaatgacgtggatatctgatcaaacagcatgccgtccttttcttgtttcgtcaggaagatacatgtctcaaacgtcttcttcgccgctccggaaggaaacagattggtcagtacagaaatcacgctttcacgttgaagacgatcgacctggatctgatatttgcgcttcatccgttctacccacgtcgacatgatatgctcaggatgatcgatcaggacgcttagcaattccagctcatgcacacgttttccatttgccaattttccggagataaactcgatgtatttttcttcttcctcattcagatgaacctgatatgctttttcgtatttgaccaagaatcgatgatatgatcccaatgaaggatgatcaaaaacacgcaggacatccatctctccatatgcatcaaaatccttgagcgaaggaatatgacctagcttgttctttagattgaaataattatctttgagcaggcggacatcgttgaaattggcacgatcaattgcctgatagatgcgtttctttgcgatctcatcaaaatgtaaagtagatgcaccaggaatggtcctggtcccttccatcagatacctgcgaatattgtctttgttgtatgtccgatcaccagataaagcgatcgggatcatgaaattgtttttatagtttccgataaaatccaacacgacgacatattcttttccttgtgctttacgcaatccccgtcctaattgttggataaaaacaatgggggactgtgtcggacgcagcatgatcacttggttcacttcgacgatatccactccctctgagaatacatcaacggtcaagatatagtctaatggctcaagcgcgagctgagcatctgtctcatccatcgccaaccgttcgatcgcttcggagcgaacattttccggatctgctccacttaatgcgatcgtccgccatccacgcgcattaaattttctagaaagttccttggcctcttcgaccctgctgcaaaaaatcagtcctttgactcgattgccgctatatccataatacgtcgcttgttccatgacatagtctgctcgtgcatcgctcgttaggcgattgaaatgttctaattgttgttctcgtgcttctccttgatcatcgatcatgaccagatcggtaatgccaaaataatggaaaggacacaagagatcttcttccatcgcctgctgcaaacgaatctcatatgcgatatgatgatcgaacatttgatagacgttattctcttccacagcatcatctcgcctatccggagttgccgtcatgcctaaactaaactgcggtttaaaatatgccatgatctttcgataagaagaggagaccgcatgatgagcttcatcgtaaatgatcgcatcaaaatgatccggtgaaaaccgatacaaatgatcatctttacttaacgtttggaccgtcgcaaagatataatcctgatcaaattcctgtttttttcctgttaactgtcccatcgtcacctgcaatggcaagatacgatgaaatgatcgcatagcttgtttggcgatctggttgcgatggacaaggaataagacccgtcgaaaatgaagttctcgcatagcaaatgctgcagcataggttttccctgttcctgtcgctgaaatcaacaatgctttggaaatccgctgttggcgaaattcaatgagccgtttgatcagctcttcctgcatgcgattcggcttccattcttgctcatgatgatcttgtgaactttgctcacgcatcagttcatattgtttttctacccactgattaaatgcgtattctttctgataagcgtccatgaactcatcatacttttgcgtatcggcatgattccacaaccgctcaaattcagcgagtacatcttttacgatgcttccatcctttgatgcgatgatcttcgtgttccattctttatttttggtcatcgcatttaatgttagattggcactgccgataacgatccgatatatttcatcttgcttgaagatatatcctttcgtgtgaaatcctcctgtttcatgattcgtacgaaacatacgcaattctatattgtttaatgaagccaatttcatcaatgcttctggttcgctgaattgcaaataatctgtcgtcagaatacgtccgggtatattacgcttttctagttctttgagtgtctgaagcaatggagtaatgccgcttttagtaataaatgccacgctcatgccgaatgaatcgcatctcagcagttcttgttctaaagagacaagcactttttttccttgtatatgatcattggaaatcagctcaggtctaaattcctgtgctgaatcatgtgcatcgttcaaaaaagctgtctgcaatccatctgataattgacttaattgtttgttcattatgttgccctcaattcatcatgccattactcacattatactcttttgtatgtgataaaactagatcatccaatgatcgctctgcccatcaagcaagaatccatatgcagtttcgcccattttgatctctcttgtatttttgtttatcttttgatcattctgcatagacagatcgattcatcaaaaaagaccggcagtccgtcaaggattaccggtcttcatcgtcatcgatcgatgatcagatgtgatgttttctctttctcagcatcaaggctgcagctgcgccagacacgatcagtgccgctgcagttgtcggcagtgctgaagctgccgctgtgtcagaatctgttccctctccaggcttgccttcatctggatcctgcggatcagcaggtgtttccggattcttctgcagagcgttctgtgccgcaatcagtttcttcgctgcggcatcgacctgatcctgcgttgcagtctcatcgaccatcactgcctctgcttccttcagggcctgttcaaacacatccactgtctctttggtgtacagcgatgtatttactttcttcgcgtcggcaatggcctgttccaatgcactcttatcgctgtcgacgatatcctgcaggccgttgatggccgcctgcagattgcgataagcttcatcaagcgcctgggcatcagcgttttcatcagcaagcactgcctttgcatcttccagtgcctgagcgaaagcttccctgctggctgtcgtcttatggctcagatcgatggcttcagcttcgctgatcaaagcctgcagcgcatctctggctgcttccacttcggtcttcatgacgtttgtgatcgcattgaccagtttctgcagcatctcgtccacctgtgcctgtgtcggctcagcaccaagcagctcttctgcttcacgcagtgtcttcaatgctgcttccgcactttctgtgtcatagctttccagattcattgctttggcggcattgatcattgtttccaggatctgcgtatccgtatgaacctgtacttcaagctggttgaagccagtcacgataccagaagcatcgaatgcagattccgccgcaaatgcgtcacttgcctgtttcagggcagtgaggctttcggcagtatacgtatcagtgagctcatcgacgatggcgctcatcgcatcaacgatgagatccttgcttgtctgcaggcttccgctggcatcctccgtgctcatcagacgctccacgaccgaagcgaaagccgtgtcgatagaaacaggggtattgtcataataaacggtagactgtgcattgcttacggtcgccaggatcttatccagatctgaagtggtgtagtctttcttcactgcttcttcagaatgcacatcgatcactttctgcagggccgcaactcttgtcggttcgctgcgctgaatgtccagggtggcattgaacagatctttcattgccgcgttcatcgtttcctgtgtagcagaagcatcattcagcacattcttcgcattggtcagtgcgtcattgaatgcgctcagactgtctgatgcatatccagcagtttccagtgtgaaggcgtggatgacatcttcaagctgtgacacattgccgctgacagtgcttcccggcaatgccgtacgcagattgagcccatcagaaacgacaaatgcgtctgccatgctcagatctaattctgtatcaacggtcgcgcttacgcggatcgttgccaggctcatcgtgccattcaggccctccgtatcgccttccatactgaaagcaacagtgtattcgtcatcattttgcagcatgcgggaaagattgcgcatatctgcggtcgcttcagcagccgtcgtcgtaatcgtcgagacattgatgctctccatgtcgatcggcaaacggagaccaaatgcgtaaacatctttcaggttcgttccctgcagcgtgatggaagaatctgtcgtctccgcttccatgatcggcacatctgcggcatccagctgcggatcatccgggttgacggccttctcctgtgcgttgacaaagccttctaccgtcagcttcacctcattggccgtgatgtctgtcttcgcgagcttgaccatgaccttcggcgtcgtgatgatcttctgatccgcaaacggagatccttcggttgcataatggttcagatccggggcttcgttataatagtaaacatttgtgccttcattgaattccgcctcgctgctgacttccttcagcgtgacttcttctccgccgatcgtcgcagtgaccgtttctggtttctctgaaacattgacgatgaactgcgttccgcgttcgctcttcatgccttcaaaggtaccgctcatcttgcctaccgtgatgaccgcagtgcctttttcaccggcttctggcgcttcagaggtgatgtgagtcatggtgccgaggccttctttgtagtcctggctcatgccatcatcatcgtaaagatcgaaggtagtcgttcctgcaggatatacctcaaagatacgatcttcatcgccgttcaggaacagctgtgaattgttctctacatcttttggcaagatagcaccattcttcacaaacaatggcaatttccataatggagcatcaaagttgttgatgacctgtccgccctgatactgctctccggtaaaatagtcgatccagatctgatctttgtccggcagataaatgttgttgcgcacatcgttgccgttttcatccatctgcgtatcctgatagaccggagcgacaagcaggttttcgccccacatgtattcatactgtgtctggttgccccaagtaaacggatcctcaggatattccagcacgagcgcgcggatcatcggtacgccgatgtcatgtgcctgcttagcataagtgtagttatatggcatgaatgccgtcttcatcttcaggtacatcctgttgatggacgcatatagctcaccatgataccacggattcttttccgcgccggtcgttcagccatccatgttgatttcgatcggcgtgaatgacttccactggaaatcacgagtagaaatgatgtttcccgatccatagatgccatccaggtctgatccgacgttcgggttgccgctgagtccggcaccgatatacgtcgggatatggaaacggatatactcccagtttccgccagtctggtcaccagaccacaatccggcataacgctgtgttcctgcccagccatccagggaaacgacaaagccacgattatcggaattgttttcgattccctcatatgcctgccgtactgcattgagtccgaatgagtagccatcaccgacccaggccacatcggtcttgatcatctgggtcccgccgtttgctacttcgcgatccagtttgtccagatcgttttcggtccacaagccgctgacgaagccatagtttctggcttcctgcacgaatttgcccaggatgccattggttccggatattcgttaaatgcaccggactgtggctcgacatcgattcagaatacctcattattgaggaaagtgatccgtgctttttgtccgctgccataagtcagatagacatcgtttccttccacgcggtctatgctggcatctgacagctgccagtcggtgtcttgtgcgctgatcgtcacagcgccgggaacgactgcactgaacatcatggcagccgcaagactcatcttcccgatcatcttcaagcttttattcataaacacctcatccccaaaaatttccattgattatgtataaaagaaataaccgccagatgatattcatcgaacgattatttctgacagcacaatcataaaattcacctccgctttctcgtactgccagaacatgaagtattattgcgacataacacatcttgatgttctgtcttcagcgccgtcttttttgacagcgcttactgatatcggcaataacataccgtcattattttgtaaacgcttaatgctcgtttatacaaattctggttaatttgtgcgcattttgtgaacataagtgcaaatcaaaacgttccaaacatcaagatctgatcagatttttcagtcttgtcccggaaattcgctcaaaaaagagcatacgtccttgccctgcaagatatgtcattctccccagcatcagcagatagacgattcctagcgcagcacggataaacagattcaaagggacacccgatggttgaagcatttgcgcgatctgaccaaacagccatggcagcaacagaaatgcgcctgacaaggcatagcgaagcaatggctgccaccatttgagcctgccgcgcagcgcgatgacgcgaaagcgcatgaagcgcatgcctggtgtctgcccatgaaacaagataggcgtcagcgcgaaatacccgcagaacagcagcagcgcgctggagggaagctgcagccgcaaaaatgccagcatcccataaagcaatgggccaaacaaggtcatcacgagcagatcagcgataaacgcgatcagccggcgtccaaaagaaacagacatgcctctttcatagctgcggcggtcaagctgcgcgcgggccggaaggaggcgcagaaacggctggatgatgccatagccgatgattgccaagcagatcatccacgtcaaacagccgataactgcgtggataaatgaagtacagaccactgagctgggtcagctcaaagaacaaggagagcaggaacgtatacagcacacacttgcggaagctgcagcgaaagtaataacgcaagtagatgccgaaggggatggtcatcatgatgttgaacagcatctgaagcagcgcacggttatgcagcagcgaaaagaaagaaaatggctgatccgacggtgtttctttcacgatgtccgcaagaaaatgaagcgggatcagctgggtggacggcccgctcatcaattcgacctcctgcatggagggcagcggcaagatcacgagaaaatatgcgcacagcaaatacaatacaaacgaatagacgatcaagatccgcatggaaaacactgagccatatttgcggtaattatagatgatatatggcaaggtaaatatcacggccatgagcggaaagaccagcaatgcgttcatgatgacatacagataagcattcatcgtacatcccccattcttctttcagtatgcgatgcgctttacaccttattcctcgggcaaagcataacacagaaatatcattctgaaaggaaagatgatagcgatgtaaggatcattcaggcacggcaaaagccagaagcttcatcagaatgtgctataatggtcatatgcatattgatggatgtcagacaacaaggagggggaatgaaaatgaatgaagaaaagcaaaatgaactgatccagacgttcatggaaatcagctatgtgccagataacgacgcgctcagcctgaaaaagaagtgtaccagcatcgcgatgagcgatctctcttttctcaagtcaggcattctggccgtattgccgcgctcacgggaattccagcaagtgttgaacatgccagaaaccgttccaggaaaagaggggctttaccgggtcgtgttcaacaaagggatcaatggcactttggcagaattcaaggatggcagcggctatctgggcacagtggtcgatcatggcatccagggacaggcccatctgatcccgcttcaagctggtgaaatgagcgtgagcgctgcgatccctgtggaccccatgatgaccgcgatggcgatcatgcttgtgcgcatcgataaaaagctggacgacattcagaaaactcagaagcagatccttgattttctgaatcgtgacaaagaaagcaaattgctcgctgatctggatctgctcatggaaatgaccaaaaactataagttcaattttgacaacaaggaatatctgcgcaccaaattgaacctgaccgaggccatcaaccgcagcgcggccgcaaatatcaacttttatcgcaagcagatcgaggaactcgtcagagacaatgggttcatccacttgaacatgaataccgatgagaagatggacaagctgcaagatcagtttttctattaccggctggcgctgtatctgcatgcgttctccagtttcatcgaggtcctgctggtcaagaattttcacaccgaataccttgcgaacatcatccagaagatcaaaggtgccgcgcatgaataccaggcattttatactgagtgttatgatgccatagacgcgtattccaaaaataccgtagagacgcatgtcatgggcggactgtcctttctcagcagatcgaccggcagcttgatccgttcaattccgttcatcaatgaaacatcgatcgatgaggcgctgatcgattttggcaatcagatggaaaaagagagcacgaaggctgccaaagcagcgatgaaacgcttcatcaccaataagcagagtgatgtccagccattcatcgaaaaccttcagaccatcgaccggctctataacaagccattacagctgtattgtgatgaagagcatctttatctgaatgataattgaccgcacaatcgacaggacatccgatcagtcaagacatttccccttgtgcaggggatttttctttgctcagctgtcaattattcctgtttacatgcagttctacctgtaagcgaccatctgatcgtgagcatcacgcagatctggtttataatggtgctgcaggagggataggatgaatgattatcaatttggcaaccatctgtatcgactgaggcatcaggcaggatatacgcaaaaagaagtcgcggatcactgcggcgtcagcaacaaggccgtgtcaaaatgggaaaatggcaagacaaagcccggggtgcagatcatccgcaagcttgcggaattataccacatctccgccgaagcgctgctcatggagatcgacacgaagagcgcccaaaagatcacgacaatcgtgctcaccggcgggccctgcgcaggcaagaccaccgcgatgagctggattcagaatgcgttcactgaacgcggctac

SEQ ID NO: 4316 - DNA, 32759 bp, Unknown
  16S sequences of unknown bacteria
cctcatcccactacctttgacgatgagcgaattttatgcagttggctgaattatttatgacgcataatattattttttctatgggggcgcattcgccgcttgcgaaaaattctccccaaagaatatcgagagctgcgccggaatcgggaatggagtcggtcttgggaattgaggtgactacgtcccacatggagtcccgcaggccttgctcagatttatcgaggcctttcagcctatatccctctccaagcatttcaaaaagctgtatggtattttttcgctgtatcttgtcggctttcggaaaatccttttcgagctctgtaagcaaaaatttattacgcgtaaatgcggtttttgtgaatccatatacggcgtaggcaaaattccccttgttgtccgagtatgacatgtgcgggctcgtaaaaatcgcgtatattattttggggttgaaggacgagttatactgcgccatagccttgcttaattctttcccgtctttaatcggctctggcttttcccatttcgcgagctttaccggggtttttgcctcggcgcgttcacccgttttcagattctcgacttcaaggcgaaattcgtagtcgccgtattcgtccgagtcctcaaacatatatttgatagtagtcggaaaattgacgattagttgtttgttttccaactttcccttaaaagtttcttcataggctttttttaaaggttccccgactttgcctgcgtatattttatatttaagctcaaattcgtcgccgtcgttttcaacgactgccaccgcgcttgcgaggtagtaggccacatcgttcttatagagttcggcagtgctcgggacaagcaccgtattcatgggaacttttgctatgaaatcgagattcggtccggctcttgttattgcggcgaaagccttcatggggggctttttttcggcgtgcgcgaaaagtggagcgaaaagcagaaatacggcggcaatgcggaataaatttatgagtgtcatatcaaaaaaaattttaacttgggattatacagtgtcgagttttttttaatgttttagagcttggcgaaacacggctaatttttaaaatttaaggaagtattataatatttttttctattggttaaacccggaaaacagtttccgtaaaatttttttacgaaacgctgccgcgggattttcggcatgcgcttttcttgtgacgagcgtagccctggcgactcataatgaaaaggctggagccgcgggaaaggcgcaaaaatcaccttccgacgcggaaaatttccccgccgattttcgacagctgggagtcgagccttttggcgcccggaatcaggcggtttaagaatatccagaaggctgtggagtggtccataaattttacatgggcaaattcgtgatggaatacgtattgccttagattgtatggcagcagcgcaacccgccagttaaaggacatcgtgcccgtcgccgaacgcgagccccagcagctgttctggttcctgagggaaattcttgaatacccaaggcccgtttccgccgagattcttgcgcattcccgctccacgagcccccgcgcaaaatctttgaacaccctttcaaccgatcccgccttgtcgcccgccttatagactattgccaattccccctttgcctgtacaaaaaattcgtttaagcttgacggcttcagccatactttaatttcgccttcctcgccgaaaatgcgcggattatcttcaaaatattcacacagcgcaatggagggcgaaaatttttctaaggcttttgagagccattcggcgttggcgcgcgcgaactccaaggcatcgttgacggaagcgtagtagggttttgagagcacggcggaatttggcgaatccgcccaaagcctaaaatttctcgattttgcggagtttctgacggcgacgcgcaccgttccgatgcgcgggcattcgatatggaaaattgaggcttggggttgcgccataaggcactacttttgggaggattgttcgtaagctttttttatttccgcaatgtagtctcgcaaggcgccttcgggctcgatttttttgtcagccgcctcttttacgcagtcgaatattttttggcccaattcgaggtcgggggagcttttttcggatacccgtttgcgggcttcggcgagagtttcggaatccgcctttttggcgatgtcgagggcgtatcgcagggcggagagctgcggaggtatgccgtcgaaaagtccgcctacggcgcgctttttatgctcgagctcttttactttctgccatatccccaaaacttcgtcggcgtcttttgcgctttggccgccaaagacgtgcgggtggcggcgcacgagtttttcggcgagttcttgcgcgacgtcgtcaaaatcgaacttcccctgctcggaggctatttcgcagtgcagcagaatatgcataagcacgtcgccgagctcctcgcgcatgccgttgtcgtcgtcgttgtctattgcttccagcagttcggcgcattcttcgacgagatgcccgcgcactgatttatgcgtctgttttctgtcccacgggcacccgtcaggggcgcgcaggcgctttattatttcgattagggtttttgtcgaattttccttcattgcctttgatataaaattcggcatttacaatatcaagctttatgagattttccatttttactcttaatattttcgcagtacttcgttttgcctttgacgtttgccgcggcaatttttttatgtggaaaatttttaatcttttattccttcttccttctcaaaaagggtgaaaaagcggtggagagcgccgcatgcgacgcaaaaaaatttgcggggcgccaaagtcggattgcagcgtttcgatgccggaaatattcttttgaaggcaaataatgttgcctaaatgcgcgccgttaaaataaatttgcgccatggaaaataacggacaatttactcccacccagacatgcgagattttaagggagcttgggcataatccctcaaaaaagctcggccagaactttctcgtggattcaaatattgtccggaaatctctcgaattggcggaagtatcggcgggcgactatgtcgtagaggtcggcccggggcttgggacgctcacaggtgcgcttttggagcgcggcgcaaaagtctttgccgttgagctcgacaaaaaactcttcgcccatctgcgctcgtattttgcgggaaatgccaatctaaacctgataaatgccgatgctgtcgatttcccgctcgcggcgctccctgcgcaggtgcgcgattttaagatagtagcaaaccttccgtacgcgataagcaccccgtggctagatgccgtactttccggaaaattgccgtcgaaaatgtctcttatgctgcaaaaggaggcggcgctgagattttctgcgaaaaactcttcgggcgagtattctccgatttcaatatttttgtccgaggcgtacgatgttgggcagccgcacaaggtttctgcggcgtgcttcttcccgaggccgggggtggattcgatgctgctgccgctttcaataaaaaaagagccgcatgtgtactgcccggcggcgaagtcgctcataagaaagattttttcttttaggcgaaagcagttggggagcattgcaaagagcgaaggctcaggcgacatatccgaatggatagacgccgccggcatagacccgcgcctgcgcccggaagctgtcggcgtgcagcaatggaggctgctcgataaaattttatcccaaaggtaggcactttcccctgagggattttccattccagccgactgcgccgttgccgactaaaatattttgccgaaatgaaagtgttttttataattttaatatcaatagcgcttgcgtacgctgcgctccttgtatttgcgaggctgtttgcggaaaagataatattcccggccccatctgcgtcgtattcggacagtggggatattctgcatatacctcttccaggcggcggagaaattgccgctatatggattccgtcaaaaggctccgacctgtgcgcgatatatagccacggcaatggcgaagatataggagaaatccgcccgattctctcggaatacgcccggcgcggaatttccgtatttgcctacgactatccgggatacgggctaagcaccggcaagccctccatcgaaggcctaaaagaggcggcggaggcggcgtactgctatgtgtcccaaaagctcagatttgcggattcaaacatagccgtagtcggatactcccttgggtcggccgccgcatgcgagataatttcccgccaccccaacctcaggtgcgctgtcatagtcggaggcttctcaaaagcggtcaaagcggttttaccggtcgatataattccgtgggaaatgctcgacaattcttcgaaaatctcgcaatttaaaatccctatactttttctgcacggccgacgcgatataatcgtgccgttcagaaatgcgcgcgaaaacctcaggtccgcgcccgacggacttgggaaactcgttgaatttcccgaatgcggacactacggcctttcggaaaatggtgagtattggcgcgaaattgtggaatttataaagtcgggcggacattctaaacggcgttaaaatgaaaaaagttctcgtaatactgttcgacaaggttgaagaggtggaggcatttgcgcccgtcgatattttgcggcgcgccggcgccgatgtggtgacggcggcagtgggcggcaaacttgaaatatgcggcaggagcggtattttcgcaaaggcggactcgcttttctccgacgcggccaatgccgattacgacgccgtggtgctgccaggcggccccggcacttcggaaataatatccaaccaacaaatagccgattttctcgcagcgcaaaacgggaagggcgcgctaatgtgcgcaatttgcgccgcgccctcggtttttatgcgcgctgggattataggcggccgcaaatgcgcgtcgcacccatcggtggccgatgtcctcggcggagcgcgcacggatttttcaaccttgcgcgacggcaacctcataacttcgcagggagcaggcacggcggtggaattcgcccttgaaattgttgaagcgatttttggggaggcaaaggcggcggaggtctcaaaatcaatttgttatagaaacgggcgcggataatgttagacgaggaagtgcttttaaagacaaataggaatacgggcgagacaatgtccgtattctacgcggttgccgcagtatgtgttcccgcgtttatgttgggtggcgattctgcgtggggggttggggcgctgattgcgctcggcatactcgccccgataaacctctaccacagcgtctctaactggcgcactgtaagagacggcgcttcgtggaaatttccgctattgctgctgccgtatatcgcgatgttcatcattacggttattgcggttttaaatcccgtggtcgagtcggtgtatgtttcggggaaagaatgggtgaggttgtcggacaatccggatttggcaatcgtatccggaacgttgagccccgtttatccgattacgtccgtattggcaacattatcggcggcggcttgcggaatgtccatatactttgtcgtaacctcaaaatttgtatttaggcggattttcctgtattgctcgctctttgcgggaattttggctcttataggctttgtaatacgcgcggttgccgcttttgcccatgatagcgccgtggggtttggggcggagggattctctctattcccggattccgattcgtggtgcggatttgcaataatctggcagggggcggctttggctgcggcagtttattcagcccagcgtttcgctgtggagcacgtcttgtgctcgctgcgtttttgggcaatagtgtttgctatggtattgtgggggagcgtgcaaatttgcggcgtctcggtagaaagatttttggctacggttgttcttgtggcgggaatctttgcgctcgctttagatgttttcccgtcaaagtcgaacctcaaaaaatacaagataggaagaattagaggtggattttcgataaaattgaggggaaagattccatttatcgtgtatgtagttgcgcttgcggctttgttatttttggcatggaaacaatatggtgtatgcggtggtgcagaatcgctgtcttttgatcccgccgcggagtccccgcttacggaccgccaaataaaagcctacgatgaggattttaaggaaatgaccgcaaaccgtacgatgtttggctggggggaatcgtctttcaccaccgtattctcctttttccaaggcgacgacttggggggaaactcttgggattccccaaaatccgacctccaaagatgccttgctgaaaacggttatgcggggcttgctattatgatggttgcgcccgccctgttcttattgggctggttgtttaggttaaaaattagtttgccgtcgttcgttctcggcgcgactattgcgattatgttattcctcggatgcgttagaaatccctttgagaatgttgctgttgtggcgtctttcatggttgtaatgtattcgttcttcggttgggacacgtcggaaggttaggcggcatttttagcgcgggggggctgttttaggggcgaccgcgctccttgtgttttgagcctcattcataaatgtccgcgatttttcatacgtagggcggcataaaattctttgccgccttcttaattggcggaaggggcgtttatgcggtttagggcattcggtgttgcgcattgcggcgctcaaattttgcggtacaacaacgccttgcgtgccagtgcttgcgcccaaatgaaatctaagagccgaaaattatgcaaactggaaggctctttcttgcggcgtttttttaactttgcggatattatttgcaggcttcaacgcattatttttctatgcgcgggaattaccaaagactctgcaaaaatcgcctttctttttgcggatatttaaaaaaatagccggtcaaaggccggctgtgtgcttgagaaattgtttcgatttttttggggcaggaacagaaatatgctctcatcgcaaattctgcgcgctagggaaattatttcgattttgctgcaatatccagaaattttcccttgcggcctatttttaaatcggcgcatttcttattccactgtgtgaaatggggctgttttgaatggaatgcgtgcgccgcacggttcttatacagctcaaatagaaagaattttgaggggttttgcggcgacgaatatagctcgtacgacaaagtgtccttttccgtgttggtgccgtcgcgcaaaggctttgatatttttataaattcgggaataaacgcagtcggcacttcatcgaggtcaaccgctatgattaacggtgtatcgtttgaggaatttttcacaacttcgtatatagacacttccgacttggcttgcgttttaagtgcgccttgggacttcgcaaattcttttgcatcggcggtggaggcgaactcggcgtattttataaatttgtctttataaaatacgttttgcataaaaagcgcgcgcaggcagccgggcgccttcttggcggcgctctcaaaatccttttgggagttggcgtacgcctttatgtcgtcgcgctttacggtgtctatggatacaaacacgcatgccgtcgatggggcgggggctgtttgcgaaaaagccgcgggcgctccaataaaaagcgcaaataaaataaaaaatggaagaatgtttcgcataatatgaaactttttccaagcacgttaacgcacaaacattattttataaagaaaaaaattctgcaaaagcggcctgcttccaaatggctaatcgtattttgccggggcggattttgcgaggggggcgtccggaaaatacgatgtgagctttttcgacgacctcgtaaacatctctggcatggccttgcctgtggataggtccgcgcatacaggcctcttgggagacttgtcgagcacgcattcaaaatattcgcggacaaatttatcgagcttagccgagtgtgagtgcccagtgtcggcgagttttatccatgtccattttctgccgagtttccgtccccatgtaaaatagtcgaagcacgctttgaggcggatatctttttcgccgcaggcaattattgcgggaaagtctttttttaggcggcggggaaagtcccaccagccggcggcgtacgcgcagagggagccgatgcgctcgggcttccattcggcaaagcgcgctgtaaaatgcgccccgcccgagaatccatacatatatattggaagctctccgccctggattttatcaagcccgtcgagaaaaacttgcccagagccttttgatgcgtaatagtaccccttgccgtttgtcaggtcgtcggtattggaggcgaacgaaagccccacaagtatgagatcgtgcttttttgcaaattcaatccattctgttttttttatgagaaaagttccgtcgctgttgtatcccgacgccaaaagcaaaaatcccccaggtttttttaccccctccggaattatgtaggacaagtttgcgcgcgtcattccctcggttggcgtcagttccaatgtctttacgttttcggcgaatgcgcttgccgccgcaatcagcacagccgaggtgcatattttaattgccaggttcatacgcagcatcttcaacgagtttttttagaattttttcctctccgccgtgcggtattttaaggaatctgcatttgccatttttgtccggagcatatgtcgagcgccctttgttgtcgaatgaaaccgcaactctattggacatatcgaacaattcaggctcgaaaacgtagaggacgcttgccaaatcccacgaagggcggtcgtgcctgtcggatttgccgcggcttagcatttttgcgtagagcttgtaggcggcgtttatgggattgccgggcgacattcgggcttccatttcgcgctgtggaaattttagggcgctgccaatctcaaatccgccgaatacggcgtcgcacggagtggttgcggcaaatatttgcgcggattttacgtcgcattggatattgtattcgggagagccggggtttttgaagtcgccgcccatgacggaaaagtattttattttttttgcggcgaggctcttgccgtcgaggggcgatatctcgtctggtgcggattcaagcaggcgcgctatgttcgttagaaaccccacggagatgtacacgacgctcttgtcttcggactcggcaagaatttttcttgccaattttacggagtccggaaaaccgccgcggggcatttcaaatgggtattttggcgcgccgtccgcatttttttccgagagaatttttgcgttgaaagctccgtcttccggagtctttccattggagataaatccgatagggatggcggacagcccgtaatatttatttagcgcggcgcaaaattttggcgcgttgggattgcctttgtttacgagtatccccgcgagctccgccttgccggacttgtggtatccgtagagcatcgcaagcgcgagggcgtcgtcaacatcgttgcccatgtctgtatcgaaaataaccttttgcgggctcgaataacacgctgcgcacaaggcaagagccgccgcaaatattgcgctttttataaatttcatatttttatattatgataaaacgcgcgtctttcaacattaaacgtatcacagacgtgcgtctattgtggaattttgctttgaaataacataagttttgcgccgcaaattttgccggtattttaccgtcggcacatggcggctttaaagacatattggctgggattgctttttttataaattttcttttgcaaggttggttgccgatttaaagctaagccgctttgcaaaattgcatgcgcggtaggaagtggcgcatgggcggcaatgcaaaaaactttaacaaccgcgcaatgcgcctgccgccgcccgagctccgactataccgagtgcggttagcgttgcgcaaatttgcgagctacgcattcctccgcccgtggtcggtatgcccgcgtagtctcggcgcgatatttgcaggcttgccgcctctctattcgcgcccgcgcacgcaagtaagcgataagtcggacgtcagttaaaagatggctgagtcttactattcgctccctcgcgcgccggtatgcggaaaaggtcttacttgcccctttcctcgtcgagacgggcgcgccagtatgcggaaaacaccatgtaggcgccgtacgggtcgcgctcgtgtatttttattatgttttgtttaagtatcttttcacgagccgagcttaggcggtagccgttggcgagcatctgcccccacattatctcggcggcgtcgcggacgctcttatccgacacgtgatagactttgtacttgtcgataaattcggatacggcgtccataattattgaaatttgcaacttgcggcttgggtcgggttcaacttcccttatgagctcgagagaggcgttcatttgcgcgatggagtagggcgggacaagatgcttgtagtatgtctcgcgcatgccgatgaactttgccgagccgcctactgcgtcgtcgtacacagccctgtaccagtttaggtattttttattttttgtagcgtcgtacgcggcggcgtagagcattgcgagcctcgcggcttcgtgcgggtgaacgtcgtgcatttttgcaacgccgcgcttgtcgggaacacctttatggagcttgtaggtgtacggagggtttgtgtcggggcggatttcccttttcatcttttccgcgacggcgcaaaaaattgcggcaatttcctttttctcggcgtcggtcgctatcggcgaattgaagtaccgccacaggccgtggatattgtgcgtgtattggtcgcgggaggtttcgggatagacgcttttgccgtcaactggcgaaacgcctcgggcgacaaagccggggtcgccgtggacagtgtcggcgagcatcagacccttggcaatcttccgcgcccagtctgctgtttcggcgtccttttttatttcgtacttgtcgcaaaggccggcgagcattattccgcagagcatcgagcagtcctcggttccggttccgccgcccatatagtttggatctccgtttttctttagcggcttgtattcgttgattaattcgggcccgggaattttatctatgcttcttgtatagaaaatattggttttgggtgagtagaaagtttttgcagtcttatcccacagcgtttcaagcttctgctcgaattttgggtcggacaatttttccgatgaggtgtcagcgaatactgtaaacggcattagagccgccgcgattggtattagtatatttttcataattatcttattatcgttttttcaggagaacgcggagaacgccgcataaagtgatgaatgccgtgtcggtgcgcaagacgcgccgccccatagagacgagcgtccaacccatttgcctgagcagaatccggtcggaatttgagaaccccctctcgccgcccattgcggcgcaaatatgggattcgggagatattttgcaagaaagctcgccgaggtcggcagtggcttcgtataagtccggagcgatttttatggagtctggcgagtctatcgcaagttcgcggcaggcttcttcgagcgacatgcatgtcgaaaattccgggatatccgccgcgcacgcttgctcggcgcccttttccatgcactcgagaacgcttgcgccggagtatagcgaacttttggcgtatgccgcctctccctttgaggcggggtaaaatataaggcgggaaatgccggcgcacgctgcctcgaataaaattctttttgctatctggggccttgtaaaggcgacagccaccgatattttcataggcgggggagtctcaacttccctgagaggtgaaaatattgcggagccgtctttgccaaagttaatgcggcatatatatattttcccgccaatattgcccgcaaaaatttccccgccgtcgccgatttttagaacgtcttttatatgttcaattttcggagagccggaatcgagcctcatggcagagcctttgggaaacagcacgcaattcattaactgcattaaaatgaatggcgggcggcgtgtaaataaaaattgagcgtggtatttttaaattgttgaaatgcgcgcgcggatatgttgatatgaatcacatgaatccacaaaattttacatctgaagacgaggcggcattgcgcgaaaccctgaaacgctgctcgccggaaaccatagaaaaggccgtagaactcagaaaaaccggaaacgcggagctcgcaggccctgtggttatagggataatcgagcgttttctcgaacccgaaaaacgcgacctcttaaaaaatccgcaagactctttgagaatggttgacgaccttgggctcgattccctgacgatggtcgagattgttctggcggtcgaagacgcgaccggcgcgagcatcgacaacgaagacgttcagaagattcatacgctcggagacataaaggcatacatagcggccaagatgggatagccttcccgcgcgcaataccccggcggatttccctaagttttggggatttccgcaacaaagcaaattggcgcgcgtcgcggtgcggcgcattgcttgcaccgcccgaaccgattatcgaatactaatatagcgcaaattattacctcaatatggacaattcggaagagcctaattccgtcgtggtgcgtcgcctgacaaaaatctacggaggagtgaaggcgatagacaatgtgtcgtttcgcataggcaagggcgaagtggtgggatttctcgggcccaacggcgcgggaaagagcactacgatgcgcattatatctgggcttatgccggcaacttccggaagcgtcagcatatgcggggaaagcgtggcgataaaccccgacgcggcccgaaggcatatcggctttatgcccgaaaacaatccgctgccggaagatctcagagtgcgcgaatacctcactttccgcgcagggataaagggagtgccgcgctctgaaatcagggcgagggtagatgagtccatggatatttgccagctgctgcgcaaggcttcaaacaaaataatcggcaacctgtctaaaggcttccgccagagggtcgggatagccgacgcaatattgtctcgcccagaggtgataatcatggacgagcccacaataggcttggatccgcaccagattctcgcaatacgcgccctcataaattcgctgcgcggaaaaatgagcgtaataataagcagccacatacttccggaaatagagctgatgtgcgacagggtgatgattataaaccagggtacgatagtcgcaagcggctcgccagaaagcctgcggaaagagttcatatcccgcgacaagtacgggatttccctgaaagccgaccccgccaaaatgcgtgaaatgctcgggcgcatatgcagtggggtggagatagtttccgaatccaagcccgactccgccggatactacgactacatactctcgaccgacgaaaattcggacttgggctgcactttaattagggaattttccaaggattccgccttgggattgagggaggtctatcacaagaagccgagcctcgaagaaattttcatggcggcaacgcgccgcagctgggaacagacttccgaacttcccgataccgccgataagaataggataagaaaatgaggaaattcgggtatcttttcaatcaacagctaaagcagatgttcatatcgccgtctacgtacatagcggcgtttctgttcctgacattcatgggggtgatgtacctctactccctgatagaggttagccgaggcacaatagggcggtccccgaccgagatttttctatccgcattttggataccggtgctgtttatggttccgcttcttacgatgcgtagcttgtcggaagagcgccgaatggggactctcgggacgatgatgacaacccctgtgacggcgtttgaaatagtgctgtcgaaatttttggcggcgtatttcttttacgcgcttctttgggcggctaccctcgtattcccgcttataacgagcttttatctcccgcaggcttcggcagactcgcggctgctgttttccgagcaggctgtgaccggatatatttttatactcataagcggggcgatgtatgtttccataggcatatttgcgagctcccttacgcgtactacttttgttgcgggaatgctgtcgtttggaatgttgtttttggcgatagtcggggcgggattggtttccaggttcccggcggagtccacgggcgcgctctcgtggctggggccggcggtgtcgtacgtggacacgtttaaacatcttgacgaatttacaggggccttgcttgatacgcgcccgttctttttctatttgagcactgccgcggtttttgtggcgttcacatcgctgattacggagtcaaaaaacgcatgagcaaaaatatcagcagattcgacgactttaaatacactacgcgcattcgcgccctgaacttgttcgcgcagatatttctgggtacgcttctttttgtggggctgaattttttggcggcgcgccactacgctaattttgacttttcaaagagcggcgcgcactcgctttcccccgaaagcgtcgcgtacgttgagaatctaaaagcgccggttgagatatttgcggtgttcggctcgaagtcggcggaggatcctgaaataaggcttgcccgaagggatttgaggtctctgttttcgcagtacgaatacatatcgggcaaggcggctccggtgaagtacagctttgtgcaagcccatattgagaactcgcgcgcggaggagcttgcgcgcaggttcggaaacgacattgaggatatggtaatagtcgcgtgcgggcagaaattcaaaaagattccgtttaccgatttttatgcggtagaggagggcaagcccccgaaattcgacggagagaggctcgtgacctccgccattttaaacgtatcaaaaggcgatcagcaaaagatatatttcctcaaagggcacggggaaatgagctttaaggatgcgtcctcaacatacgggctctccgaatttgccgcggctcttaaatcgcgcaactacgctgtcgaggagctcgacctcaacgaggcaaagcaggttccgcaagacgccgggctcgtggtgatagccggcgcacaggcggctttcctgccgcgcgagatagacgagctgcgcaaatacctgatgaaatctaacggaagggtgttgatactattgtctctcgggcctctcggagggcttgaagacatactctttgaatgggggcttatgagcgacgacaagcttgtcctcgataccagcggagactatgaaagctccgcgggagacctaatcgcaaggagcttccccaagactccgcacccgattgcaaaataccttgttgacatcgatatgccggtccagttcggatccgtgcgccccgtgcgccccgatatgggcgctccgctcgacgactcgcttaaagtggatcccataattttgagcggcccgacgagctgggcggaaatgtcgtaccgcagggcgggaatccagcgctacgacgactccgtcgatttgccggggccgcttccgctggcaatggcggcctcgcgcgtgggcggcgacgagctcgggctcacgattcccggggggaggctcgttgtttacggtgatgaaaattttgcggcaaaccgctggtttaacaggctcggaaacgcaaagcttgcagtaaacactgtaaattggatgttcgacgaaaactcgatgctcaatattcccgcgcggcagcttgaatcgttctcgcttacgttgtcgctcaacgagattgcggggctcgggtggcgctttatgatactgccggcggtggtattggcgatgtcgctattcgtgtggctggcaaggaggaactgaaaattatgaggtttagatttacaatttttcttttggtggcaaaccttgcgctctttgcggcgatatggggcttggagagggaaaaatcttccgattcgacagagcgccgcgatatggcgccgattaccctgcttgaaatcgagggcaagtcggtcgaaaagccgcgcatattaaagctcgaaaacaacaggtggcgcatagtatccccgatagaatggcccgccaatctctttgccgtaaaccgcataataaaccagcttgaatttctcgaaaaagagacgggcttctcggttgaggaggctctcaaacgcgggcacgggcttgccgagtacggtctcgacgacccggcttacattttcaagtacggcaacggcgagaaaatgtacactttgaaagtcggcaagggcgcgccgataggcaaccgcatatacctgttggactctttttccgacagggttgtggttgttgacaaggagttcgttgacgggcttgtcgtggatatggaacgcctgagaaaccagtcggttttcgacataccgcggtttgaggtttcggcgttttcggtgcgtctgccgatagtggtgtctccggcggatccgcggacaaactttttaaggataggcgtagttagcgacgccggtaaatggaagattgaaacgccgatagccgccgcggccgatccgcgggaagttgacgcgttcctcgacgagatatgccgaatatgcgcgcttggtttcccgcagaatgtgagtttgtcggaggcggggtttgacggcggcacgctgccggcgagcataacactgcagggcacaaacaggaggcaggtgctcctgattggctccaaaacaaaggacggctcgcaagtgtacgcgcgcctcgaagacaatccaaccctgtttacgctcgactcaacattcctaaaaagccttgaaaatctccaaaccaccttgcgcgacaaatcgtttttcaggtttgacgccgaccgcgctacggctcttgaaatatcgaagggcgggaaaaccgtgtctttgcacaagcttgcgggcggattgtgggacgtggtcggaagcgacgccgacggtaagaaagtcggcatgagcgcagacttggctgctgtaagcgacgtattaaacaagctctcaaaagtaaaggcgcgaagctttataagcgattccgccaccgacgtttcaaaatacggcattggccaaaattcactaagaatatcggtcaagcgcgacgacggcgcaatggatacccttcaaataggttccgagtacgacaacgcgggagagcccttgatgtacgccaagaccggctccggaagcgccgtttacggcataagcaaggagcttgccgaggccgcgagcaccgacattttaaagtaccgctcgaaagtgctgtggactcttcccgaaaaggcgtctgttgcgtccgtcaaaatagcgagggtgtcggattcgtccacaatttttgaagttggcgcaacggccggccgcagctttgcggattcggtcaaagccttgcctgcgcgcgaggcggcggcagtcggagaaatcgcgtcttgcgcaaagttgtttgcggtgtcgaggtatctgccgttaaagttttcgcaaaatggtgtggaggttgaagacaagaagttcccgtgggcgtattctgtcactgtggctgtcgatttgccgggagccggaaccaccgcgctaaaaacccgcgaaatactgcttacggagcgcttaggcggcacgacccaatacggcggaataaaagccgacgacgcggtttttgtccccggacaggaatttatcgacgcggtttttgaaataatatccaacgcttcggagcctgccgagctgaaaaaaactcccccgctcccaccgaaaaaatagccttggaaaaccagcaaaaagaaatgtcttttaggacgcatgcgctgaatgcgttttggagggcgctgtatccgctgaatttccttttgattctaatattttgcgcgcaggcggtttttttttacgccctcaataaaagagagtttccgttgccggaatttgtcaatgaggccgtagcccgcgcagcttcgaaatacggcttcgacttgcgctactcttccgcgagcatttccgttgacggaagaatcaaaataaacgacgtgactctgcgcgccgaagggacgccttcggcgtttttttccgcagaaaaaatagatctttccctatggctcacgcgcctctttaacggggaggccgtgccgagaaacatacgcgtgtacaacggttcgctcggcgacactatacgcggcgtgggcgaggcggcggtttcgcatttgtatttgagcgtttcaaagtctgggcaatggtggagtgtcgattcgtcgcattttaaaatcggaaagcttacggcgtcagctacggtcgatatttcagaaaagttttctgtcgcagagtttttgggaaaaaacgggctcgacctgccagaggccaaaggcaaggagccgcctttgtcgtcgagaataaatgcagcgtttgccgcgctcgaaaaatattcggggtatttggatattttcgagtctcccgtttgctcggcgagaatttttttgtcggacgcggagtcgagcagggggcggtttaggttttattcgggggaggcggtgttcccgataaaaaatctcgaagcgcgcgtggaaaacctgaggttcggaataaggtacgacggcggtaaaatatcggacggcctatttttcggagcgcgcgcggaacgattcttttgcgagggaatgccgcactgcaaaaatctctcgacgtccgcaaacctttacggggcgggagaatccatagtgctctcgaatgtcggggtgtccgtgggaaatatggagtacgagggtctaaaaatcgacaatgtttcgctaaaaaaagactatctcgactcggaaacgcttggcgacgactggtacgcttttgcggcctttgacgactatcgctttggggcgagattttcgctcgacaagtatatgaagctttccgcggagttttccggctctatcgatccaaaaatatttacggggcataagtttttttccgacattgcggaattgaaaaaattttcgttcgacaggggtatttccctaaaaggtaatttgaattgcgactttgtcgaaaaagatctcgatgcgagcgtagattttgaggcctcggattgcgtgataatggatattccagtaaggcgcgccgcagggaaggtggaatacgattcggctactggaataatagacgcttcaaaacttgaagtgcaggcggtagaggggtggaaggcctccgggcgatttgtccaaaacataagggactttgtgtataaaatatatgtggacggctccgtgcgcccaatggcaatatcgcattttatggcgccgtggtggagaagggtgtttaagtcttttgaatttgcggacggaagattcccgaaggcggatttttacgtcgagggaaagtgggggagccccgactttatatggtgctatgggagcgcgaatggtacggacgccctatacaacggctctaagttcgacgaattttccctaaacgtatgggttaatccgtcgagaatttctctgtacgatatacgccttaggtgccagaaccgcaacgcgcacggcaatgtgcaatggctttacgggccaaaggggctaacgagatttgaccgccagacactctttatagtgtcggggttgtcgccttcggagcttgtgtctctcggaggaaaggacgtgtccgatatttttgaagttgtaaaattttcggaggcgccggaaattaccgtgagcgggcttatgcgcaatccgtcgaacaacccagacaagcttcccgacatattcaatgtgtccggttttgcgcccaaacagactatgattgaaacggccgtattgcaaaatctgaggttttcggccaagagcgacaagattctcacaagcgttgacgaagcctcctttgaattttgcggagggcatgccgacgggaaaatcacgcttgaaaagaaagacggcaagatgctttttgacgcctccgctaaggcatcaaaaatgaaccaggcagagtttacaaaatttttgataacgctcgatccgtcgaaagatttggagggctccgaggaaccttcagggcaggtaggtgcggcggcgcagggcggcgcggaaaacttgcaggcgtctggcggcggggatagacaaggcgggtccggctcaaagaaagagggggctgacgaaaagggattcctcgacggcggcgagagcggattggtggatatgaatttgagcttaaagggcgacgttgccgacatcgcccattctgtcgggagcgggcatgcgactcttaataacccggatcttatgaagctgaatatgttcggggtgttgtcgagggcgtttgcggcgcttaggcttccgcttggaacattcgagataacttacgcaaacagcgcagtgcaaatacacggcggcgttgtggaatttcccgaccttgaaatgggcggagacgcaatgcgcataaagggcgctgcttcatacgactttgtaaacgacgatatagacgcggctatggtaatgtacccgtttgacggtgcaaagggcatgattatgacgggaattgcaaccatcgtaagcccgatatcaagcgtcattcaggtgactgtcgacggaaaaatttcagatccgtcggtcggaatgcaggtaaagccgctcaaccttatccagagcggggacaagattctcgaaaacataagggaatcattgtgacggaaattgcgcgcgcagttcgatacagacttttgattttaagccgcgcacaagcctgccatatgccttccgacctctcatgaaggcggattcgccgacgcgaaaatgttgtgccaagcgtctatttagcgaatttacaagccgagtatttgcttgtaatcggcggcaggcgcgctactgtggctttctatgaataacggagaaaaattgaagtgcggggttgtcggcgtagggtacctcggacagcaccatgcccgcatatattccgaacttgaaacaaccgagctcgtcggcgtatgcgacgccaatgtggacagagccagggaaatagccgataaattcggctgcaaggtatttaattcagtagccgaactaggcgaggcttgccacgcagtgagcgtcgtagtcccgaccgacaggcacacggaggtcgcgatgcagcttttcgacaaaaattgcgatctgctaatcgaaaaaccgatatgcacttcaatcgccgacgccgaaaaaatcgtcgatattgcaaagagcaaaaagctcatagtgcaggttgggcacatagagcacttcaatcccgtaatgaaatttatggaggagcgcgtccacagcccgaaatttattaccgcggacaggcttgcgccgtttaatccgcgcggcacggaagtcggggttgtgctggatctcatgattcacgacataggagtcgtattgaagctcgcaaattctcacgtttcgcgcattgaggcggtgggggtaggcgtgctgagccgcaacgaggacatcgcaaatgcgaggatagtttttgaaaacgggtgtgtggcaaacctgaatgtaagccgcgtaagccttaaaaaactccgcgacatcagaattttccaagagggcatgtatatgtcgctcgacttcctaaaccagaaggggcatgtaatccgcgtcaaggaccgcacagagattatacccgaggaagttccgattgaaaagagcgagccccttaagatagagcttgcgagctttgcggattgcgtgataaacaagcgccgcccgaaagttgacgcggttctcggcatgagcgcgcttgaagttgcgcttgaaatcacccgccagataaaggctctccaaaagtagtttcccgttttgccggaaagccgcgtatgaatccagacgtgctaaaaatgcgctccttccgttttgcggctcccgccgaaggaaggtgcgacttgcttgtaatcgccggagagcattcgggcgacgagcagtcggcgcgcatggtatccgacgccttaaagatcaatcccgacctcaaaatatgcgcattcgggggcgaaaagctctccgagtgcggggcgcaacttctcttcgacatgacgagtttttctgttgtgggtctcgttgaggtattgaagaactacggctttttcaaaaagctttccgaggcggttgtggattggattggcaaataccggcccaaggcggtttgttttgtcgattacccggggttcaatctccacatagcgtccatattgaagcggcgcggaataagccaaaaaggcggtggagacgtgagactcttatattatatcagcccgcaaatatgggcttggaaagcttcgcgcagatttaaaatggcggaattgctggattctctcgcggtaatctttcctttcgaaactaaatgctacgccgatacgaatctcgacacgcattttgtcgggcatccgtttctgtcggactcataccagccgccggtagtgtacgatacagacggggaaatacttcttttgtcggggagcagggaaattgcagtttcgagaatttttcccgtaatgtgcggggctcttgaaagaattgacggggcaaaagccgtggcggtctatcccaccgaaaggataaagaatattttgcagaaggagatttcccgcaggcccgccctaaaagacagggttcgcatagttcccaacggaggctcttccgcgcttgccgcaaaggcggtaatgatgagttccgggacaatgtcgcttgcgtgttccctgcaagggattcctggggcgatagtttacaaggccaacccctttacatattttgtcggcagggcattggtaaaaataaagtatttaagcattgccaatatattgctcgataagcctgcatggcgggagttcatccagttcgacgcttccgcccagcctttggcagaatatatgaaagagtgcctaaaaccttccgcgcgaaaaaatttcgcggaatacgcaaaaatcctaaggggattgctgcattcccctccgagtctttcagctgcccaatggctttgcttgaagggcggtttttaaagttttttagggtatcttttagatgcggtgagggttgagcggaaaaatttttttacgcgaatcccgcaaaatttatattgcataaattgaggcgcacttaccacatcggtaatttttatgaatgcctgcaattttatgcgcccagcgagtttttcccctttgcctttgggttaacaaatttgcggcatgcggagtttttttgtttagacaaaatttagacaaaaaaccgcctttttttaagcggtttaaaaatccaactgtgcgagaatatcccctataaaacaacaaaattattcttcgtcgaatttgcggttaaatagagcctctatttcatcgagcataatctgggcgtcgtcgccctgtgctatgaatttaagctccgaccccttgcctgccgcgagcatcattaggctcattatgctcttgccgttgacttcctctccgtccttttcaacccataattcggttgacggatatttattggaaatacgcacaatcatagctgcgggacgggcgtgtatgcccatcttgttctggactgataaaactctgactgtttcgatttccggcatggtatcgctttgttgttaaaatgattaaaaaaaaagcattttgtgcgcttgtcgctatccgtcaaggattttttgcgtgaaattttcaagcttaaaatgaacgttgcctaaattcggcatattaggcggcgtgcttcccaagcaatataaaaacccccgcctgtcttccccgacggcgcggctacacttgcctttttgtattatgacacaaaaaaaccgcgcccgttcaaaatttccagacgcggtttttttttaacttattagaatgatatgcctgcttgaattgagacaacttgcgcgtggcccgtatatttgccgatagtttgatacgcgccatttgaagtggtatggtctattccagaatcgttgtagaaaaatatgtacatgtaggatatattaaatgtcatattcttatatgaataacccaatcctccggcgagccaagccctgtcggcgcaggggattctcgcggttctgtttttggggccaactaccggagattcgtcccaagtggcgcctattctcaatacgagattttcgtcaaattccgggtaatagtgcagacctaccgaaacgcgggatacgtttttccaattttcgtgcactgcttcgccgcctacggtttggccggtgtcggaatttttgatgtccagctcgttaaaggaattccagcaagtgaaggagtagtccgccattacggcgaatctgtcgagcgcaccccataggcgctggtatatgcctacgttgaaagtttggggcaggacgatatttgtgtctatggggttcattatgatgtctgtcatacccatttcgagatgctggttgcccttgatgtcttgcgatacttcactgcgccagttgaagccgattcgtccgccttcagcgtactttattgtgaatcctacattgccgccgactccccagctttgaccgcgaaggcttacggttgcgtcccttcctggagcgatgggggtcgcctgcgtgagctctgcgtgcaggtattggagggagacgccgccgccgattgtaagccagtcggtcactttatatgctatgctcgggtttatatcgacagttacgaggtcgctattcagtgcttggtagcgcccaacccagtcgttctcataatctgtttcaagcccgtagggggaagtgaccgcaaacgttccgagaaggttctcggtaaattggtgcacgaggtaaaagtttggaacgtacgaagtgacgcctgcgttgccgccgtccgagccggatacctcctggcccattgcgtatcctttcccgctaaaagaaaatgacggaactacaaaattcattccgctgtccatcacagtgtcgcccggcctcaggtccatggcgaacgaggcggacggattccagaacgcggacgacgcgtccgcattcgcgtttacggttgaaccggcgagtgccgagccgagatttgatgcgccttgttccaaaacctggaaacctgcaccaaaagtcgcgcatgcgccaaacagtgcgcacaatgcgtaagctttctttatcatggcaataatatgattgttaaaaaatgtctctataaaaaaagaaacacagccgcgcattatgctctttttatatttgtttgtgaagcataaaattgtatggtaaatttttttgtatgttttgcgcatattttattttttcccgcttgggatagagcttaaagtaggcggacgttgtatgctgcgcgcatgcatatacattcagtccggtgtcggcggataaacattttgtgaaggtgctttattttttacgtctaacctcagcttaacgctgctttaaaaaaagctttacaaaaatatcgaatgagtttctactttaacataattccaaatttcgagactaacatccaacaagagacgacatgtcagatatcgaacaaagagttaaagagataatcgtaaaccagctcaatgtaaacgaagagcaaatcacccccgaggccagctttatagacgacctcggcgccgattcgcttgacaccgttgagctcattatggctttcgaagaggagtttaaggaccagatgggcggagaggaaatccccgaatctgacgctgaacaactcacgacagtcggcaaggttatcgattatataaaatcgaagtccaaggcctaataacgaccggcgacttttttcgacggcccgccgtgtttcgacatcgtgcgggttgtttttttgataaaaatacaatatcagatgcacgccgccaattccgaaggtgtacgcgcaaattacggcgatatgttgccaagcgcctcgtcgacgacggagcggttgatagcagattgtaagggaaataatttctgcgtaaaatccaacggtatttgcatttggcgcataaaaagataagttctttgaaggcgcatgcggcaaagattaaaacaaacaatcaggaaaacatcatgccaaaacaacgcattgtaattaccgggctcggcgtcatatcccctttcggagacggaataaatccgttttgggacgccgtttcaacaggcaaaagcggcataggccccgtgaccttgttcgacgccacagagcttaattgccgcgtggccgccgaatgcaaggaatttgacgccacaaaatatatggatcctaaagaggcaaaacgcagcgaccgctacactcattttgccgtcgccgccgcaaaacttgccctaaaagacgccaatatcaaagagggcgacgtcgatcccgaaaggttcggagttctaatcggctcgggcgtaggcggaatggacaccattgaaaaacagtcgcgcgcgtttattgagcgcgggccgaggcgcgtatcgccgtttatgataccgaaccttctggcaaatatgtcctctggggttgtcgcgattgacgtcggcgcaaagggcgtaaatttcagcgtcgtaagcgcgtgcgctaccggtacccacgcgataggagaggctctcttgcatttgcaaatggggcgcgaagacgttattttggcggggggcagcgaggcggcagtcactccgttgagctttgctggcttttgcgcgatgaaggctatggccaccaattttaacgacgaaccccagcgtgcgtcgcgcccgtttgacgcagacagatgcggatttgtcatgggtgaaggcgcgggagttatagttctggagcgctacgaccacgctgtcgcgcgcggagcgaaaatatactgcgagatttccggatacggagcaacctgcgatgcctaccatatcacaagcccggatattgaagggcgcggattggcgcaatgcctgcgccgcacaatggaggacgccggcgtcaagcccgaggaagtcgattacatcaacgcccatggaacatcaacgccgtacaatgataaatttgaaactgcggcgataagaaaagtttttggggcggcggccgataagcttatggtcagctctacaaagagcatgactgggcatatgctgggcgcggcaggcgcgatagaagctgcggtgtgcgcaaaaactatcgaaacgggaattgttccgccgactataaattacgagcataaggatccggattgcgatttggattatgtgccgaatgttgcgagaaaagccgatgtgaatgtggcgattagcacaaatctcggtttcggcggccacaacggagctttgttattccgcaagttcaaaaccgcataaaaaacgcgtgaaaacggggggtatgctccgttagaaaaggcgtcaagaccgcttacgtatgtcaaatacgctgcgcgcccttgacgcctttttctatactcgcctaacccccattttgacgcgttttttgtgtgttggcggaatctgtattattgtgtatttgattaaaagatgctccgttagaagaggcgccgaggccacttacgtatgtcaaacacgccacgcgcccttgacgcctttttctatactcgccttccccccgttttgacgcgttttttgtgtgttggtggaatctgtattattgtgtatttgattaaaagatgctccgttagaaaaggcgccgagaccgcttacgtatgtcaaacacgccacgcgcccttgacgcctttttctatactcgccttccccccgttttgacgcgttttttgtgtgttggtggaatctgtattattgtgtatttgattaaaagatgctccgttagaaaaggcgccgagaccgcttacgtatgtcaaacacgccacgcgcccttgacgcctttttctatactcgccttccccccgttttgacgcgttttttgtgtgttggtggaatctgtattattgtgtatttgattaaaagatgctccgttagaaaaggcgccgagaccgcttacgtatgtcaaacacgccacgcgcccttgacgcctttttctatactcgccttccccccgttttgacgcgttttttgtgtgttggtggaatctgtattattgtgtatttgattaaaagatgctccgttagaaaaggcgccgagaccgcttacgtatgtcaaacacgccacgcgcccttgacgcctttttctatactcgccttccccccgttttttttaagcataagctataattgcgcgttagattatttgttaatagcgcaccgcgctgttctaagtatttttatgtttttaggaaattaaagctataaaacattcttttttgtcgctgattcggccgctgtattgcctaaaagtttttgtaaaaaaacgcgcagcacatcgtgccgcgcgccttatgtataaaaatagataaaacctactttcttctgcgtattattgcaattgcaagaacaagagcgccaagtaaggcagatatttctgctggttcgggaactgtgaaagtcaccgatagagcagtgtcgccaaatacagcctcccattcaaaaccgtttgtacttccttcaaaaacggttccttccatggtgctgccggtttcatatgttattacgtcggacaacgtaaattccccgccattggcatttatgaattccttcatagaatagccgtcgaatacaaattcaagcgctatgtcatttatattaccagtcttattaaatttcccttcaaatgctatcttatcgtatgcgacattacatatccgagattggcgtcagtggcgtcaagagctccttttctatatcttatgatttggtagccgttctttgcgtcggtagcgcgcattgtgatgtttaatgccgtcggctggtcgacgtatccgagcgttgtgacagcttcctgttttgaggcgtttttaacttcttcgcttgcgcagatatgaaaaaattttaagcgccctcgggatatattttattggaggataaaatacatacgccaagaatattatcgcaaaactgcactccctaagccatattattagtattatgcaaattattagagccacgaatgagcggaatctcatgctggtcgtccaattaatatgcttgaaggacggatagggaaaattgcttatcataagccatgcaataagcagcataagcggaatcaaaagcggcgtaaacagctgcaaatcgaaactcagtatggtcagcgctattgacgcgacagtcccggcggcggcgggcgcaggcaggccgctaaaatcgcccttctcatatttctcgtgcccgtttatgtacgggtttgtcagaacgttgaaccgcgcgagccgtattgccgcgcacaacataaatataaatccgattagccaaccggtatttctaaggaggcgcgcccatgtttccgacagaatgtcggagggctgcaatatgagaaaatacattagaaggcatggcgcgattccgaaagacacgctgtcggcaagcgaatcgaattctttcccaaaaagcgaagttttgccgcttgcgcgcgcgacgcgcccgtcgagagcgtcgcacatgaacgacgccaatatgcagattattgccaatacataatatcccgtgcttggggcgtctgcgccggcagtgtagttaggcgttattagggctgcaatgtggtcgattgtcctgtcggtggattcggcgttgaatttgccctgcacgcacaagattatcgagaggaatccgaaaaacagatttcccgcggtaaagctgtttggcaaaatgaatattttgcttgcctggtgcacattttcccaaagggactgttctgacttttggttgtcgctcattttttcagggattcgaggtatttccagaagttgtcctcctgctcaaacatagtttcttctttgaatggcagcttgaatctaaatacgaagtcggcgattgtgcttcggtgcagaatgtagtgtgcgtgaagggtttgggtttcttcgataagttcaaaatatatgcggtagtcgccggtgcgcaggcggtaatagactttgccttcgcggtgtattctcccgatatctttcaatccgccctccagctgctccgaggtcaaggagccgaatgcgtcgataatttcgagctgggcgagctttccgagcttattgagttcggccattgcctgtttgctgaaagtcacctggtacattttttcctttttttgtttatttttatgggctacgctaaacgcaaaaaaaaaatcttcaaacaaaaatgagatgaaactttttatgaaaatttgcgtttttcatacagcaaaggaatttaagaatatgaaaaagacgatgcttataatggttgcagcgcttgcgggggcggctttgttcgcgcaggaggcaagaggtccgaaaggcgggccgggcggcggcgccgccaagttcgacatgccggggctggatttgaaaacccgcattcagcttatgaagcagtttgacaaggacggcgacggaaggctcaacgacgaagagcgcgcggaagctatgaaggcgttgaaggacaaaaccgccgatttggagcaaatgcgtaagaagttcgcgcaggagataattgccaagttcgacaaggacggcgacggcaaactcggcgtggaagagcttatggaatttctggaagagcagcgcagggtgtttgacaccggcaggcgcaatttcaggcgcggacgcgacttcgtacccccgaaggagattcttgccaagttcgacaaggacggcgacggcaagctcagccgcgaggagcgccgcgacatgttcgacgaagcccgaaaaaaacgcgaggctctcataaagaagtacgacgccgacggcgacggcaagttaaacgatgccgaaaagacgaaattgattcaggatcccgaggtgcaggagatgatgaagcgcatgattggcaatccgccaccacctccgccgccgcccggagcgcagtgaagttaatcttgggcgtgatgcgctccatatttagcccggtgactgccgggctggaaatggggtgcgcgcctatttataaaaatgaatttttagaaatcccggatatattgtccgggtttttttgtgtttcggcgtgcgaattttaaacttgcgcgtggattttgaataaatcggctggatatataaataatgaatcgcgggtgcgaggagagattatcgcattgcataatttgcggagcgcggggattttataatttttcggtttggataaatacggatagaggaaaatttttgcgcttacgaagtgctggggggcggcataagttcccgacttttgcctaagagatgcggtggcggaaaggctaaatttctgcatttttgagcctgtacgatgcggcggcggaaaggctaaatttaggcgtttcatttttgcagctcgcgcgccgcagaaatataaaattgaaagccccgcgggatatgctgcggacgaagaaaaatcatggcgtgccttgagatgatacaagccctgttttttagaaaaaagatcaactgcttatttttatgttgacaaaaaaagagcaactgctctttttttattcatgaaaaacgattccgacacacatattaaaagcgccgtaaaatggcttctttcaaaacagtgcgatggcggctactggaatgctgagctcgagacaaactgctgcatggaggcccaatggctcatggcctcaaaattttgcggcataaaaagcgggcaggaggagtcgattataaaatatataataaattcgcagagggaggacggcagttgggacgtttacagaaatgccgaaaacggcgacgtaaatacgactctcgaatgttattttgcgcttaggatatctggatttaataaaaacctgtcctttatgaaatccgcgcgcctatggctgttggaaaacaactggataaacaatataagggtgtttacaaaatattggctcgcgctcttcggcgaatgggattggaaaaaaactccggccctaatgcctgaaattatatgctttcctaaatggtttccgtttaacatatacaatttttcttcgtgggcgcgcgcgacaattatgccgcttgcggttgtcgcatccatgcgtcccgtaaaaaggcttccggacgaattgcgcgccgacgagctcttcccaaacggtcgaatctatcccaaaatagaaaccagcacaccgtcaaaattttcgctctccgacatatttctgctgaccgataaaataatccacttctacaacgagaaaatggcggacacttcgtttaggcgcaaaagcatgaattccgccatgaattggattctgaaacaccaggacgacgacggtttctggggcggtatccagcctccgtggatttacgcgattattgcaatgcacatacttggattttccccaaaacagaaaaatatggccgccgcaataaacgcactaaacctacattggactgagaaaaccgaaaagggtacgcgcgtaaaggcaaccgaaagccccgtttgggatacaatgctcgccctaaactcactcctcgacgcgggggtcggcgcggacgacgaaagaattttaaaggctgtggattacctgcttgaaaacgaaaataagacctacggagattggtcggaaaaattggggcgcaacgtggagcctaccggatggtcgtttcagcgcgcgaacaagttttatccggatatcgacgacaccg

SEQ ID NO: 4317 - DNA, 6974 bp, Unknown
  16S sequences of unknown bacteria
tgcgcaaaaaccttgcacctgaacaattcaaaagtttacaccaacatgctaggttaaggtacttttgaattgttcagcaggcattaaaataattttctcttttttatgcgaccgacgggatactttccgtcggttttttcgttttgtgaattttttaagtatccccgtttttaaagctcaaaagtcaataaaacccgctgaacaagggcgtttggcgggttttgaaaaataaaattttaggtataaaaatagtccaaaatcctttcaaaagcggtggaaaactctttgaaaattatctcaataccgtaaaaggtattataggggataaaagcattttagttttaggcggcggagacattaccaaaaattgtgcaaccaagatggaaggaatagcttaggtgcgtgacggcagtacgggcgaataccgcaaaggctaccatacattggggataactgccttgaaaaccgagataaagctacccatcccggtatatacaaaagtgtttacgagcgaagaagagggctttgtcagcgaaaagtgcgaagaatgaattaccgtaatgcagttgattgaatgctcgaaacgaattttcgggacaaacaagttcgttttctacgccgttgccgtcggcttatttgctttgcttgcaaaatacaagcagggcataaatcatatgctatttaacccaccaaagccccttcagcttcaactctccatatttggcttaaaaaatggggagactaaaataaaaaaaaattgacatttaatccttattgagatataatatcaataaagacagaaaacgatagggtgtacatttttatgatgaaacgcaacactattcagcgttcattggtttttgaagctgtgaacaaactgaagtgccatgccactgccgatgaaatttatcagaccattatgaaagaacacccgaatatcagcagggcaacggtatatcggaatctgaagctgttgtctgaaacaggtgaaattcgcaaaatggaaattccgggcggatcggattgctatgaccacaggattcaggagcattgccatgtgcggtgtgagaaatgcggccgggttttcgatgtggatatggaatatattaccggcttggagaaaaacatcacggagagtcacggctttgcgttcacaggatacgatatccttttccgggggatttgtccggattgtcaaaatcgcggaaacagcagaaacgctgatttcaagcatcgttcataagcggcgcatacgggcgcatacataacccgtaaatatataatttaaaggagtacagttatgagaagtattacaacattagacctacaatacgcacaccgtttctacggatttaaaggcgaagcacagtatttgcacggacataccggagttctgaccatcgaggtcgaggattcggtggagcccggcgtgaatatggtttttccctgcaatgagattcagaagaccgcatgggaggttctcaaaaactttgaccacgcattgattctgcgggaggacgatccgctgctgcccgcaattctcggcgtttatgaggctcagggcatcaaggacggcgcacctaccaacaagatgaaaggcccggcctttcaaaccgagcttgcaaccgcctatcccgattgtcgtttggtcgtgacaaaggaaaccatgaccgtcgaaggcatgataaaaattgtgtatgatctgctgaaggataagctgaacatcgccaagcttaccttcaccagcggagtcaatgccgcatctcaggaatacgaaacaagcagaaccgttgaccgctgtccgctgtgcggcatcgccctgaatgagaacggcgtttgcccgaaatgcggatataaaaagaaataagaaaatttttcatcagcgaagcggattaaatagttattattcatttgaaaaagtcgcctaagtgaacttaagcgactttttcgtttgggaactgaccccaattttgatacaaatgcacacctttttgagcttggggggtgcaaatgataattttatgaattctcagcaatgtaataattaccgtaatgcagttgattgaatgctcgaaacgaattttcgggacaaacaagttcattttctacgccgttaccgacggcttatttgctctgcttgcaaaatacaacaaggcataaatcatatgctatttaacccaccaaagcaccctcagcttcagctctcattatttggaacccggccttttgcttgaaaatggggaaactcgaagtgaattttggttgacaattttcatttcgggtgatataattttttatgttaaaggcaaggatggagagaagtaataccgttaaagcgtgcaaagagagccggcggggctgggaggtcggcggcgccgcggtatgaataacactccggagccgcaagccgaaagccccaagggtcaagtaggtgcgccgcgccgacgcgttaaatcggaataaaagagaccatacagacagggtacaatagttttgtctgatcggtaaattaggtggcaccgcggatagcgtctattcgtcctaatgaatttaggatgaatagacgctatttttaattgatttaaggagaagtttttatgaagcacactgacatctcggaaatttttaaaaacagcgacctgctcgaaacgcaagtcacggtctgcggttgggtgagaacctcacgcgattccaaaagcatggcgtttatcgagcttaacgacggcacaacgcttaagcacctgcagatagttataaataaagccgattttgatgatatttcggattatatgaagctcggaactgcgcttaaagtaacgggtaaagcggtaaaatccgccgttgcggcggattcggtggagataaacgccgaaagcattgccgttttaggtgagtgcccgcccgattacccgctgcaaaaaaagcgccacacgcttgaatatctccgtacaataccgcacctgcgagtgagaacaaacacattcaacgccgttttcagagtgcgctcggtggtttctgcctgtattcacgaatttttccagagccgcggctttgtctatgttcatacaccgctcatcaccgcgagcgactgcgagggcgcgggcgaaatgttcaaggtcaccacaataggctacagcaatgattataaatcggaagaggaatattatgccgacgatttcttcggcagacgcgccgctttgagcgtttcgggtcagttagagggtgaggttgccgcaatggcgctcggtaaaatttacaccttcggcccgtccttccgtgccgaaaagagcaacaccccgcgccatgttgcggagttctggcacgttgagcccgaggttgcctttgcagagctgcccgatattatagaaattgccgaggcgcttataaagcacataattaaaaccgtgcttgaaaaatgccccgaggagcttaaattcttcgataagcattttgaaaacgggcttgttgaaaagcttaccgccgtggcaagccacgatttcgcaattatgacctacaccgaggctatagaaaagcttaaggcctcgggcaaggaatttaagtatcccgtggaatggggcttggaccttatgaccgagcacgagcgctatatttccgaggaggtatgcaaaaagccggtatttttaaccgattaccccaaggatattaagtcgttctatatgaaacagaaccccgacggtaaaaccgttgccgctaccgaccttttggttccgggtgtgggagaaattatcgggtgcagcgaaagagaagctgaccttgataagctgcttaacgccatgaaggaacgcaatatgtcgcttgacgactatgagcattatatagctctgcgccgtttcggctctgttccgcacagcggcttcgggcttgggcttgagcgcattattatgtatgttacgggcgttcagaatattcgcgacgttattctttacccgcgtacagtcggcagcatttcgtaattaaaggggaataaatttatggaaaaatatatttctaagctcagcgagtttgatacgcagaacgcaatagcgcttgttaaggaaaagttttcttcggagctttgcgccgcgcttgacttatcccgcgtttccgcgccgcttttcgtaaagcgcggcagcggaataaacgacgatctaaacggtgttgagcgcccggttgattttgatattaaggaaaccggcgaaatagccgaggtggttcacagccttgcaaaatggaagcgtatggcgcttatgcgctacggcttcccgatacatacgggactttacaccgatatgaacgctatccgccgcgatgaaatatgcgataatattcactcgatatatgtcgatcagtgggactgggaaaaggttataaccgcagaggacagaaacgaggaatatttaaaggctaccgtcaggagcatttacggtgcgattctgcgcacggctgcggccgttaaggaaaagtaccctgtgcttgatacaaagctgccgaaatttataaactttgtatcgacctatgagcttgaagaaaaatatcccgatctaacgcctaaagagcgcgagaatgccgccgcaaaggaatacggcgcagttttcgttatgaaaataggcggcagactcaaaagcggcgaaaagcacgacggcagagcacccgattatgacgactggagcttaaacggagatattttagtttataatcccatgcttgacagcgcgtttgagatttcctcaatgggtatccgcgttgacagggaaagccttatttctcagctcaaggccgaaaacgccgaagacaggcttaaatacgagttccatacgcttttaatgaatggctcgctgccgcttacaataggcggcggaatagggcagtcaaggctttgtatgttccttttgcaaaaggcgcatataggcgaggtacaggtttccatctggcctgaaagggaagtaaaaaaatgcaaggcggcgggaatcacgctgctttaagaggaatgaaaattaaatgagaaacagatatttggcttttctgtcatctgttgtttttgactttttcgcggcagcattgtctcttttggtttcacttaagctggtctgcatgcccgagcttaccgacaacacggatatgtttgtgttttccgtgatagtctggtctatgcttattgtcctttcactttatatctttaaagcctacagtgttttgtggcgcttttcgagaatacccgatctgctgcgggtctttgcgggcgtgaccgtggctttcggcggcttgtttatctgccaaatggcggttttcggcagggcatattctctgcctgttatgctgctgactttctcgttcacatttttccttgcggtcatgctgcgtttacttatgaagtataccgttctccgcgcagcctgtgagagcggggagaacgcggctccgtcggagcttgacggcaatattatgataatcggcgcgggcagcgccgcgtctatgcttataaacgagcttaagggctataagccgtcgggcataaaattcaaatgcataattgacgacgacccctcaaagaaaaatacctatatatcgggtgttaaggtctgcggcgaccgtaaccatataatagaagccgccgaaaaatacgagatagataccatcctcttcgcaattccgagctgcggcagtaaggaacggtcggaaatactcaatatctgcaaggaaacaagctgcaggcttaaaatagttccttccgtttatcaaatgatatgccgcgaaaaaagcagcatttccgataagatctgcaaggtggaaattgaggatctgctcggcagagcgcccataagccttgatattgaccgcgttatgaattatgtggcgggcaaaaccgttttagtcacgggcggcggcgggacaataggcagcgagctgtgccgtcagatagcggagcacaagccgaagcgtcttattgttttcgatgtttatgagaataatgcttatgatattcaaaacgagcttaaaaggaaatacccgaagctggatctcgtaacacttataggctctgtgagggacagtaagcggcttgaatgcatgtttaatacctaccgccccgatattgtatatcacgcggcggcgcataagcatgtcccgcttatggaggacagccctaacgaggctgttaaaaacaatgttttcgggacgctgaaaacagcgcgctgcgccgataaatacggcgccgaaaagtttgtgctcatctcaaccgataaggcagtcaatcccacaaatattatgggggcgagtaagcgtatctgcgaaatgataattcaagcctacaataaccgctccgaaacggaatttgtggcggtgcgcttcggaaatgtgctcggcagcaacggcagtgttattccgcttttcaaaaagcagatagaggcgggcggccccgtgaccgttaccgaccccgatattatacgctattttatgactatacccgaggcggtagcccttgttctgcaggcgggagcgtcggcaaagggcggcgaaattttcgtgctggatatgggcaagccgatgaaaattttggatcttgccgaaaatcttatcagactgtcgggtcttgttccgtataaggatataaatattgaatttataggcctgcgccccggcgaaaagctttatgaggaaatgctcatggacgaagagggaataagggaaaccgaaaacgagcttatatatataggccatccgatagagtttgacgaggagaaattttttgcgtcactcgataggctgcaaaaggctatgtatgatgacagtgccgatatacgcggaatcatttcggatatagtcccgacctatcactgcaaaaaggatattaattaatgtctaccgaataattgcattagcaaatgcaattatataaaatcgagttaaaatctcgattttatgggtcaaaacctttgttttgaccgtcagtatccattgattgtcgcctgatttta

SEQ ID NO: 4318 - DNA, 2738 bp, Unknown
  16S sequences of unknown bacteria
gaggggctcctgctcagacttctcttcctcgccgccgatgtacgggatgacgttgtcgatcatctcgggccactcgcggaaggtctttccggcgccggagattgcctgataggtggtcgcgacgacctgtgtgggtttccacttgaggagcggcgtgagcgcggggacgtaggactgaatcgagcagttcggcttgacggcgatgaagcccttcttggtgccgagacgctttctctggaattcgatgacctttatgtgctccgggttgagctccggcacgaccatcgggacgtcgggcgtccagcggttggcggagttgttggagacgaccgggatttccgctttcgcgtacgcttcctcgagagccttgatttcgtcctttttcatgtcgacggcgcagaatacgaagtcgacgagcggctttatctcgtcaattttggacgagtccatgacgatcatgttttttacggattcgggcatcggcgcggtgagcttccacctgccgccgagggcttcctcgtaggtctttcccgccgagcgcgggctcgcgacgagcgcggtgatctcaaaatacgggtgatcctgcaaaagtgtgatgaatctctgcccgaccataccggttgcgccgacgatgccgacgcgtaacttttctgccatctgaaatatcctccgtggatttttattttattataatattatatcaaatcgcgggagaaaagtcaactgttatcttgttaaaaaaacgcctttttgcaagatatttcgggtaatcctgcaaaaagacgtgtgaactcgcggtatccgttgaatgacgcgcaaatttcgcgtctcgctctaccaaatggcgcacaaatattatgccgcgctctacctctgtaggggcgaccattggtcgcccgcccgaagggcaaggatatcgttccgggtatgcctttattgcgggcgtccgatggacgcccctacaagattgtgcgctaaggtgaggttcggaattaaccctttgcttcgttcattgcggtcagcatcttatcgatgttttcctgaacctttgatttgttcgagtcgatgattgacgccacgtcggcgctgccgttgtagattttgtttcttatctgctcttcgagtgagctgatccattggtacgcgacaccgatgtcgtaggagcgggtgcgtttgattatgttgagcatatcgatggagtcctgattccggagtcctttctgttcgacgacgacgctgaagtatggctggaggaccatttcgtccgactcgtaggagagggcgtcgaagacctgaccgatctcctcggcgtgtgtggaggtcaccggaatcgtgaagacggcgcactggtggacggctgtagagcggtaatcggcctgattttcgtcgagcttcgggaacggaacgattccgaagtcctcgttcatgttccggagaagtccggttgtcttcagctcgcacccgaggaagagcgcgcggttcgcctcatagaagttctggtagtaggtgtcgccggagtcggaggaggcggcaaggtaaacgccggatttcccgaagaaggttgagagcttctggcaggcgtcgacgaacctgtcgccgcagtcaaataccggcatgtcgttcttgtcctttgtgacgaagtccgcgccgagcccgaagagaaatttcatcgggacattctggaaggagacgcacccgaacgtggagttcccttgtgcgctgcatttgaaggagtcgtcgccgttaaggttcgcggcggcttcgcagtattcggtgagcttgtcgagcgtccattttccgtccctgacgagctgatatggataatcaagcccgagatcgtccatcatattctcgttgaacagaaggcaccagagaccgtcccagcccatgaggtgcgcgttcgacatcgcgaagtagtgcgagccgccgatagatgtggcgtcgaggaagatctgatccaaccactcctcaccgaggtgaatcgtgccgatttcgtcaagagctctgtagtagccctgcgacagcccggagcccgcggtgaacatcggcatatatacggcgtcgtaggtggagtcgccggacatcacgagggtgtcgagctcggtcgccattttgtcatattcgccgttcacttctttgagcttgtagttcattttcgcttcaactttggcgttgcggttgtagatggcgtcgttgattgtttcgccgtcgacctcttcgggggctatggcgcagtgcatattccagaggttcggcttgacgttccagacggtgaaggtctcgccgccaagatcgacgccgtcgtagaacgggtaggttttttcgacaggcgctgttgtgtcggtgctctcgtcggtcggtgaggatgagtccgtaatcttcccggattcggttcccccgcaggaggacgcgccgagaagcgcggcgatgagaatcagggacagggattttttcgcgtttgaaggttatgtaagacatggcagcatctccttagtgattctgtgaattcggtatatcgctgattcaattatacaatataatatgcggtttgtcaaggggttacggtaatttttatagtccggcacgattttacgatatacgaccaacaataagcccgcgggatggctgggtgtacgtaagacagtattgcgccgaggttgacaaagcggcacgaaaccgcatgaagctgattgtgccagagctggcaaagcagtacggcgtgacagagcaactgaaag

SEQ ID NO: 4319 - DNA, 4955 bp, Unknown
  16S sequences of unknown bacteria
acagatcaaaaagacctgtattcccaaatgggatacgcacaaaaatcaattacagatacagtatagcactgtatcttgtacctgtcaagatgtagaatactatatatagatttgcagccagcgacaaatacgatatgtagtaattgaggaaaggtgttgtggcttcctcattatataaataggagtgattacatgaagttctgcaggatagtgtgagtttgaagaaatatcgtgatatatcaaaaagaaagtagagtttgtcatagattgttgcctctttgtcataatgtcaagtgataaattcaaaaaatagcagccacgattaaagaattcctctttgtggctgccattctgataatttttagcttgacttgtactgcttaacttattatattcgagagtacgaattataatgtggtagtacggaggtgttatatggattacatgactttgaaagaagcaaaatttggggagtaacaccccgttggataaattactactgttccgcaggacgtattccaggtgcggaaaagatggggactgtctggcttatccccaagagtgctacaaagccagtagacagacgaagaaaacccgccagtagatcaaaaggagaacatcatgattgaagtttattatgcggaagatgacgaaacgattggcaagtctgtaaaagaatatttgaaacagcagaattgcaaagtagccgtttttgatagaattgcggatgtcaagaaagcgttaatcggtcatttgcctacaatcgtcttgctggactggaatatgccggacgggcaaggaaacgaattgtgtctctggatacgagaaagatggaaaacccttcctattatctatttgacagttcgtggcgattcccacgacattgttaccggctttcaaaacggggcagatgattatgtggtaaaaccttttgacctcgctgttttgtattctcgtattttggcactgttacgaagaactgcaagtgtaaccgaaacaaagctattttgcgataacttgatgttggataaagagaaaacggctgtctatgatgggcaagaagaagttatcgtaagtcagccagagtatcgtattcttctaatcctaatggaaagcaagggtaaaacggtcaccagaaatcagttattagagcaagtctgggatcgtagcgggaattatgtaaatgataatacgctgacggtcacaatgaaaagattgcgggaaaagctgaatcatccagcctgcttaaaaacgatccgaagttttggctaccgtatggaggacacacaatgagcgaaaaatggaaacaaaaaatacttctgatttttccgtttgctgttcttgtggcaggcatgatacttaccgccgctttcttcctacgcacgtaccggcagattgcatttgaacacacctcggcattatgcgaaaccatattggcaaattctcctgaagcagagccgcagctattagcggctctgaaagattatcattcattgacggaacaagaactcagaggcaacgattatctggaaaaatacggataccgggtcgatgatttttgctatgatttcccgctggatacagtgctttttccgattctatttttccttgtgaccgcctgtgcgtttgccgcaggaatctttctatcccgcagaaaaaatcgaaagaggatcgctgatttgactgagtatttggagcaggtcaatatcggcgcaggcgggacattgatacagacgaaggaagacgaatattcccatttgcaggacgagatctacaaaacggtcacgatgctttaccaaacaagagaaacggcagttgctgcaaagaaaaattttgcagagaacctggctaatatcgcacaccaactgaaaacgccgatcacagcggcttttttgtcgttgcagcttatggaaaaagaaattccgggggcttacgcagaacaagtcaaacagcagttgaaacgattaaaccgtctggaagaatccttgctgatgctttccaaaattgatgctggaacgctgccactcaaacgagaaaaggtcgatctttatacggtattaaatctggcggcagataatctgaacgatttattgcggaaaaatcatattgctgttgaaattccagaaaatggaagtattgaattttggggagatttggagtggacaatggaagccctcatcaatctcataaagaattgtatggaacattccaaaccgggcggcgtagtctattgtaactactcaggcaaccctctctatgtagaaattcaggtatgggatgacggagagggctttgacacagaggacttaccgcatctttttgatcgtttttaccggggccggtgtgcggcctccgatggaattggaattggcctggctcttgcccgttccatttttgaattgcagaacggaaccataaccgcctataacttgcaaaatggcggtgcttgttttgaaataagaatgtacagtcactgagatgtcactttactttgttatactgtacgcaagaccattcagtagagaggagaaagtgacatggaaatactaaaatgtgaaaatgtccgaaaggtatatggctctgggaacaatcaggtcgtggcgttggatcacattgacttgtctgtacaaaaaggagaatttgtagcaatcgtaggggcatccggttcggggaaatctacactgctgcatattttgggaagcgtggataagccgacagaagggaaagtcctgatagaggggacagaattatctgccatgaaccgaactcaggcagccattttccggcgcaggaaggtcggattggtctatcaattttataacctgatccccacccttaccgtccgaaaaaatatactcatgccgctcctgttagacaaacgcaaacccaataaagaatactttgagcagattgtacattccctgggaatcgaagataaactggaatcgttgcccagccagctttccggcggacaacagcagcgagttgctatcgcccgttctttgatctatcgcccggcgctgttgcttgctgatgaaccgaccggcaacctggatcggaaaaacggagaggaaattattgacttgctaaaattatctaaccgtaacctggaacagacgattcttttgattacccatgatgaaaagatcgcattggaggcggatcgcgttattaccatagaggacgggaaaattgtcggcgatcagaaacggaggtaagaatatgtggaaagactattcgataggattcatcaaaaagaatcgggcttccagcgtatccgttctggttgcggcgtttatttctgccctgtttctttctttgctgtgcggtttgttttataacttctggaattatgaaatagaatctgttgttttagaagaaggaaactggcagggacgcatcagcggggcgtttgaagaagataaagtgtccgagattgagaatttcgccaatgtaaaaacggctataatcaatgaggatttatcagacgatcaaactcttgtagttgatatttgctttgataacatgagggctgtgtatcaggatatgcctcttatcgcccagcagttaggtgttccggaaacttccgtatcgtatcatgaatcactgctgtcaagttatttcatcaacgatccgcaggacagcaatccgcccttattgatggctttttatctctttgtactcctgcttgtgtcggtgtctttgattttaatcattcataactcgtttgctgtatctatgaatgcccgtgtacatcagtttggtatcttttccagcattggggcaacgccggggcaaattcgcacctgtcttttacaggaagcggcgatgctttgtgtgattcctgttttgatcggaagttttgccggaatcgctttgaccttcggagccatccaggcagtcaatattctcgccgatggtattgtcggcagacatgaagctgcctttgcctatcatccgctggtgtttgcagtcacgattctgacctcgtttttgacggtactgatttctgcctggctgccagccaggaaattgagcaagatgaccccactggaagccataaaaaacacaggagaattacagctaaaacggagaaaaaaatcccgtattcttgcgcttttatttggaaccgaaggggaacttgccgggaatgcgctgaaagcacagaagaaatctctgcgaaccgccacgctgtcgttgaccctttcttttttgggcttcgcccttatgctgagtttttttactctctctggaatcagtacaaaccatacctattttgaacgctaccaggatgcctgggatgtgatggcaacgcttgaggacacaaagatcgaggacttctctcatacggatgaaatccatgctttgcctgatatagacagtgtgatttatcaaaaggcaaacgccgtttgttctattggggcagacgctgtcagcgaagaagtaaaaagtctgggtggtcttgaaacagtcgccggaagtgatgtcagtatggcagatgggatttataccattcaggctcctattgtaatcatggacgacagcagctttgccacgtattgtgagcagatcggcgtttcctcagcggaaaacgggagcgttgttttgaaccgtatttgggacaacataaacagcaatttcagatacaaagaatatgttccgtttttgtcagagaaccaggacacgatgactttacaaaacctggaagatgcggctgcaactgtggagattccggttttgggctttacaaaggagccgccggttttgagagaagaatatgataactatgctttagtccaatttgtgtccctttccacctggaaacaaatcggagaggcgattggaaatgctgaaccagatacctatatccgcattctttcagaaaaagaaagaaccctgacagaactgagtatgattgaaaccgagctgacgaatgtgctggggcatgacatttc

SEQ ID NO: 4320 - DNA, 3463 bp, Unknown
  16S sequences of unknown bacteria
gtccaccacgcaaggtagaacacggcgcaggcaaacagcagggcatgcccccagccaacctgcgacacgagcgcaacgctgtccactaccgcacctccttgtccggcgccacgatcacgtcgagcgcccccgcaagaataccaagagagtaggtgtctgcctgatagcgctcgccgtcaatctggacgggcggcgcctggtcaaacgagagctcgaggctgcgcgcggtccgaatgtcgatcccctcgaacctttcgtgatggccgtttttggcccggaggaaaatgaaggctcccctgagcgtgccaatgggcgcatgggcaatgcacacgtcgagcagcccgtcgtccagccgcgcctcggggcagatcctgaagccactgccgtagctcggtccgatctggaccgccatcaggatgagcgtgccgcgctcgggcgcgcccccgtccacgcgaagcgtgaagccatagtcgcgcttgtggtgcagcagctggtcgacgcagctcgcagcgtacagcctgagccccgtcgtgcccgtgcgcaggcggcgttcctgcgtgtcgagcgcgatgcccgcgtcgagcccgaacgagatggtctccatgaagcaggtgccgttgcaggtgcccacgtcggcgttgacgacgctgcccgcgcacagctgcgcgaccgcctcgtccaccgaaaacgccatccccaaagtgcgcgcgtagtcgttgccagagcccatggggacgacgcccagcctcgggcgcttggcacgctcgaggctcacaagcccattgcccacctcatggatggtcccgtcgccgcccacgcacacgatggtgtcgtagcccgcgctgccggcggcaaacccgcgtgcatcgcccgccgcgtcggtgaacacaacgtcaactgccgtgcacgccccctcctgcccgcgtagaagacgctcgacgcgcagcgcggcgtcataaccgcggcccagttgcgccgcggggttggcgatgacgagtgtccttcccagcatgtcgaccggcagactacctgagcactttcgacaggcgcatgatcaggccggcggcaatgcaggcgaccaccgacacgacaaacggtatccaccaggtgaacacgccgggcagatcgtcgacgttcatgccgtagaagctgaacacgatggtcgggattgccatcacgagcgtgatgaccgtcaggcgacgcatgacctggttgacgttgttgttgatgacgctcgagaacgtgtccatggtgccctcgagaatgtccgtgtagatcgtgcacatctcgatggcctgcctgaactcgatggcgacgtcgtcgagcaggtcggtgtcctcctcgtacatgcggatgacgcgccccttgttgatgcgcgtgagcatggtctcgtccgccttgagcgagacggagaagtagaccagggagttctggaaacccagcatcttcatgagctcttcgttgcgcatggaatcgcgcagctcgtgctcggatttggtgaactggcgctggatgttgcgcagatagatctggtacccgtggctgatgttgagcagcatcagcagtagcagcctcgtgcgctggttggtgttgatgcgctgcaggcgcttgttgacgaaggtgtcgatggtcagattgtgccttacggtaaccgtcacgagcatgtcctgctcgggcaggaacagaaacgtaagcggatgggtatcgtactgcacaatatccgggctcttggtgtccacggcatcttcgacgctcgggcagtccacgatgacgagcgtctggcgcgtgtcgtcgtcgtagtcgacgtgcggccgctcctcgtcgtcgagggacgccgtcacaaactcggggacaatgcccagctcgttgcggagccactcgcgctcgtcgttggtaggagaaactacgctaatccagcacccgggttcgggtttcgtgatttgctgcgtgccgtcggctcccgtcttgaagcattggatcacaacaccctccttcggctgtgcattggctgtaagcaggctccattgtaaggctctttacaggtaagatagcccaagatatgcgagcaatattcgaacgaggtgcattgcatgactgactcgatactacgcgatcccatcaggttcgcctcccatgacggcagctccgtcatccacggctacgtctggcacgacacggacgcagccgggcgcaaggcgacggtccagatcgcgcacggcatggcagagcacatcggccgctacgacgagttcgcgcgcttcctcgcgtcccgcggctacctcgtgtgcggccacgaccacatcggccacggcgcgagcagctccccggagcgctggggctgccttcccggcgaaaacggcaaggaatacctcatcgccgacatgcacgagctgcgcaacaagatggtcgcggactacggagccggcggcgccccctacttcctgttcggccactcgctcggcagctatctcacgcgcgcctacgtgacgcggcacggcggcggtctggcaggcgccgtcatctgcgggaccggacatgtgccgcctaccacctccaaactcggcaacctgctcgcaaccttcattgccaggcgcaagggcgaagacaccaagagcaagctgctcgacggcatgggcgtcggcgcctacaacaagggcatctccaacccgcgcacgcccgtcgactggctctcgtttgacgagcaaaacgtcgatcgctacgtgcgcgacgagcgctgcggcttcatgttctcggcaggtgggtaccaggtcgtcacgagcctgaccgaagaggtctgctcgcccaagagcgcatgcgccatccccaagaacctgcccctgctctacgtgagcggggaatgcgacccggtgggggacagcggcgcgggcgtgagaaccgccgccgctctcgcgcgcgacgcgggcgtcgcggacgtagaggtcaagctctacgagaacatgcggcacgagatcttggccgaagccgagcacgagcgcgtctttgccgacatcgctgcctggctcgacgagcacgccgctccacaggacgccgcccagtagccgcacgacgccccacctgacacgaccacgcacgagcaccacatgcgaaaggaccgcacatgagcgagaccacgcaaggcaagaagtacatgatcgccctcgaccaggggacgacctcgtcgaggaccgtcctcatcgaccacgagggcacctgcgtcgacgaggtgcgccgcgagttcggccagatctaccccaagcccggctgggtggagcacaacccgcaggagatcttgttcagccaactcggaagttttgccgaacttctgaccaagcacgcgctttccgcgaaggatatcgtcagcatcggcatcaccaaccagcgcgagaccaccgtcgtgtgggaccgcgccaccggcgagcccatcgccaacgccatcgtctggcagtgccggcggcccgccccc

SEQ ID NO: 4321 - DNA, 2671 bp, Unknown
  16S sequences of unknown bacteria
ccttgttttctttgaaggaacgtatgatacgccggggaaaagtcatgtgggcatcgtgcgtccagtaaggacgatagtagaagtagagaaaggaggctgtggttaaggtactaccccgcaaagcaacgcgggaatccacctgctttaccgaaaatcgaaagatgtacgggaaaagagcacggcaggaaagcggcaagttgcctaaagacaatcgggcacgactgaaccgcgaggataagtgaatacaaggataaaactgaattgtttaaggtgagttccaagcccttgttacgtgtgggcaaaggaaaattgtctgaaacctttggtacagggaccgtaggaaatagagtccttcctatgggttgctaatcccctgtgcggcacgtcggagaaccgatagtaacggaacaaaagcatatccgataattcacattgacctactactatcgtcaactggagattgtctaaaccggaacgcttgaaaaagctatgtgtaatgcagcaatgtgataaatttcaaagctatgctagaaagatgacactgaaaatccggcatgacaacggagcttctgtagtagtccgagaatcctgaattaacaggaaaagccgtaaaatcggatgcgggaaagccgctcacatggcgaagagaagcagttttttgtgcattaaaatcagaaattgattagagaggaaagcctcaatgaaatcaacaatggagattttaacaaaattacaagagaattcccaaaagaaccaagatgaagtgtttacacgactgtaccgctatcttttgaggccagatatttacttcatcgcctatcagcatctttactccaataagggtgcaggaacgaagggtgtgaatgatgatacggctgatggatttagcgagcagtatgtgacagccatcattgaagcattgagaacagggtcatatgaacccaagccggtacgcagaacctatattcaaaagaagaacggtaagctgcgcccgttgggacttcctgtattcgctgacaagctggtgcaagaagctatccgtatgattctggaagccatctacgagccgattttctctatctattcccacggctttcgaccgggcagaagctgccacacggcacttgccatgatcaagcatgagtttaccggagcaaagtggttcattgagggcgatatcaagggatgtttcgataacatcgaccatcccacgctgattggtgtgctgaaccgaaaaatcaaggacgctcgttttctgaacctgattcgtatgtttctgaaagccggctatatggaagactggaatttccatgaaacctatagcggatgcccgcagggtggaatcatctccccgattcttgcaaacatttatctgaacgaactggacaggtatattacgcagctgaagaaggaatttgaccacggatacaatccgagaaactttacggaagaatacaacacgatacggcacaaacgagatgcactgcatgagaaaatcaagaaagctgaagggacaatgcgggggcagctcattgctcagcacaagcaactgacaaagcagttgtttcggacacctgcaaaagcgtgtaccgataagcgattgaaatatgttcgctatgcagatgactttctgattgcagtcaatgggacaagagaggaatgcgaggaaatcaaggcaaaactcacggattttgtccgggacactctgaaaatggagttgagtcaagaaaagacccttattacgcacagcaatactcctgcccgattccttggttttgatgttcgggtgcgcagggatgccagtgtcaaacgctctggaaaacgaaaaatgcgcactatgaacaacaaagtggaactcaatattccactgaaagataaggtggagacctatttgctgtcccatagcatcgctaaaagggatggtaagaggttgattcctattcatcgcccaattctgctgaaccgcacggatttggaaatcgtaatgatttataatgcggaactccgaggactctgtaactattatgccattgcaagcaacttcaacaagctcgtttactttggttatctgatggaatacagctgtctgaaaacactcgcaaacaagcatcgctcccgaattgctaaggttcgttatgaatacagagatgggactggcgcatggggtgttccgtatgaaaccaaaaagggaaaacgccgtatgatgttcgctaagtacagcgattgcaaaggcaaagatttgacggaaaaagtgcccgatttggcgtatcgctattcgcacaacacaacatccttcgaggaacgtctgaaggccaaagtctgtgaagtctgcggctgtacagacagcgatagctatgaaatccaccatgtaaacaaggtcaaaaacctgaaaggtaaagctgattgggaaaaagtcatgctggcaaagaggcgcaagacaatcgttgtgtgccacaaatgccacatgagaattcatcatggaactaaaacggaataacttttgaaatggagcaaaaaatggggagccgtgtgcgttgagaggcgcaagcacggttctgggagaggtctgtgcaaacctgtcgtagaaatacgataaggcggcactttcctactctactaccttggaaacggcatgatggtgtccgccggcgaccccataaagtatgccaat

SEQ ID NO: 4322 - DNA, 3622 bp, Unknown
  16S sequences of unknown bacteria
tcctgcgctgcaggggagtatttcagctgttttccataagatctgcgatcagattctctaatttttttcgattcagaagctggatgtttcggtatcctaaaacaatcattccctgtttggcaaggctactcaaaatacggctgacggtcacgcgactcagacccagggcataggccagctcttcatgggtgcaggtaacagtatggttgccgccgctgtccatgttgagcagcaatcggacgatccgtttctctgcaggcagaaaagaagtggcgtccagatgagtcgaaagcatacgcactgtggcggataaatagcgcagcagggaaaacgccagggcaggaaactgctgcatacagcgctccagtgcgggccggtcgatagacactaccttcgtgtccgccatcatctgggcggaagaaactcggggccgttcgtcaaaaaatgccgcttcgcccaaaatatcgccccgccggtaaattgtcagtagtcgttcatttccctctgcagaactgataaaggttttaatgcggccggaaacgatgtaataaaagcaaaaagctgtgtcgccctgattgtacaggagtttgtttttggggtaggagagaacagggccggcattgtgaaaaggcttccatgcatcctttggcaatgccagtgcatccgacatgaaatattcgtattggtattccatcaaataccctccgtattggtgatttttcaagattgtaacatagtttacattctattgcaatggaatgtggcataatacagatatactttccgcaacgaatggaagaaagggacgatttcatgggaatgacaatgagccagaagatcctggcccatcacgctgggctggatcatgtggaagccggacagctgatcgagtgcaaactggatctggtactgggcaacgatattaccgcgccggtggccatcggcgtatttgaggacgcaggactcaccgaagtgtttgacaaaaacaaaattgccattgtgctggatcactacactccctgtaaggatatcaaagcggcacagctctgcgctgccgcgcgcacgtttgcccgcaagcacgaaatcaaaaatttctttgatgtaggcactgtgggcgtagagcacgctctgatccctgaaaagggattggcgatccccggcgactgcattatcggcgccgattcccacacttgtacatatggcgcgctgggcgctttttccaccggcattggctccactgatatggcagctggtatggccaccggtaccgcctggttcaaagtgccccaggcaatccgtgtgattttgactggcaaaaagcagaagtatgtcagcggtaaagacgtaattttgcatctgatcggcatgatcggtgtggacggtgcgctgtatcaaagtttggagtttaccggggacggtgtggcagacctgaccatggacgaccgctttaccattgccaatatggctattgaatgcggagccaaaaacggcatcttcccggtggatgacagaacgattgcttacctttccggccgcacggatcgaaagtataccaaatttgaagccgatcccgatgcgatatatgcccgcaccatcaccattgacctgaataccctcaagcccacagtatccatgccgcacttgccttccaacaccaaaacggtggacgaagtggccggcaggcatctggatcaggtcgtaatcggttcgtgcaccaatggccgcatccaggatctgcgcgaggctgccgagatcatgaaagggaaaaccgtagcgcccaatatccgctgtattgtaatccctgccacgcaggagggttatttgcaggcagtgcgcgaaggcctggtggaagttttcatcaacgccggctgcgccgtgtccacacccacctgtggtccctgtctgggcggtcacatgggcgtgctggcggacggcgagtgggctatttccacaaccaaccgcaattttgtcggccgcatgggtcccacatcctcaatgattatcctggcaagccctgccgtggcggcagcttccgctatcaagggctgtgtggcttcgccggaagacgtggaataaggagaggaaggtatatcactatggcgaaagtttataaatacggcgacaacgtggatacagatgtaatcatccctgcgcgttatctgaacgcgcctgagaaaagcgaactggctaaacactgcatggaggacattgatctggagtttgccaagacagtgcagcccggcgacttcattgtggccggcgcgaactttggctgcggttcttctcgggagcacgctcccattgccatccaggcctgcggcgttaaatgtgttattgcgaaaagttttgcccgcattttttaccgcaacgcaatcaacattggattccccattatggagtgccccgaggcggcagaggacatcgatgccggcgacacagttcaggtggatttcagcaccggtatcatcaccaatgagacgaaagggaagacctatcagagcgtgccgttcccggattttgtcaacggcatcatcgaggcgggcggtctgatgaactcgttgaagaaacgcggcctggcaaaataaaggctacaacagaaaataatacgaaaggaagccgttttatggattataaaattgcgctgatccgcggcgacggcatcggcccggaaattgtgaacgaagctgtgggggtcattgatgctgtgggcgagcggttcggccacacattttcttacacagacgtggacttgggcggctgcgccacagacaaatacggcgtctcttatccagaagggactgcggagaagtgccgcgcctgcgacgctgtgctgttgggtgccgtcggaggtcccaagtggggaccggaccggcctgctgcggagcggcccgaaaccgctctgctggcgatccgaaaggatctcggcctgtatgccaatctgcgtcatgccacactgcgtccggcactggtggacgcctcgccgctgaaaaaggaaacggcagagaaaggcatcgacattatgatggtgcgcgagttgatcggcggaatctattttggcaagcgcggccgctacgaaacagaagaccgcggtgtggaatgtaccgacctgatggcctacagtgaaatggagatcgagcgcatcggccgccgggcctttgaactggcgcaaaagcgcaaaaaaaaggtcacatccgtggacaaggccaacgtattggaaacttcccgactgtggcgcgccactatgcaccgcatcgcagcggattacccggatgtggaactggaggatgtgctggtagacaactgtgccatgcagctggtacgtgatccctctcagttcgacgtaatcgtgactgaaaatatgtttggagatattctctctgatgaagccagcatggtcaccggctctctggggctgctgccctcggcttccatcggcagcggaaagcccgcgctgtatgagccgattcatggcagcgcgcccgatattgcaggccaggacaaagcaaaccccattgccaccgttttgtcggttgcgatgatgttcaaatattcttttgatctgagcgaagaatcaaaggcgattgagcaggcggtggatgcggttctgtctgccgggtggcac

SEQ ID NO: 4323 - DNA, 17128 bp, Unknown
  16S sequences of unknown bacteria
gattttcagaatctgatcttccgctgtatgccagagaacgcatttaccgacatgggactttccaaacatgacacgatcaaactgtcccattccatgcgcatgcttgatttcagcccgaagctttccgaaatccactgtccggtgtccgtcatctgtggaaaaaaggatcgtgcaaacctcaaagccgcgaaacaactgcacgcactcctgccgcaatcccatctgcatatcatccccgacgccggacacgaagtcaataaggatgcgccaaaagcacttgccgcactgatcgagaactgcatctgagtgcatgccataacgtgtgttttttataatcctatgttttctttcacaaccagcagactctcgcacaccgcgatcgtcatcttttcgatctcctcggtcggctgcagcatatccggtaccatgaccggcatcatgccacccgcgtgtgcggcacgaataccgttgtaggagtcctcaatcacaatcgttttttccggcttcgcgccgagtgctgcacatgcggtcaggaagatttccgggtgtggcttgctgtgactgaccatatcgccgcagacgacctgatcgaaatagtcacgaatgcctgcgtcctttagttcttttaagacgctcgcctgcgctgtcgaagtcgccagagcaaccgggatgtgtgcattctttaaagctgcaagcagctcccggcctcctttttttaccgtcaggctctgctcataatacggaccaaaaaacagctcccgcatttcctgcttatatgccgcatatgggaaatcctccccataggtatccagaaaaatacgcaccgtcgcctcctggttcagtccgaggcactttcggcatgtatcctcaatgtgaggaattccatacttttttgccacctcctgccagcacgccacaacgaccttctccgtatcaaagatcacaccatccatatcaaataatactgccgaaaactccggaaactgtttttccataataatatatttctcatctttctgtaatttacacggtaaatgaaatcctccgcggcaaagctaatgatagccattctgatatccattgtcaatcgtttattcctttttcagttttttaaaactacttgcggttttctccttaattctgctaaaataacacttagatacctgactattttcaaaagtttttaaacaggagtttcttttatgattacactgaacgattacctctactccggagacactctgctccggattctgcaaaaatacattgaagatttacggaaagaagcacgcaagacccacaatgagatcgacctcgtacactgcaattttctcctccagatccgggagctgcttgagcacaatgatttcctgactgcccagtcacagcagattcgggaattctacaaatatatggcgcgggaatatccgtttcttgccttcacatttaaagggcgtatcaagtcccttatccgggcagaagaaaaatttaacggctatattgtcgaattcatttatgactattatacgcagcatggaacttatccgccgctctcggaactgaagaaccgcctgagctgtttccgggatttcattgcctaccggatcgtcatttccatgccgcgctgtcatctggaacgtgaagaagaccgggaagcacaggagctaaagtatctgtatgagattgcaaatatccttccctcctttttagaggagcgaggcttcacggtcgaacctgcaaatgggataaaagagagctcctctccactgctgaacgaagacgctaagccttattaccgggactacatctgcgagcagaatgtctacggctaccagtctcttcacattacgttctatgacaacagctcccgctcctacatggaagtacagcttcgcaccaaacgcatggacgacattgccgaaatcggaccggccaaccatcttggctatgaaaagcgtcaggaaaatgagcgtgccagaagagacgccattccggtcggagaaaatatctactttgatgaagcctatgagcgcggcatgcagctgctccagctcgacctctccaggctcgatgtaaacatgttctccgccatgaacaacagcctgatcaatgacggctgcggtctctaccgcggacggctgattctgccgtacgagcatttgtcgcggttccagaatgatttgatcgactgaatgccggacatccataacctgcgccctctgttctttctcttctgtttttagcgaaaaatactattctggatcttagcgatacctcggcccatacgcccggcatgcggccagatcggcggcttccagatccttcgttccgaaggatgcccatacatgcgggcggaagattgcttcctccgatacgttgtgcatcgtgaccggaatgcggagcatggaagccagggtgatcagatccgctccgatatgaccatgtacgaaggctccgtggtttgctccccagtttgccatcacactgtaaacatctcgaaacgctttctcaccggtcgtgcgcggaacgaaccaggtcgtcggccaggtgctccaccgcctccggattccagtagcaacgcacatccgaaaacaattattttctgctctgattcttgacagctccacctcattcttgctaaaataaatacatgtatgggtgctggttttggaatcagcacctttcttatgaaatgaaggagggctattatgctaaaggtatggattgccggatccgccgggcagatcggcactgcgatcaaccgggtactggatccgatggaaatggaagtctttaatacagataaaaatgaactcgacatcacacagaccgatgaggtgctgcgctttggcgagatcaaccgtccaaacatcatcattaactgcgctgcgattacggatactgccctgtgcgagcaggagccggagcttgcctttcgcgtcaatgcgctcggcgcacggaatctgagcattgtcgcaaataaggtcggtgcaaaatttgtacagctctcgactgacgatgttttcgatggtcagcgccagcagccgtacacggaatttgatctcactaatccgcgcaccgtttacggacgttccaagcttgccggcgaacactatgtaaaagaatttacccagaagcatttcatcatccgaagcaactgggtatacggccagggcaacaactttgtaaaccgcgtactcgaagctgcagaccagaaccgaccgattaccgttgcggctgagcagaccggctctccaaccagcgcgcaggatctggcacggatcattctttatctcatccggacaaacgaatatggcacctaccatgcgacctgcaagggcatgtgcagccgcctcgattttgcgaaagagatcctgcgtctctcaggtaaaacggcagaactgaccactgttccgtcctcttctctggatgtctcagaaacacgaccggactattctgtcctcgacaacttcatcctccggatcattgacgtctatgatatgccgtcctggcaagattctctgaaggaatatcttaccggtgatgcctcgcatcttgcatagtgtatgatctctaacggatgtttgtcatccattttgccactcgttcataagtcaagcggatattcgcaatctatccctgcagctctgctgacagggcctagcttcgctacttgcttgattcgggtcaaccggatattcgcaatccgcttcgctacttgcaggatcataaggaatcttcccgcaagcgggccctccttatgatatgtcataaccgaatagctgcttcgcaacttatcaggagtggcttgcaccactcctgatacaagcaagtccctaccaactgcttattgctttgcgcaattgaagcaggggacttgcttgattcggttaaattacaggagattgaatatgaccaaaacaaccacgaaaaagaaacagaagctcggactgacgacgatcatctttcttgcattgatcctcggtgttctcttcggagccgcactctgctacctggttccggatagctcctttaaaaatgatatcctcatcgacggcattctctatgtcatcggacagggcttcatccgtctgatgaaaatgcttgtcgtaccgcttgtactctgctcccttgtgtgcggaagtatggcaatcggggacacgaaaaagctcggcaccgtcggtgttcggacgctgcttttttaccttgtcacgactgccctcgccgttactgtggcaatcaccatcggcaacatcatcaatccgggcatcgggcttgacatgagcaagatccagacgagcggctcgaccgttgagaccatgcaggcaacctctttttcagagaccctgctcaacatccttccggacaacccatttaaggccctcgccaatggcgaaatgctgcaggtcatcgtctttgcgctgatcatcggtgtcattctggccaagctcggcgagcgcgcggaaaccgtcgcaaattttttcagccagttcaatgatatcatgatggaaatgacgatgatggtcatgagccttgccccgatcggtgtcttctgtctgatctcccgcacctttgcaaccatcggattttccgcattccttccgcttgcaaagtacatgatcgcagtcctgatcgcactcgccgtgcagtgctttggtgtatatcagatcctgctgaaaattttcaccggcttaaatccgctcaaatttatcaaaaagttcttcccggttatggcctttgccttctcgactgcgacatccaatgcgacgattccgctgtcgatcgatacattaaataaaaaggtcggtgtttccaagaaaatatcgtccttcacgatcccacttggtgcaaccatcaatatggacgggacctccatcatgcagggcgtggcagtcgtatttgccgcacaggcattcaatattccactgaccctgaccgactacctgatcgtcatcggcaccgcgactctcgcctctatcggaacagcaggcgtcccgagcgtcggacttgtcaccttgacaatggtattcaactctgtcggtcttccggtcgaggcgatcgggctgatcatgggtatcgaccgtatccttgatatgaccagaaccgccgtaaacatcaccggcgatgccgtctgcacgacgatcgtcgcacaccaaaacaaggcgcttgataaggatgtcttttaccgagaatcttaagtccaacccaccgcttattgctttgcgcattggagcaggtgacttgcttgatttggttaaaaagctgccatcttatgggtttcccgtaagatgacagcttttttgatcttcttatatcgtatcactctgtatttcacttaagaatgccggaggctctatcagatattgattgatgctccgctactgcacaagcttcaccaaaataatgaccgcaccgagcaccgtcagtacgataccgagcgcccggttcagagtctttgccgatgccttgtttgcgaagaccgctgcgacccgtgcaaagaacagggtgctgagcatgcacatcagaaggattttcacatccggcatgccgcctaagtaaaagtggctcgcagctccggtcagtgccgtaaacgtcatgataaacacactcgttccgaccgccgtcttcagctcataaccgagtacagaggtaagaatgagcagcatcatcatgccgccgcctgccccgacaaacccacagatcagtccgatcacggttccgcacagaattgactggatcacgcgggtctttttgtctactgccatcatcgtttccttcgtcgtcatgaccggctttacgataaatttgatgcctagcagcatcgtcatcacggtagagaaaccacccattgcatttccggatacgaaactggacagatagctcgcaataaatgtaaatacaagtaccgtccccatcatgactaatccattacggatatccagatttttatgttttccatattcatacgcagagatggcactggccagcacatcactcgcaagtgcgatgccgatcgcctgatatggctccatcccaagaaatgtgatcagcatcggactgatcaccgctgctgcgctcatcccggcaaagccggttccaagtcctgctcccagccctgccagaatgcaaactataaattccgttatcatcgttccttctcccttccctgtgcaatccggatcacattttcccggatctgatccgatatcttccaatacagttgcagctcttcctccgtgatgccgctcatcatctgctcaccaaagacacgctgtgcctgccgtcccattgcgatggcctcattggcccgctctgtcagaatcaggcgctgcagtctccgatcctgggcatccgcctcccgcttcaggtacccgcgccggaccagtgtctcgatcgccacggatgcgtttccgcttcggatgccacggatctcccacaaatccttcgcagtattatactccggattatttgccagaaataaaatcacatccagacaggtctgattcagctgataccttttgcaaaccggctggcagaccgcttcgtaggctttcatcattttgctgcttaaagatacaaaatccagtggacgcataatgcccctcctttccttcccgccactttgcggcaggactttgtttccacctgatacttttgtatgatattttcatactttgttcttatatatattttaactttagatattctaatattagattatttaaatgtcaagtttttatttacaaaaaaaggtgaaatcaatgtaaaatccatccaaaaactcacttctcacaactttcaaaccgtgctatacttttttctaagatgccagggtcaaaagccaccagcaatcctacaggagataactatgaaacaaattgattttgaaaatggaaccattacccaaaatatttttatggcagcgatcccgatgctggtcgcacaggtactgagcctgctttataatatcgtggaccgcatctacatcgcccgtattcccggtgtcggaacaacagcccttggtgctgtcggtctctgcttcccggtcattatgattatcaccgccttcagcaacctgtttggaagtggcggcgcaccgctcttctcgatcgaacgcggacgcggtaaccttgaaaatgccggtcggattttaaatacgtccttttctatgctcgcgctggcctctattgtcctgacgctggccggactcatctttgcccgtccgatcctgactctgttcggtgcatccgcagacgcactcacctatgcctatccgtacctgatgatctatctacttggcacctttccgtccatgatttccacgggcatgaatccgttcatcaatgcgcagggctacgccacgaccggaatgctctctgtagcgctcggcgccgtcgccaatctgattctcgacccggtctttatttttgtgatgggacttggcatccgcggagccgccatcgccacaatcctgtcgcagtttctatcagcatccttcgtgctcttttttttgcatttccgggcagaatttaagatccggctgctgcgtcgtaccgagcttgcagcctgcatccgctacgccaaaaatatcgtgagcctgggcaccgccagcttcattatgcagctgacaaacagtcttgtctccatctgttgtaacaatgtgctcgccgacaccggcggagacctgtacgtatctgtcatgacgattatctccagcgtccgccagatggtcgatactccgatttttgccatcacagaaggctcttccccgatcatcagctacaactacggtgcccgtcgcccggaccgcgtgcgaaaggcaggcatcaccatgggaattctggcactcacctacactgccatcatgtggtgcataatttccttgttcccgcttccgctgatcagcatctttagctcagatgcctccctgaccgccgacgcgatcccggctctgaagctctattttgcagccttcattttccaggcgctacagtacatcggacagaccttctttaaatccttaaataaaaagaagcaggcgattttcttctccctgcttcgtaaggtcatcattgtcgtaccgctgacctatcttttcccatatgccttcggtatgggtgcaaacggcgtattcatggcagaacccgtttccaatgtcatcggcggaaccctgtgttttgttatcatgctgctcacaatactgccggagctcaaacagatggagcggtgattaccgctcctccatctccacccgctcaaaccggtacttctgccgaacctccgggtatttttcatggtctacctcactcatgaacatctcatacggccgcgcacaggtcttaaacggcgcatacagtgcctgataaatgacaagcttttcttcggattccgtatgagttgcaaatgcaatgacccggtacagatactcggatgtctcctccgacacccactcccgcttaaaatgccgcacgacatccccgacgcggatatcatgtgtcatttttccaccggataccgtcgaatccgcttcgttatccacttccacgttcttttttccactgacttttccttctgcaccggacttctccaactcctcatcctccagtacaacatactccgttttatccagtgataccggtatcccggagcgtcccgcaatatgcacgcctccataccacataccggtcgtgtcaaatatgtcaccgacttcatattccaaagagtagtcgtcgtttttctttatgattttgattttcattcgtacgtcctcctcgttatctcataattcgcattccaaatacaaatttcacacttactgcagtcttctcttacagatcaaagcttccttaatgcagtatgccttgtcctcttgctcctacgtgaacgcagataagcattcccccgcttcaagtgcgcggagcactaagcggcgggtgagggggctgcgaatgtccgctttactagttctatcatatcatgtctgcagttccatgccaacccgcaaaacccttcccgtatcttacccatgcatctataaaggtactccttatacctccttttatacccacgttcaaacaccttgccgcttgcacctgcctccgcttttcgctataatagttccatgttttcatccatcccattttcgatctcagaaaggatattcatcatgaaagaaacagttttatatttttctccgaaaaaaacaccgcaaaccgcagcgctcaaaggtcttctcatccgtatgggaatccggatccgaaatattgcacctgaacaggtacaggaacaggtaggagcacttgcaggagctgccggattcgagaagtcaggtgctgcgtccactgcagaccctgaagctctggaaaagcttcaggaggagatgcttgtcctgtgtaatttttcagaggcacggctggatgcactcctgcagggcatgcgccgttccggtatccggatcgccctgaaagccatgctgactgagagtaatgccggctggacattcctgcagctgtatgaggagctgctaaaggagcatgccataatgacaaacgcagcaccgttttcttctaaagagcaatgaaaaagctgctcaccgtcgataaatccaattcaagaatgctgaaaaaaggctgctctaccggtttatacaaacggatatagcagcctttctttcatcaaaatcctatttatttcactacgatatttacaatcttattcggaacataaatttcctttacaacgttctttccctcggtcagcgctgcaatcttgctgtctgcatttgcaatcgcaagcgcctcttcctttgtacagccattcgggatgacgatcgtggtcttgagcttaccgttgatctggacgccgatctcaatcttggactcgacggtcttattctcatcgtacttcggccactcggacagagacaggaagccttctccgccgatgctctcccacatttcctcacaaagatgcggagcgaacgggcaaagcagcttgataaagatcacgagatcatcacggctgattgttccgactgtatagatgtcgttgatcagagtcatcaggcatgcaatcgcggtattgaacttcatcgcctcaatgtcagccgtcaccttcttgatcgccttgtggaattttacttccatatccggatctaccgaagcatctgtcataatgtcggtcagacctgccacacgctcaaggaaacgcttgcagccctttacagaactgtcgttccacggagctgctgcgccgtaatcgcccatgaacagcacgtaggtacggagggtatctgcaccgtattcctttacaatgtcaagcggatctacgacattgcccttggatttactcatcttatcgccgtccgcaccgaggatcataccctgcgcagaacgctttgcatatggctccggtgtattgactacgccgatgtcgtacaggaaatgatgccagaatctggagtaaatcatatgacgggtcacgtgctccataccaccgttataccagtcaaccggcatccagtagttcagcttatccatcgctgccagctcattatcattatgcgggtcgatgtagcgcaggaagtaccacgaagatcctgcccactgcggcatcgtatcagtctcgcgctttgctgcgccgccgcacttcggacacttgcagtttacgaaggaatcgattttggccagcggagactgtccatcctcacccggctggaaatcttccacatccggcagacgaagcggaagttcctcaaacgggactgccacatcgccacaggtcgggcagtgtacaatcgggatcggctctccccagtatctctgacggttaaacgcccagtccttcatcttgtactgtacgcctgcctcgccgatacctcgcttctccagctcctcaagcatgcgcttgatggaatccttcttattcgtatagccattcaggaactcggagttgatcatctcaccgtcgccggtgtatgcttcctgctcgatatcaccgcccttaatgacctgaatgatgtcgatgccgaatttctttgcgaaatcatagtctctctggtcatgtgccggaactgccatgatcgcgcctgtaccgtagcccatcatgacatagtctgcaataaagatcgggatcttcttgccattgaccggattgactgccgtcagcccgtcaatgcagacaccggtcttctccttgacaagctgtgtacgctcaaactcggtcttctttgcgcagacatcgcggtatgcctgaatctcaccaaagttcttaatctgatccttatactgatcaatcagcggatgctccggcgcgataaccataaaggtaacgccataaagggtatccggtctggtcgtgtaaatgcgaagctgctcatccagtccgtctacctggaagtttacaaatgcaccggtcgactttccgatccagttgacctgctgctgcttgatatttgccggataatctacagaatccagcccctcgagcagtttgtctgcatactgtgtaatacgcagataccatacatccttcgaccgctgtacgacatcactgtggcagatgtcacattttccgccctggctgtcctcgttggaaaggacgaccttacaggacgggcagtagtttacgagcgtcttatcccggaataccagacccttctcaaacattttcaggaaaatccactgcgtccacttataaaagtccggatcagtcgtgtcgatcacgcggctccagtcaaaggaaaatccgacgctctttaactgctcggaaaaacgatggatattcttatccgtgatgatacgcggatgtgtggatgtcttaatcgcatagttctcggtcggaagtccgaatgcatcaaagccgatcggaaacagtacattgtatccttccatacgacgcttccgcgcaatgacctcgatactggaatatgctttaatatgtccgacatgcatgccggctccgctcggatacgggaactctaccagaccgtaaaacttcggcttctcacttccgtccactgccttaaagatttcctgctccgcccatttcttctgccatttgggctcaatctttttaaattcgtgtctcatatgctcctccattgcttcctatttatacacaggattgcataaatcagtactcattctaatccaatgtaccctttttgtcaatgctccctcgcagctttgacggcggatatccgtacttctttttaaatgccttgctcagatgaaattcatcataaaatccgaagtttactgctgcttcgtggagcttcgcatccggctgatgtgccagaaactcccgtaccatttccagcttcagatccatctgataggcagagaaggtctggttacaggaatcccggaaccggttgttcagtgtgcgggggcaaatgtaaaactccgccgccatctccggtgctgaaaaaaaaacctgcgggttcgagtaaatcttctgccgcacctgctccagcatagaattactccccggcccgcctaccatctctgcctgcagcgaagagagttcacacagaatcagattaaacagaagcgtcagccgatcctcccgctgtgcatcaccaccccagtaggcagagatcagttcatggaaatactggcggatcttcggctccttccgacagtggataagcgtgtgactgcgcaaaaagcgcggatcttcgctgccttctgcggcttccattttatccatgcatattttctgcgtattttcttttccatgttccatgcagctttctttccgttcagataatccctgctgtttatttccacatcgctccgcttctgtaggcaacacatggaaatacatatgccggttacccggattgcagagccgcacaccggtgtgatgtcgtccggcacagaggatcagcaggtcatccgtctgcagttcatacggaatcccctcctcgatcacctcccaggtgccgtccagaatgtacagaaaatcatgctcggacatcatgcgggtagggtgcagcataccgttaactgaggtgatatagttggcactggtgatggtgcgcggagacattttttcgagaaatagcatggtggagctcctttcaggttatgtagtgaggatgttttggacgttccgtccatcccaaaatgccaatccaactcaagccaaataaatttgtcctgagttgccttagcattttgctgctgtccaaaactgcttttccatattttacatgttttcttccagtttgacaatggtcttggaatgtgttttttgataaaatacagacacatgggttcaaaattatcagagctatcgcagatatgatttgtgaaagtatcatagctctgccggataaaaggaggaattatacatggataagcaaaaattttcatccccgctctctcttcgcgatgtgcagataaaggatgcattctggaaaaaggaaatggagctggtacgcacagaggtgatcccgtatcagtgggcagcgctgaacgatcaggtcgaaggtgctgcgccaagctattgcatgcacaattttaaggccgccggaaagcagaatgaggagcgccgcgagcagggaaaggaattcagggagcctgtctatacgttccgtggctttgaggcactgccggaagatccggcacatccggaggatgacaagttttacggatttgtatttcaggacagtgatttctacaaatggattgaggcagtcggctactctctgacccagcatccggatccggagctggagaaaatcgctgacgatgcgattcagatcgtctgcgcggcacagcaggacgacggctacctggacacctactatattctgaacggtaaagacaagattttttccaatctgaaagacaatcatgagctgtactgcctcggacacctgcttgaaggcgcggtagcctattatcaggcgaccggaaaggatcagcttctcaatactgcctgccgctatgccgattatgtagcggattacttcggaccggaggaaggcaaatgcaagggctatccgggacatgagatcgctgagatggcgcttgtgcgtctctatgagacgacaaagaatgacaaatacctgaagctcgcgaagtatttcatcgatgagcgcggcacccgcccatactactttgaccaggagcacccggaagaagtaaagaaaaatccggacggcctgcgctatgaatacaaccaggcacaccttccggtacgggagcaggatgaagcagtcggacacgcagtacgtgccgtatacctctattccggcatggcagatatcgcacgtctctctgatgacgacaagctctttgaagcatgcaacacgctctggaacaatatagttgacaaaaagctttacatcaccggcggtatcggcggcacgcacatcggcgaggcattttccttcaactacgatcttccgaatgacactgcctatgcagagacctgcgcctccatcggacttgtattttttgcacgtcgcatgctggagatgtacccggattcccgctacgcagatgtcatggagcaggcactgtacaacaccgtactttcaggcatggctctcgacggcaagagcttcttctatgtaaatccgctcgaggtactcccggaggcctgccataaggatgaacggaaattccacgtaaaggatattcgtcagaaatggtttggctgcgcatgctgcccgccgaaccttgcacgtaccttaagttccgtaagctcctacgcatttacggaaaatgacgacaccctgtttgtacatctgtatatcggaagtgacgttaagaaaaaggtaaatggtcaggaagtcgctgttcacatcgattctgccttcccgtgggacggaaaagtcactgtctctgtcgatggtgcaaacgttcctcttacactggcactgcgtattccgggctgggcaaacagctacaccgtgagtgcggacagctctgaatataccattaaagacggttacctctatatcacccgcacctggaagaaggacgagacactgaccctcgacttcccgatggagattcaggtatggaacgctgatccgcgcgtgcgcgaggacatcggcaaggccgccgttacccgtggaccgatcacctactgtctggaagaaaaggacaacggcacagatcttcacctgctgactctcgactggaacgcaccagcctttgtcaaagattccgttgtagcaggcgaacctgtaaaggagatcgtgatgcatggataccgcgaggagcttccggcgccaaaagcaggcaccctctaccgtccgatccagaagacagagaaaaagccggtagaactcaaatttatcccatactacacatgggcaaaccgtggtgagaatgagatgagcgtatgggtacgggtgtgatcccacatctatagcagaaccgtgaagcataaaagctgcaaaattataaagcttaattacacataaaaaggaaacccggaatttgaattgcgttcaaattccgggtttcgccccatttatctatggcctccactgtaccggaccgtccggatacagatcacacgcgcggaacagattgcctacctcacagcggtactcgttcaggctggaggtcttacgaagctttttggcatatggttcgctcccttcgaaagagtgcaccagatagctccagagctccttcatatgaaaaatcgcattcttatcctcatcaaaaatctcccggtactgccggaaaattgtatcgtggaaggcacgcagctcctgcttgcctgttctgtaaatttcagatccggactgttccataccattctcttttctgtctgaatcttctcccgttttctgagcatgctcaagtgacttcagtctttgcatcagtcccggatctgcgagcacgccgcggccgatcatcacgcgctccacctgtgggaaacgcgcccggaactgctcataatcacgcacggtaaacagattgccattgtagcagacgggatgtttgctcatcgcaagcagctcgctaaatacatccaggtgtggctctcccttatagtattcttttcgcgtgcgcggatggatgattacctcggaaaccgggtactgattataaatcttcatcagcatatacccttcttccggacgctcgatcccgatccgcgttttgacagaaatgcgcagatccgtatcccgaaaaatctgatccagaaaacaatccagcttctctacatccgcaagcatgcctgcgccgcgtccacctgccaccactgtgccggacggacagcccagattcaggtttacttcctcatacccatactccgccagcgcctttgccgtctccacgaagcgcaccggatcgctcgtcagaatctgcggaacgagctcctttacctgattattctcgggaagaatgtcccgcagctccttttttcgcagtgcatgcttctgatccggcacaatgaacggcgtaaagtatcgatccgtcccagggaaatacgcatctagcgcatttcggaaaatatagccggtcaccccctccagcggggcaaggtaaaatttcattcttcgtcaatctcctgttctttttactttgaacgcagataagcattcccccgcttcaagtgcgcggagcactaagcgatgggtgtgaggagatgcttatgtcagcgggagttgatggctgccaccgacagatcgcgaagcgactgcgttcatgaacaagtagcgaagccaggccctgtcagcagagctgcagggatgggttgcgaatgtccgctttaaaagcgggacagcacatattgtaccaccccgccactatttctttcaaaccagattttccttgtcaccctgcggtcaatcatccctgctcgctacacgtaacagatattttatctcagcgcctctactgctgcgcgctcgatcggcagtcccgctttgtagcgctcgataaatgcgtcaaagcctgccacatctgccgggttcggctgcatctcgctgcctgcgcttcctccgaataccttgtctgccaggaactgatccagcgtctcaccgtctgccttatttaccatgtaggaagccagcagtgcgataccccatgcgccaccttctcctgccgtctccatgacagataccggagaattcagtgctgcagcaaga

SEQ ID NO: 4324 - DNA, 26757 bp, Unknown
  16S sequences of unknown bacteria
tcgtcggcagcgtcagatgtgtataagagacagtactaaggcaggaatttccatgccataaaaaagaaagagggatgctcgatggaacagaaaaccctttccctggtgctcaaacttgtgattgtaggtctggcggcagcaggaatgatcgtatactttgccgcgctgcccctgctgggcaaaagcctcatcgcctcctatccggaatacagccgctgctatctgccgtggctttcgtttctttggatcacagccattccctgctttgcttcgctcttcccaggatggagtctggcggcggaagtgggccgggacaattccttttccatgaaaaatgcccgctctctgcgtgccatcgcctttctggccgcagcggacgccgtgtttttctttgctggaaatatcgtctttttgctgttggatctaagccacccaagtatcttcctgttctcctgctttatcgtgtttatcggcatagccatcgccgtagcatctgcgtgcctgtcccatctggtgcgcaaagccgccgtgctgcgtgaagaaaatgaactgaccatttaaggaggcgcgggtatgatcgtaatcaacatcgacgtgatgctggcccggcgcaaaatgagcgtaacggagctgtccgagcgggtaggcattaccatggccaatatttccatcttgaaaaacgggaaggccaaagccatccgtatggaaacgctggacaaaatctgccgcgcgctggaatgtcagcccggcgatcttctggaatggagggacgaagatgacgcagaaaccggcctttcctaagccgcgcttttatctgatactggcccttctggctgccgccgggttcggtttcaccgctgtctgcggtgtttggaatattgcccgtcccctgtggggaaacattgctttgagtgccgttcccacagccgtttttctccttctctggcagctctcccgccgggggcgctggcgcggcgttcccgccctggccgcaacgatcgcgctgtttgtcctgtttctggccggcggctgcttcaatctgctcctgatcggcctggacgccatggggcaaccccgggatcctaccctgaaaaacagtgcccatgcggtgcgtattgtggaaaaagcgctggaactgaatctggacggcgcacaggtcctcctggccgaggacacccacagcggtttccacggggatggcgaaacccggatcattctggccctggacgacgcgacctctgctgtggaatccatcgtttcccagtggccggctttccctgcgggcgaaccacttgacaccatctttcttgagcgctccgggctgggcgaggatctctttttcccccaagtggaacaagggtattattcgtttcgtgaccgctacgccgaacaataccccgacgatacgcatcccctgctgcagcgtttttcctacaattatactgccgcactctatgacacagaaaacagcacactctattattacgaactggacacctgaaaaaaggcagctccgcatacagcggaactgcctttttgcttttaccacgcaggacggcgcacctgcatggcacggtattgacgggtcacctgatcacacagagtcatataaaagcgcaaatattgttttttggcctgtcgctcttcgcgctgttcctgctggaagcgcttccaacgggcacaggtcttgtggcagcccggacagtacgccgggcaggacgattgacacggcagcatcctgtattcctcctgaccttgtttgtttcaagcaataccagtatacctgttctgcagcttccctgctatcatattggggttatatttttgtaaaatcaaacaacttctgtgtgccttacgctccgcactcatccgccggggcaatattccttcaacggttggcatataaaaaaccgccgcaccgatgcaccatccttctggtccatggaacatgctgctctcaaaagggcggtgcgcacatgcgctcccgccccctcctctgtatacttatgacccccgcttcctcggatgccgttcattgtaataagcccgaaaggcagccagttcttcctcatccttgcggtccaggccaaactcctgcgccagcccttcgatatggtgcgtaaattcatgggccagcgtggtgtacagttcgtcgtcccacgcttccaccgtccagtcttccttttccgccagcgcggcaaaagagccgtaatagagctggatatagcgccccatttgatcgtcgcagtattcccccataatgtaaatctcacccggaggaaattccggatcttccactgcctccggcagcagggaaataccgccgttcagctcgcggtaaaagaccggcgggaactcttctgccatggcgtcaaggcgttcgcctacttcgtcaaacgttaaaaccatgctttacccctttcatttcttaccgtaccgcagaggataccgcccagcagaaacatcatccaggtgtttcccgcccctccttttgcgcagcctcaggctgctttccgcagaaatatgcctcattgaggggctttcattgtcaggctgatgcgttttttcttctcgtccacttccagcacccataccgtaaccacgtcgcccacagacaacacttcagaggggtgtttgataaatttgctgcagatccgggagatgtgcaccagaccatcctgatgtacgccaatgtccacaaaggcgccaaagtcgatcacattgcgcaccgtaccggtcagctccatgccgggcttgagatcagcaatagagagtacatcggtgcgcaaaatgggcttgggcagctcgtcgcggggatcgcggccgggcttttgcagctcggcggctacgtccagcagcgtgggtacgcccacaccgcacaaaagcgccgcctgctctgcgcccaccccgtcaatccgcgctttcagatccggcaaacagcccaagcagcttttccgccgcgccgtaactctccgggtgaacggcagtattatccagcacattgctgctttcactgacgcgcagaaaacctgcacactgttcataggctttgggaccgagtttgggtacgttcaaaatctgccgccgggctgtaaacgcaccgttctcttcacggtacgccacaatattcttcgccgtggcagcattcagccccgccacgcggcgcagcaggggcgcgctggccgtgttcagatccacgcccacagcgttgacgcagtcctccaccacgccgtccagcgcctcgtccaattgcttttgcgggcagtcgtgctggtactggcccacgccgatggccttggggtcgatcttgaccagttccgccagaggatcctggagccgccgggcaatggacaccgccgaacgcaggttcacatcatagtccgggaattcctctgctgccagttcgctggcggaatacaccgaggcccccgcttcggacacaatcatatagctcacgtctccgcctacggcacgaatcagctccacagccatctgctccgtttcccggctggcagtgccgttgccgatggcgatgtgcttcacaccatgcattcggatcagccgggacagcgtttcaatggcctgctgcttctgccgcgcaccataggtaggatacaccacagcagtatccagcacctttccggtgccgtccaccacagccaccttgcagccgttgcggtaaccgggatccagtcccatagtcacccggcccttcaccggcggctgcatcagaaggggccgcaggttcagcgcaaaattacggatggccccttctcccgcctgctcggtgagcagtgcgcgcacttcccgctccagcgacggatagagcagacggtcataagcgtcctccgccgcagtgcggatgaactccatggccgccgagccggggcgtaccaccgcccggcacagcgccggcagggccagagtatcttcggtgagcaccgtcacactcagcttcccttcccgctcaccccggttgatcgccagtatctgatggccctgcagccgcgacacaggctgttcaaaagcatagtagagccggtaaacggaatcctcttccactgccgcccgggataccaaacgcccctttttcacaatcagttcccgcagcgtcttgcggatggccgcatcgtcggaaatctgctcggcaataatatcattggcgccctgcagagcgtccgccacagtctccacgcccttttccgggttaagatacgcctgcgccgcctgcaccgggtcggggcaggtgcgctcctgtgcaaacagcagcgccgccagcggttccaatcccttttcccgggccacagtagcccgggtgcgccgcttttgcttgtaggggcggtagagatcctccacctccgtcagagtcgccgcggcgtcgatggcagaaaccagcgcctccgttaattttccctggttctcaatggcactcttcacttcctggcgccgcttgtccagattgcgcaaataggtgaggcgctcttccagcgtacgcagggtcgtatcatccattcctccatgctgctctttgcggtagcgggcaataaacgggatggtgttgccctcgtcgagcagccgaaccacgttttctacaaaacggacagtttgccccagttcctgtgccaacagttcaatcaaatccatgggatactcctttgtttcttacttctatccattatagcaaaaaaaggccgcccggcgcaagtagagccgccgggcagcctctgccgctcacatatggaaacgccgtctggcttcttcgcgcagggaaggcacatgccgcacaatcagcagcggcacagctagggctgcacataccgccagcacaatgagggaccagcccggccgccagacgccatggaaaaagcagtcggcaaaatactccgtcgtcagggccagcagagccactgcgctggtaataaatgtggcggtagtcagcatcctgtggcggtgatcccgcagcaggaagcagagcaccagcaaaatcaccaccgccgaaagcagcaccggaagcaccagatgccggtaccagaccataccgtccagatctacagcgatgaaaaaaatatacaaacccacagcgcccacatcaatgggcagcgccacccacgccggcatctttttagccagaagaggcagcaccagccagatccacagcatcaccgccgcaccgacaatgtaaagcgaccaggtgtgcgcggtgcgcaggaagaagttgagcacgccgcagcataccgccacagaacagagcatggcgctgagcagcagcgccgcctcccgccgggatgccggcgggaccacctctttctccggcgcaaagaacggcgcgctttcatcccggcgcaattcgttgggattgtagaccggcgtaccgcacagcgggcagtgcttgacgcccgcatgcagctccacaccacagttgacacagtaagacacgtcctccgtccctccttcagacccggttgctttcaattttcaccgacagtccctgctgcaccagaaagcgaaaaaaatcccgctcggtgtccgtctccttctgggtgccggcaaaggtgatctccatgatgttgccatagctgatggtggcgcagttcggtttgggctgggtagcctgccccagaatgacctccatatggtgaatatgccgctccatctcccgaggcacacaaaagggacctggattggtatacgtcatggtatagggccgtaccccggctgcccaatagctgaaaatcatcgccggatttttcagcacaataggcacttttttgagcagcgggtgtgtttgaaaccggacattgccggtgaattccgcccgtagttcctgccgatggatgtgcagctgcatatagtggcgcacctgctgcaggatttcttcaaaggtatattccccccagcgcggatcaatgctgggccgcacggtggaaataaaattacgcagtgtgcgggacggaaaataagcgcgcagattgatgggtaccgccagagccaccgggagggttctccgcgggttttcccggcgctgtttttcgatcagcacccacagtaaaaccgcggagaggtactccgtaatggatacgccatagcttttcgccttggctttaagcgcatccaccggcacaaagcccatggtcacatgaaaggtgtagtacggctccggcgtgcccacattgggataggctttggccgaagagcggatataagccttgcgcgggccaacataccgggcataagcgtcctccatttcctcgcggggcgggggttctgacagatcgcagattcccggtcccaccgggatggtatgccccagctggcgcaggtattcagccagcagtgtacgaaaaaacacgatggctcctccgccgtcggacaaagcgtgaaaaacctcaatggaaatgcgccggtcgtagacgaaaaagcgcaccagccagccgtgctcttccttaaaatccatgggacggcacgggtctgccacatcgggccggacaaagggccccggcgcgtcattcggctcaagataataccagaagagccccattttgatgcaggagaaaaaaccgggaaagcgcgggcgcaagcgatctattgcccgctgcagcgctgcggcgtccaccttttccgtcatcacggccgaaaaacggtaaatcgcggaatactccctgcgctgcaatgcagcatacagcacgccggcattgtccagcgtataccattgtttcacctttttcgccacgggcacgctccctttcggatcagctttttgttttattttaccacatcccaatccaggctgcaatgaaaaccacgtcgacccttttcaaaacggcggcgctatgctatactgattttccaaacagtgtaaacagcggcagacaaggaggtttccatggacaatgaaaaacgcgccggcggcctgcgcggcgcctggaagcgccaaagcgctgcacagcagcaggcagcggaaaagcgccgtctcggcccggcgctgcaggccctgaaagcgctgcacagcgtcggcaccccgggttctatgaatgccgaggaattggaacgccagcgcagaatgcaagatatcattggccatcttgccgcgccgatggcgggtctttcctgggagcccttctctctgaacggcatgaacgccgcctggatgcgccgcaaagcgccccacaagcgccggcgcgccattctatactgccacggcggcggctacaccagcggcaatctgggctattcccgggtgctcgcctccaagctgacgcatgtgacgggctgcgacgtactcacttttgaataccgcctggctccggagcatccctatcccgccgcagtggaagacgccctgcgcgcctgggatcatctgatgtatttgggctacggcgcccgggacgtcaccgtggtgggcgacagcgccggcgggaatctggcgctggtgctctgccgacgcctgcgcgctctggaacgtatgctgccggcggcgctggtactcatgtctccctggacagatatgactgcctccggcccttcctacactgagcggcaggacattgatcccatgctgaccatggaatatatcaaagccgtccgcagtgcctatgccggcggggctgatctctcctcgcccgatctttctcccctgctgggcgactgctccggttttccgcccactctgatccaggtgggtacttacgagatcttatactccgacgccgagagcctgcgggacaagttgctggacgcccacgtcccctgtaccttccaggtgtacgaggaaatgtggcatgtgtttcagatgttccctctgaaaaaggccgccgcagccatgaacaacgtgagctatttcctgctggaacagcaatgacgctcctgcacagcaggcaagcgcgatcctacggtgcaaaggcgcagaaccgcacttctttttcaggaatcataccgcgggagggtctgaagccgttccagatccagaattaccacgtctcccgctcgcagcgccgcctccttacttatgaacgacgccccgcggctgatcgccgcggggcgtcgttctgtttcagcccgtccaaccctggacggcgtgctcccgcaggggcagcgtgcggtaaatttcctgtaccgccgcgcaatattctgcacgatccgtagtgcggcgcagtcgcttagccagcttctcgcccccttcaaagagatgaatatgataataccacacctctttcatccgcatgattgcgttgcggtcgttgccgaacatcgtacggtagccctcgtagagcgcctcatcaaacgcctgcaagcgttcccgggttcgcttttccggccgcagaagggccgggtctgcaatcagcccgcggcccagcatcagcgacgtgactgagggaaagcgcgcctctacagcggcgcagtctgacagactcattaaatctccgttgtatcccacagggttcctgctgtgccgcagcgccgcttcaaatgcctccatccgaacagcacagcggtagaaatcctgacgcacccggggatgaatgatcagctctgcaatcggatagcggttgtacagctccagcagcgccgaaaactcctccggcgccgcataacccagacgggtcttaatagagatcggcccctccagggcggaaaaaatacggtccagaaacgcctccagctctgcgggacgggtcaaaaagcccgcgcctttgcccttggccgtcacggtgccggaagggcatcccaggttgaaattgatctcacggtaacccaacgcgcgcagctcccgggccgcccagataaaaccctcggcgtcctttcccagcaattggggcaccaggtcgccgctttcattgtgctccgggcaaaaatcctgccattcccggggcgaaaaagagcgactctgccccacggagataaatggcatgtaatagcgttccacaccgccgaaccatcgacggtgcagattgcggtaaacataaccggtcacgccttccaggggcgcaaaggtatagcgcatcaaagaccaccatccaaacaagcatttgccccattgtagcaaatccgcccatcgggcgcaatctttttcatatgccgcatgccaggacaatacaatggagaagagccattttccatgaaaaaggagcgatcgcatgcagttttatcaatccgagggctgcgccaatgccctgacccttctcgccgataccgaactggttttagcctgcagcggcggcagcctttccgtcctgcccgccgacgcccgcggcacgccggagctccacatccccgtgctcactgtccgttccggaacagcccatgtgcgcgtgggccttgctccccaccccatggtaccggaacactggctcgaatggatcgtgctggaaacacagcagggcttttctgtgcgccgcctgcgcccgggagacgctccggaagccttgtttgccctgccagacacggaaacggctgtgggcgcatatgcatactgtaatctgcacggtctgtggcagtccatgctgtaagaagacggggcgggcatcccagaaaggatgcacgccccgtcttgtccaactagagcagctcaaacgcacacaagattacaccgtaaagcgcgctggccgccacgccgtacacaatcaccggcccagccacaataaacatttttgcccccatgccggtaatcaggccctcacttttaaaatcgatagctggagaagccacggcgttagcaaagccggtgatgggcaccagcgtgcccgcgccgccgaaacgggccagtttgttgtaaaggttcagtcctgtcagcagcacgcttaagaaaatcattgtcaccgaggtcagcgtaccggcttccaattttccggctccggccgccatccagccgttttgcaccagctgccccagcgtacagatggctccgccgatcaaaaaagcaagcgccatattttttcccagcggcgaaggctgggccaaacgctgcacatactcctggtattccgtattggacagtttcattctatttgccctccctgcgttcttctgtagtttcattgttccgctggatacgcttttttatgcggcagcggataaaaataccgtcctgcacagaagcggacggctgttttagatcctgtcttgcactttttttaagaatcttttacaatagagacgtgcgccggaatgttcccgctgcgcgccaaaccgcccatagaatggatgagtgctgatgaaagaacaaaagatgcctctgggtctttatattcatatacctttctgcgcgcagaaatgcgcttactgcgacttctattccctacctcacgccgaaggaaaaatggacgagtacgtccgcgccgtgagcgcccatctggcagaagtagcgccccgcgccgcacagcacattgtggataccgtctatttcggcggcggcacaccgtcttatctcggtcccaaacgtctcaaggcactcctttcatccgtgcaaaagcactatgtcctttccaaggatgctgaaatcacgctggaggcgaaccccgacagcgccggagattggcgcgccctgcgcaccctgcgccgggcaggtttcaaccgtatttccctgggcatgcagtcctccatcgaaggagagctgcgcgctgtgggccggatccatactttcgagcaggtgcgcgcggcggtggatgccgcacggaaagccaaattcaaaaacgtgagccttgacctgatctacggtcttccggaacagactatggaaagcttttccgcctccctgcgcgctgccgtggcgctggagccggagcatatctcctgctatggtctcaaactggaagagggaacgcctctttataccgcccggaatactttttccgctgcggacgatgatcttcaggcggacatgtatctctttgccgtatcatttctgcaggaagcggggttcgcgcagtatgaaatctccaactttgcccgccccgggttcgagagccggcataatctgaaatactggactttatcggaatatgcaggcttcggccccggcgcccattcggatttcggcggggtgcgctattcttttgaccgggatctggatgcctacatcaacggcgcgctgcgaggcggacagatgcccatggagtgcgaagacctgcccgcctggacacgggatacagagtacctgatgctgaccctgcgcaccgtgcgcggcctcaatccccgtgcgtttgaaaacatgttccgccagcgtttcgccccgttccttccccttctggaacgctatgaagcgctggggcttgctgcccgcagcacagacaatacatggcatttcacgccccggggctttctggtttccaatacgctgattggcgaactgctggacgccctcagttccgaaaagcaacggcgctttgacgctaccgcacggggcgattatattgtgagaacctgacacagagcagctttctctccgcccgtgcagagagaaggctgctttttaatttttccagaaatttccgaaaatttaccattttacttatctgggtagatatggtatactgagctccatattatgtcacccactttatggattttggaggtttgatccggttatgaagtattttccccgcacgctcctttccacactgctggcagtgggcactgccgcatcgctggtgctctcgccgctggccgctgtgatcggcagcgacctgtacgcatatgacagcgacatccacaagggcactgtgctttcccacggcgtttattggggcgctactgcaaacgacaagcgcaccgagaactacatatcttatacacccagcgccgatgtaacgcccatcgtgacgtacggcagcaaggtgacctccaccagcaccgtatcctctgccgccaaagcgctggaagcacagggatatcgcgtggtagccggcatcaacggcgactattattataccggcagcggcatccccatggggctgctggtgaccgacggtgtgatccgttccggctacaactacacctgggccgtgggctttatggaggacggcacagttatcatgggcgaccccaaactgtccatcaagatgagctacacccatactgtaaccgaacccgctccttccgacaacagcggggaaaacggcggtgaaacgaccggagacagctctctttccgattccgccgcagacagcggctccgaacaaaccgtcacccgggaagaaaccgtgaccaaatccatctacaccgtcaacaaagcccgggacaccagcggcatctatctttacaccaacgacttcaacgcaaaaggcaccaccggctgcacggaagccggcatagacgtggtgctcgttcccgcagacggaagtgcaaacgccgatctgcgcattggtcagaccatgaccatgacggtggaaagcgtgacggccaaaaccggagccacggatgtgcctgccggcaaaattgttttgtcggtcaataacaaggccagcgccgaaaatatcaagaccctgaccgatctcaaggccggcgataccgtcactatcaccactgcagctgccactggccagtggcggcaggccaaatacatcaccagcggctacaaaaagctgattgaaaacgggcaggtggtcagcggcctggattcctctggagccccccgcaccgccattggcctgaaagccgatggcaccgctattttttacaccattgacggccgccagagcggctacagtgtcggtgcctccgaatcgcttctggcacagcggctgctgcagctgggctgcaccaccgccgtatgcctagacggcggcggttccaccacgctgaccgccacccttcccagcgccacttcttccagccgaatcaatcaaccttccggaggcagtgaacgcgccgtatccacacaaattttcctggtagccagcgccgctccctccggcgagctggatcactactacattgctcccttgagtacccagcttctggccggagccaaaactcagctgagctattctgctgtagataccaactacattcccatctccaccaacagcggcgcctcctggagcgccagcagcggcagcattaccgaaagcgggctgttcaccgctccttccggcggcggcacctccaccgtcacagtgagcgacggaacgcgcagcgcctccatggagatcgaaaccgttgccaacccggaccgccttgtggcccgtgccaacggcagcgttctcacctctatttccaccaaggccggcaccagctacgccctgaccatgtccgccacggccaaccatatgacactcatcagccaaaaccagtgtttccagttctccgtcaccggagacatcggaaccatcactgccgacggtgtattcaccgccaccaaggacggtaccggcgcgattgtggtcactgcaggcaccgcttcgctcaccattcccgtcacggtgcagtccatgccctttacggatgtggcgctctcctcctggtattacggcgccgtggagcacgtttacgaaaacggactgatgaacggcaccggcggcacgctctttgaaccttctgccaccaccattcgctccatgatcgtacagatcctttacaacaaggaaggttcccctgcggtttcttccagcggcactttctccgatgttcccagcgggaaatggttcaccaatgcggtggagtgggctgcatccgaaaagatcgtttccggcaccggagacggccgcttcgaccccaacagcagcattacccgcgagcagatggctgtgattttgtacaactatgccgcttataccggactggatacctccgtccggggcgatgtgtctgttttctccgacagcggcagcatccacagctgggcggccgatgccatgtcctgggcagtaggcacaggcctgctcaaaggcagtgagaacaagctcaatcccgaaggcaccgcttcccgtgcggaagttgcccaggttctcaccaatttcgatacgatttttgaagcagtctccaactgacctgcttaccaaaacgcccctcacggacaaaacatccgtgaggggcgttctttctgttccgaaaagccagtcttcaccggtatggctttttatactccagtcagatcaaagggcggcgtatactccgcctgagccgcccggcgttcctgggtaaacccttcgtcaatgccgcagtcggccatataagcgcaggccgcgcggtactctgcctgccgcacacggcggttcagctcctccggcacgccggggatcggcgtatactggctcatcagggaaaagagcacttcccccggtgcaaaatgcgcggccacccagtcaatgacacgcttggtctccgccaggccgcccggcagcatcaggtgccggatcaccacgccccggcgcagcatcccatgctcatccaccacatacggaccgctctggcggaacatttccaaaatcgccggcgccgcccaggtgaaataatccgctgcgccggagcagcgacggctccacttcgcggatacgtatttaagatcgggcaaatagatctgcactttcccctccagcagacgcagcgtctccacccgctcatagcccccggtgttccacaccacgggaatccccggcacctcttccagagccagagcgatccagggcgcaaactgcgtagggctgaccagattgatattgctggctccggcagcttccagctcccgaaacacttccctcagccgttccacagagatagcccggccgaaacctccggcgctgatctcccgattctggcaaaacacacacctcaatgtgcagccggagaaaaacaccgtgccggaaccgtcgcgtccgctgatacacggctcttcccagtagtgcagcgccgctcgtgccaccttcagctccgcccccataccgcacagccccgccgtttcccggcgcaccgcgccgcatcggcgggggcacagcgcacagtgctcctgcgccgccgtcagagctgcccgcacaaccgattctttacacatcctcgcaaaactcctttgccacacgctcagccaaaaataagccccccgtgcagtcgataacattcactgcacagtttttctgcacacggctgccgtaaatgcggccgctctccgctccaaacatggcgctgaaaaaaccccgcaccgctgcgccgtgggctaccaccagcacatgtgtccaatgctctccgccggacacgatccgctcgtccaaaaaggcgcggcagcggcgcaccagcgcttcataagtctcgccccccgctggcggcacataatgttccgggtcagaaaacagcgaccttgtgggctgcttctcttccgcaagatcgcacagccgcatgccctctgccgcaccgaatcccagttccataagccgcacatccatctgcacagcgatattctttccccgcaggatcagttccgccgtttccttggcccgctgcaaaggcgaggaaaaggccgcatcaaagggcacgctctccagcgctgcgccagcagccagggcgctgcaccgtccttcatcgcttaatgggacatccgtgcggccctgaagcctgccttcctcgttccacagcgtgcgcccatggcgcagaagatacaacttcacgtctcttcctcctgccggggcagcgcgttctgcgccgccgcgcggaatttggcaaaggccgcaggcaccgcccgctcggtttccagtccgtttcgatccgtccagcgcagctgtgctgcgtcctgtccccgcacccgcaacacatagccccgcatgtgccattccacatgggaaaaaatgtgtttcgcttccagctgttccagccattctataggcacaaggccccagcgctgcacctgctgcgccgcggcaggctcatccagcctgccgtccacattgggaaattcccacagtccagccagcagccccttggccgcgcgctgccgcagggcgacaccttgggacgacagcaatacaaaaaccgttttttcttccatccggcggggcgttttctttcgctttaccggaagcacattccaggtaccctcccggcaggctgtgcagaacgggcgggccgggcattgcgcacacttcggcgcgccgttgggcagacataccatagctcccaactccatcaatgcctgattaaaatcgccgggccggtcctctggcaaaacatcccgcacccatgcgccgaagcgccgcttcaccgcactgtccagcacatctccttcatccccggtaatgcgggcaatcacgcgcagcacattgccgtccactgccggcaccgcctggccgaacgcaatcgacgccaccgcgccggcagtgtattccccgattcccggcagagagcggatggtttcgtaatcacccgggaatgcgccatcgtactcttccatgattttgtgcgcagccttctgcaggttgcgcgcccggttgtaataacccagtccctcccacagtttcagaagacgctcttcctccaccgcagccagcgccgccacatccggcagcgcagccagaaagcgctcgtaatacggcagcaccgcgctgacgcgggtctgctgcagcataatctcggaaagccacacatggtaggctgtgggatcgtcccgccagggcagcacccgcgcgccggcatcataccaggccagcagcgcttcgctcaggcgatacagttgttgcggaaattgatccatagatttcgtccttttgttattttaccgccgcaggaaaaagatgcccgcggcattttcttttgcagcgttcctccgccagagaacagcagtgcgttaccggttaaaccgggtggcgaagccgcagcggcggcacagttcttccaccggggcgcgacgggaaaacccgtcgtacagcgcccgtgcccggggagatgccaaaatctcggtcaggggcgtttcaaagagattccccaggggcacatccccctcgtgatccaggcagcagggcaccaccgtgccgtcagaaagcacgcccagctggtcccgcagcccgaaacaaaactgcgccccggtttcggctgcttttttgtccggccaggcaaacacctgctcctgctccaaaaacaggtccttgcccagcacccggctgcggctgcgcgtgcgcggcagcatttcgggatccacaccggttttctcctccaaaaaacgcagaatctccccgttgcgctccgctgcgccgccctcgttccacaggcgcagcgcacagtggacgccctgttcgcgcaggaggctacataccgaccagaccgatttcagatacgcatccatggaaagccctacgccgctgccctccaaggcgtggagagacacgctgagcttgtgcagcactgcggcgtgggctgtcagcacagcgctgcgttgctccagcagggtgccgttggtggtgatacagacgcgaaaccccttctgccctgcaatattcaggatctctcccaattccggatgcgacagcggttcgcccatcagatgcagatagaggaagcggacatggccctgcagggcctcggccaccacggcaaattccgccgcgctcatacgccgaggcggccgccgggtttttgggcagaaggcgcagctcagattgcactgattggtgatttccacataagctttgttgagcatgttcctcactgcccagccagaacgttcagcgccccggcgggcatcacctcaatgcgattgccgtcgggatcgtgcagaaaatagatgcccaagcccgcaatctcctcatcaatcaggcccgccgcactatgtttggcataccacagttcccggcactccgtaacaaaggcgatatggctgctgcccggtgccgcagccccttccgtcagttccagaaaaaagtcccgcgtactcccatcgcccagccaggccatcagtcccgcgcctgcctgcaggcgtttcatcagcgaaaggccgaacatctcctcataaaatcggatagacgcctccaaattggaaacgcacagattttcatggccaaaacgcagcatggttcattcctccttttcccattgttgttttctgtgccacacagcagcggcgttggtttttaccagcagcttttccaccggcacctttgccgggcagatcgtctgacaggccaacgatttggtgcagccgctgaaaaagcgccgcccataggcgcgccccacgcgcgcccggtgcccgccttccgcactctggtcataaacccgaaaagccgccgccgcacccatcgccccgacaaacggcccccccaccgaaaaatgggggcatacctcaaggcacaatccgcacatcaggcagcctgccgcccggtaatgcagctcccgccgcgcccggttggtcagatccgcctcttcttccagccacagctccatttcctgcagcgcagcaaaacacgcgccgcgatccacctgcagatcacggatacgcgggaatttacgcagcggttccagcgtgatctccccggaggaatcggcggccgctcccagcgagacagcgcaggccagcgccggacggccggaaacaaccatggcacaggcgccgcatttcttctccagacatgcgcagtcccaagcgacacgctccgcttccgcgccggtttcatcctgcaaaagctcccgctgatccagttcttccagcgcccgcgccacagagtcctccgcggcacaggggcttgcaaagcgctgccaccggcttgcaccgctgccctcgccccgccgtatattcagatgatagcgcatggctgcgcctcctttgcgatgggttcaaaagtgatctccgcactgccgcccttccagcgggccaccgtggttttctgatagcgtgcgtcgtcacgtcgcggaaagtccgtgcggaaatgggcgccgcggctttctttccgcgccaaggcgctttccaccatggctgcggctagggacagctgcgcttccagcgcatactgccgggctgcgccgacctcccgatcccatcccgcgcgcgcacgcgccgtcagttctgccagtgccgccgcgccggcgtgcagggacacttcctgccgccggatgcccagacagccgttcagaatgcggctaagttccgcctctgccgccgcgcaggacacgatttcccgccgcgctgccacggcaccgcagagcgcacgccagtcctctgcggctttctctgcctccgccgcacacatttccggaagcggaatatcccgcagaatggtttgtgctgccgtgtatccgccgaaaatggcccccaacagggaattgccccccaaccggttggctccatgatactggcatgcacattctccggcggcatacagcccccgcaacgtagtgcgatgcgccgcatccacatacagcccgcccatgaaataatgaatgccagggtagacaggaatcggctcccgcctgggatcacggtgcaaaaactcccggcagaattctgtcagatcgccaagcctttcactcagcacctccttgtccactcccgtcaaatccagccaagcagtgtcctgcccgcattcccggcagaccgcctccgtctctcgggacacaacgtcccggggcatcagatttttcagttccggatatttttcttccatatagtaccatcgaattccatcgcgcagcacaaagagcctcccgccctcgccccgggccgcttcggaaagcagcgcccgctttccggatatcgccgcagtagtggggtggtactggatcatttccagattcgcacaggccgccccggccagataagccgcggcggctgccgctccggtgttctgcacagcgccggtagtgcggccgaacagaccgttcaatccaccgctggccaacaggccggttcccgacaaaatttcacaacttttcgtatatttatctaaaataatacatcccgcacactcattttgacctcttgtgaggtattttaccacctcgtgatggtctttgcgccggatcagtccccgatcctcccagcggcgggcctcctgaatcagtgctgccatcacctgccggccggtgctggattgggcaaacgccgtgcgcttctttttctgcccgccgaaataccgcagatccagcgcgccgccttccgtgcggttgaacgccacgcccagccgggccaaggtgcgcaccacttctgctgccccttccgttagcgcccgcaccgcattgggatcggcaaggtcacacccggcttccatagtatcccggaaatgctcttccatgctgtcgccttgccctttggtatccagcgccgcattgatgcctccttccgccatgacggactgggcgcgcaccgaaggcgcagaggacaccagcacgctctcctgcccgtgccgcgccaatgttagcgcagcactcaacccggccacacccgcgccaatgatccaaaccgccttcacagtttcacccccactgcataacacactgcacccaccgccgctgccagcagcgccaggacacacactgtccgcacccaacgctgcatccgggcgtcggggtccataccagaatccagcagcaacggcctgagattaaacagaacatgcacagccagcgccgcgctcagcgtcagctgccacaaaagactcggcacaccaaaggggcgcagcaacacgccaaacggcgtatggattgtgaacagctgcgtgtgctgcagggtcaaaagcaaaatcgccgcgccgctgagcacccgcagccagtagcgcccatttgcgtttggatagcgcagcatgtcccgccacattcctccgcgtaccactttccatagcgccagtatcccatgaagacacacaaagcccataaaaacataggaaaactgcccctgcaccaaaaaaacaggcgttaagagggtgacacagcccatagccaagtgtataataagcaagattaataccagccaggctataatcggatgaaatttctgcaaaaatgttctctcctttccccagggcacgtatccttatggaagtattatagcgcgttttccgccggaagaaaagaggcataccgacaaagggcgcacaccgtcttgacaaattcctttccatcgcttatagttcactaagtgaacgaggacgccagtagtgacatattgacaaagaggtgattcaatgaagacgaaaaacgatgcaggcgaacggctgctcagcgcatggctgaccctgtcttctacgctgtggaacgaacgcatcgtcacaggcatgacttttaacgaagccttcgtatgcaacctgctttcccgccaggatgctgcgcagcctctgaccgctactgatttatgccagcggacaaagctgctcaagagccagatgaacaaagtcctttcggaaatggagcgcaagggttatattcagcgcatacgctcggaaaaggacaagcggcaggtacttctgcacctgaccgaagccgggcaggccgcttatgcaaaggaacacagcggcatttcagcgatcctgcaccacctggtggaggatcttggcgaagaaaaagccctgcacgcggcagatatcgtcgaggagatcacccagtctctgaaaaagatcgaaatactataaaaagcggtgttctcggaaaggaaacattatgattcaacttttgactgattccgcagctgatctgacggcgcaggagctgcaagcgctgcagatcacagtgatccctctgggcgtacacttcggcgccgacgcctatctcgacggcaggacgctggatcgccccacattttaccgtctgctgcagagcagcgctgtttttcccaccacctcacagccctctcccgcggattttgaatcctgtttctccgctgcgcgggcaaagggggacgatgtggtagccgtacttctttcctccgccctgtccggcacttttcaaggcgcctgcatcgcccgggagatgatggacccagaggatgccgctcacatccacctggtggacagtctgagcgccacggtaggcgaacggtttctcttgctgcacgctgctgcactgcgcgataggggcgcctcagcagcagaaatcgccgctgaattgacggaactgcgccgccgtatcacgatctgggccagtgtggacacgttggaatacctctgcaaaggcggccgcctgtcccgcaccgctgcaggggtgggttctctggccaaggtaaagcccattattaccctcaccagagagggccgcgtagccgtgcagaaaaaatgcatcggaaaatcccgctgcatgtcggaaatcacagcgctgacggaaaaacggcggccggacccgtctcatcctgtttttggcctgtacagcttcgatgcgcacaactgcagcgcactggccggacggctggcagcgtgcggtttctccattgctccggatcactatctggaaatcggccccactatcggcgcccacatcggtccccatacctacggtgtggcctatattgccgcagatgaataaaggcgcacatcatcgcaagccgtgttccggaattgccggaacgcggctttgcgtttttttctgttcttccgcacagatacaactgcacaaaaggcgaagcccacggttcggggaaaccgtgggcttcagactatatagggaacttcggacttccgaataactcggcggctcgaaagtaccgacaaaaggaatttcagctgggccgcttatttgcagatataattctgcagcccaacgatcatgtaccgtcccgccacagctccctgatcgggggttccgatggccttggcggcaaaaaccgcggctttaccaaacttgggcgtcatatttttggtggcttccacaccctcagtggcaccttccaccgctgcatggatcaccgcgttcagatcagcgttctccgccgctgccgcttccaccgcttttttagcagcagcatccactgcatccagaatggtccgatcgcccagcgcacacttgccgcgcttctggatacctgcggcaaaaccggtcagataagtcgccagttccaccgggccgatctcactcacacccttgagccctttaccgccctccatcacgccgctggacatcagtgtgcccatggtggagggaaccacggaggacattttcatgccggccttcatcagagtcttgccgatatcaccaggttctgcattctcgcggatcaaatccggcagggcgccgtatcctttgtccatggtcaggcccaaatcgccgtcacccatcttggcgtccatgtcgcacagctcgtcgcgcttgtctgcaaacactgccgcaacgctttcaaacagttccggaagctgctcaaaaagaatcttatccattgctgctgcgcctccttatgcctgagtgtaaaacggcgtcttcacaggcaggtcgatctgcgctttcatttcctcatcggccatcttgcagatcgtgatagacgcgccggccatttccatagaggtggcatattcgcccacaaaggtgcggtataccttgatgcccttctcgtccaggatcttgcgcacggagttgcacaggatatacagttcttccacagaggtggcacccaggccgttgatcagcagggaaacctcttcaccctccgctacaggcatatcgcccagcagcgtatccagagattcgctcgccagctcgtccgccgtcttaatggggccgttccatacacccggctcaccatggatgcccatgcccatggccatttcattttcgcccagcgtaaagttgggatgtcctacctccgggatgatgcagggcgtcagcgcaaagcccacagtgcgggtgttgtccttggccttctgggcagcggcaagcacttcatccagggtgccgccctgggccgccttggccccggcacatttatacatgaagaaaatgccggccacaccgcggcgggtatcgggattggcattggaattcacatcgtcggcgcctacaatggagcgggtttcaatgtcgtccatctcacacatctcagcggccatatcaaagttcatgatatcaccggtgtaattgccgtagagatacagaataccggccccggcttccacttccttggagacattgtagatctgctctgccgaaggggactgaaacacgccgccgacgccgcagccatcgagcaggccctcgcccacataacccagaaacagaggcaaatggcccgtgccaccgccggtgataatggccaccttgccgtccttcttcttggcagtgcagtagcagcgcaggtcgccgttcacatattttacctgatcgccgtgggcatcatagatacctttgagcatctcgtccacatagttttccggcgcgttgataatttttttcataaaaatgttcctccttgatcgcttttacagcattaaacccaattcttcctgcagggaatcaaaatagatgtcgtcatggctggtattgttgcggaaaacgcacacgctcatgacctcttttcccacggcgaaaggcaccgcgtgccacacagagggtttgagggaaatacccaggccgcaggggatgtaaaaagccttcacgttatccgcttccagcgcccccgccggggccatgcccacaatcaggtcgccgtccatggcgatcaggttttccgtagtgtggtcgtgagcttcaaaatccttgaggataaagtcatggggcagcacccgcatcagattgatggacgtcggcccatcgatcaccaccgcctggggataccacaaatggctggcggggttgcccccggcctcgcggccttcggtggtcagcacctcgccgaagggggcaaaggcctcctgcgtcagcttctgcacttgaatcattttcatataaaaccgttcctttctgcaagcgcggctccgtgccgcgcacccgttctcaggaagcagccgcggccttttgggcctcgcgcttttccagcaccacactgagcaccaacgcagcgatcagcagacagccattggcaaaggttttggcattgtcggacatgtgcatcaggccaaaggcattggcaatcatctgcagcagcagcaccgccagtaccacacccgccacgcggcccttgccgccgtctggatggacgccgcccagcacaacgatcagcagcgacagcagcgtataggtggagccgttggaggatttagcactgttgaggtgggaagtaatcaggatacccgaaataccgcccaggataccggagaacatataagtcataatcgtgactttcagcgtgttgatgcccgaatacatggctgcctgggcattggagccgaggaaatagatctcgtggccgaaaacggtgcatttcataatgaacaccacaaccgccaccacggcaatgaaaataaacagcacataaggtatgcccgccacggtaccgttggcaatatttttgaaggcgtcgcacataccgttgatggcaggtccgccggtgatgccgtaggccaggccggtataaagctgcaggccgcacagagtaaccagcatggccggcaggccgaaatagccgatgatgaaaccgttgaacgcgccgcaggcagcgcccaccacaaccgccaccacacaggcaagaacaatcgcgggaacgaccatggcggggttggccacctcaccgccttctatgaggaccatgtttttcacaatcagcgccgcgagaacgccgctcaggttcataatacccaccagggacaaatcaatgccgccggcaatcatacaggccatcatgcccaaggccagcacgccgtattccgggaactggaaaatcatggagcgcacattcagcacggtgaaataggaaccaggcttcaggatcagcatgatgatgcacaccaggagcatcagcgcaataatcgtcagaatatggttgtcttttttcattcggagcgggctttttgaagccgccagcttactctcattcgcactcatttgcagcgcacctccttaaatcttgcccaggctggcctgacgcttggcctgaatcgacgtcatgatcgcgcccagcagcagcaccaggcccacggcaaaggtctgccagcaggtgggaatgcccagcatgttcaggttgttctgcaccagagtgatcaacagcacgccaagtaccgtgccgcccacactgccatggccgccggtcaggcggcagccgcccacgacgcaggcagcgataatgatcatttcatcgcccatcagcgcggaggtggtggaggagtgcatcagagtcgtatagatcatagcggtggcgccggctaccacgccgcagaaaatataagcgaagaactgcaggcggcgcacattgaaacccgcgatacgggcggcgttggcatcgccgccgatggcatacagtccgcggcccagcatagtgaatttcatcaccaacgccatgaccacacacaaaatcaccggcaccaggaacagcaccgtcagcgggtaagtaaagccggtggaaggcgcagtgtacgtaatcatattgatctcatacaggctctgaagggagctgggcagcgttgtaaactcgcgggtgcccagcaacatcaccaggccgccggaagccacagaactggtggccagcgtggcaatcagaggcggcagcttcagataagagaccagaataccgttcaggatcccgaacaccaggccgataaacatggccaagccgaagaagaagaacaggttgtccggtcccatttcatgataattcatatacagcggcacatacatggccacgcagcccaccgcggggaaggatacgtcgatgccgccggagatgatgaccaccatctcacaaatggcaaaacacatggtaaaaataccggcacgggccaggtt

SEQ ID NO: 4325 - DNA, 3536 bp, Unknown
  16S sequences of unknown bacteria
atgtacttccggtgttagcttggtggttcctgacaaaaacaagaacggggctggtgctctgttctgtgggggaacggcctgatgtcacaagagcgtacgggtataacccggtggttctgcaatacggagcggttatttttgcaggtgttctggctggaatcggcggggcacatatgagcgtgatctatgcgatgagttgggcaaacaacatgatcaacggacggggaattattgcctcctctctggtgatcctctgctcgtggaagccgcagcgagcataccttgcggcgtatctgttcggcctggcacaggcgctgcagatattcttccagatccacgaagtgcccatttccatgtatgtgacattgatgatgccctacctgtttacattggttgctctggcaattatttcgacgtccaaaaagccgtcgatgccggaacaactgaaaattattacttaaagaaaaaggacggaggaaaaacaatgaaaaaagtagttgcaatgatgttggtgctggttctgctcgcggcaacgctggtggcatgcgcaaagccggctgaccccacccagacgcagacggaacagacgggcgacgtcaagcccggtgcgggggcaaagaagcttggcattatcctgagcggaacaaaagacgactatggcttcaacctgaatttcgtgcagcttggtgaacttgttgagaaagagcttggcattgaagtcgtgattaaggaaaacgtccctacaacctctgacagcgaaggtgtcatggaggagctgattgcacaggggtgcaccattctgttcccctcgcagtttggattcctcgaatactcgcacaatgtcgcgctgcgtcatcctgaggtagcgttctattcgctcccgatcacggattacgccggcggaaacttttccatcatccatggagaagtgcaggatgtctggtatctgaatggtgtcctggccgccatgtattcgacaacggacaagatcggcttcattggctctctgccgatcccggatgtcattgttgccatcgacgcgtttgcacttggcgcgcagtcgatcaagcctgagattgatattaccgcggtctttaccgggtcgtgggcggatactggcctgcagaccacatctgtgaaccagttgatcgacagcggttgtgatgtcattgcgccgttccaggattccatcaagacgatgatggaaatctgccgcagccgtggcgtgcactgcttcggctgcaactctgatgcgtatgagctggatccccagacgtggctgtctgcgtgcattacggattggagcggctatattccgtatctgaagcaggcgattgacggagaatatgaaccggtgaacatcagcggcggcatggaactgaacctgatcaagcaggcaacatttggcgacacagtctctgatgagatcgtggcgaagcttggtgaagtgcgcgagcagttgattaacaaggagattgccgtgtttgagggcccgatctatgcgcaggacggttcggtcatgtttgaggacggatacagaccgacgatcgaagaaatcaacgtgatcgatcaactggttcagggcgtaaagggcagcatgaactgagcgggaaaagctatgctgattgacgcgcatgttcatattttcccaaacgttgatgggtatggcccaaaaggccatacccatggcgcgggatatggccggatcgatgcaggagacggcattgcacaggatgtgctgccggcgatcaacgaaaacaccagccatacattgcagatgctgctgcatgagatgcggcaggcacaggtggataaagctgtcctgattctttgcccatgctatggagactggagcgagtatgtactgcaagcatgccgggactatccggagcagtttactgcctccgctttttttgacccttggagtcccgcggcgcgccagtattatgccgaaaagctggaaggatcgctttggaaaaacattaaaattgagttttctgaggcgggcggcctgtacggtgtctatcccggcgtacagctggatgcaccagagctaagatggctttgggaggccatggaagcaggtggaaaaacggtttcgtttgacctcggtcggccaggcgatggttcttatcagacagatcagatcgcgtccatcgcaaagcgtcatccgggattgaaaatcgtgctttgccacatggggcagccctcgcgagctgcagagcgcaacccggagctttggtctgcgtggttggagcagattcgtttgggtacgttgccaaatgtttggtttgatctttccgcgctcccgtatcatgtgcagaaggaagaagaatatccatttcccagtacgaaacgctattttgacttggcacgcgggatcgtgggagcaaagaaattgttatgggggacagatattccatggctgctggggacggcaaactatcagcagttggtggcacacggaaaattccttttgtccgactgtacggagaaagagcgagagatgatgtttgcaggaaacgcatgggatgtttattggaatcatcgcaaatgaaagtagggagtcgacaaaatgaatgtttctgaaagactggctgcatcggctgttgtgccggttgtggtattggatgacgcgaaggacgcggtcgcgacggcaaaggctttgcttgccggcggcgtggacgtgatggaaatcacgttccgcacggctgctgcggcggactcgatcaaggcagtcgcggaaagctgccccgacatgttagttggcgcaggaacggtcattacgcttgaacagtgtaaaaaagccaccgagtgcggcgcaaaatttatcgtatcccccggctttgacgaagaagtcgtccgctggtgcgtggaaaacggcgttgccgtgacgcccggctgcgtgacgccgacggaaattatggcggcaatgaagctgggtttaaacgttgtgaagttcttcccggctggcgtttatggcggactttctgccatgaaggcgctctcgggcccgttcggcgggatcaaattcatcccgaccggcggcgtgaatggtcagaacatcggcgagttcatcgccgcgccgttcatccacgcagtcggcggcagctgggtctgcccgaaggcggacattgcagccggtaattttgagaagatcacaaagctctgcaaggaagcaagagccgctgcgctggggttcgaggtagcgcacgtcggcgtcaactgcgaagatgccgatgcggcatccgcggtctgcgagaagctgaacaaagcgtttgttctgccggtcaaagacggcaactcttcgatgtttgcatccagcggtatcgaggtcatgaagtccatgttcaagggcaaaaacggtcatattgcgatccgcaccaactctgtggagctggcggtggcagggcttgcaaagaagggctttgcgtatgacgaaagctcggcaaagtacaaaaacggacgtatgacagctgcatacctcaaagacgagttcggcggtttcgccgtgcatctgctgcagaagtaaggag

SEQ ID NO: 4326 - DNA, 8007 bp, Unknown
  16S sequences of unknown bacteria
ggcagcctttgcaaaagcctcccgcagacatttttttgccgcacaatcggcgcccaaaggccggtctttttccttttgcaaaaaagcggctttaaaagagcgtgaacacatcggcatttttattttttctattgacaacgggagaaaactgtgctataatttcgcttgcctttgaatgaggcggcgttttacgtcctgccgaaaaagctttgtgctcggcctcggctgcccgccgtgtaaaaaacgggcgaaaacaaaaatgcggatatggcggaatcggcagacgcgctagattcaggttctagtcggggcaactcggtggaggttcaagtcctcttatccgcaccatcgctcaaagcctttgtttatgtggctttgagcgttttttatagcatgaatttttaattctttgaactttacaactataatagtattcatagcagaacattatttcagggtttaacttgttatttttttatcttgtagtttggtttgagacagcaatctttcttttagtttggttgagtacatacaacaaatatgcaaactaaaccaccatactgccagactttgcgccgtttgtaattctttatcagaatacaaaccatggcagactgcatttcgcataccaaacccatagtcacttgtatagaatagtcgtaaattgaataaaaatgtttcatcaaagcattctttatttgaatatcaagctttccgttcttttcgtatataacgatctcatccaccaacatcctgagatgcgtatcgcttatcgcaccgtcggctataataccgtcaagcagttctacgcttttctccatttgctttttgcgttcctttacggtagtttcaatatccttcatttcccgaattctgttttcgattgttttaatatccgtttcgcaggaaacaagcatttgggtataaacttcggcgtgttctctgtcccgtattctttcaagcagtatttgctgttaatcggttttccgctgcgcaagcttttctttaagcgctgttatctgcttttcggcggagggtctgtcggcaagccactttttcagttctctgtcaacccttttaaagttttcatgggccatttttttaagctcctcaagctctttgagtatcagcctgtcaagaacttcctcaccgatcttatgcggtgaacaattttcctttccgtaacggtggtagccgttgcaaacatattccattctcggcggattattacgccaatatcttgttttacagctgaatgaggaaccgcaatcgccgcattttataagtcctgtgtatcggtgatgcgtatttccgcttgaagcccttacatttcttttcggcttttgctcaagtaaaaactgtgcctgctcccatatctctttcggtatgattgcaggcacggcgttttcatgtttgaaatgctcttcgggcggcagttcctttcttatatgatttattttacttgtataggacttgtggcagataagattcccgatataaaactcattctgcaatattctttttacgcctgtattttcccataaaaatctgtgagcaatttcgggtttgttgtatccgagatttttacctaacagttttttctgataatacaccggcgatttaatgccttcctcattcaaaattttagatatggctttaagcccgtatccagatacatacagattgaatatcttacggactatttcggcgtgttcctcaacaaccgtaaccttacctgtatttttatccttgaagtatccaagcggcggtatcatcacgataccgcttttttgtttctgcttatatcccgcacggattttcttggatatatctctggcgtacatatcgttgaatattcctttaaagccaatcatcagatcatcgtcctcgttgcttgtgtctatgttttcggttaccgaaagcacacgcacatcattttcacgaagatagtctataaacattgcggtctgcgttctgtgccgtccgagtcgggacaggtctttaacgattaccgcagatgctaaatgtatttgttatactgtttactttttactcagtcggcatacgccgtccgaatcgtcccatgctttcagtgccgccgcaagctcggaaatgaattttttattgatgtagtcggcactgccacggttcatttcgtgttcttccgcatatttccgaattgacattccgtttatatatcttttcttaaaatatgcggcatagcttttgagcacggttttaagacagtcatttaaaaaagttatatcttctttcagtatattaaaatccgttttgcccgaaacgccgatataccgtttttgtgtaacacacaaattatatttacgcacatccgatttatagtttttgcagatatcctttgcataatcggtatatgtttcggcactgcggtaagtgcggttctcataaagcagttcttccgcatcctttgattgctttttacgaacaggaccgggaaagcctgcttcttccaaatttgaaatatgcgtatcggtgattttcacctgcggctgacgggtgaacttgtcaacccattcgccgtttacctcgacttgctcacaaaaagaatttttcgttattgtgtaatacttgcagccgcaggcttcggttccgtaatgaaaaataacgactttttcatcggtgtcagcgtcggggacaactgccacaacataaatatacctgccgtcataccgtctgtaaaatccggcaaatattctcctgttccgttgcctgcccatacgctcaccccttaatgattctgtgagagtattttatcatattctcggaaactttacaatgcctttatcaattatgaaattcagcagagaaattctttttgccatactgtattttattacgattccaactccggtgtgtattcgtacacttccatcatcagccgagctgccaaccgaaatccggttgtgaacgcctgtagttcatgcttatcagaaatctctgcttccgccttttcgaactgatcaagcaggcctttttggtgttctgtgagagcagctctgagatttttttcgtgccgtatggcattttcggttaattcacttttattgccgccgttccataaagcgtgttcatgcggacgtatgctgccgtaataaagtttttcaagtatattcacgattttcacctctttccaagccaaacaccataccacaatcggtgtcataagtccggcattcttttgaaagagttttaaataccggatttctcctatatttatcaggacatttagaaaaatcctgtaaacctcattagtaaaaattgcaaaataagacagagttcttatttttataaatctccgttttttagtgtataaaaagccgtgtgctgctgcacataggacttgacaaaaatattgtgcagcagcatacggcagggttttaacgcctgcaaaaacatatttatttaattcaaaaaatataaacggcttatgttaaaatgtatattttatacaatgtgcaaattcggcggttgacagcctgcactaaaatgctttataatgctgtcaaatcaaaaaaacaaatttgaaacagacaatggcgcctggtaataaaaaggtgcggttgtctgtttttttattttaaaagaaacggagcgacagaaatgaacggaaatgcaaccgaaataatgcttaaaaatatcggtatggaatacggcgttactgctctgacaaatgtaagtatagatatcaaaaagggagaatttatatcgctccttggcccgtcgggctgcggaaaaaccacccttttaagaataatcgccgatttgataaagccgacaagcggcgaggttacggtcggcggcgaaacgccggaggctgcgcgccttaaaagaaaatacggcattgtctttcaaagccccgtcctttacgactggcgaacggtaaagaaaaatgtgattttgcccatggaaattttaaaggttccgaaatccgacagggaggaacgggcgatgcagatgcttgagcttgtcgggcttcaggattttgcagatcattatccgaagcagctttcgggcggtatgcagcagcgtgtgggaattgcaagggctcttgccattcagcccgaaatacttttaatggacgagcctttctcggcacttgacgaattcacccgtgaaaagctgcacgaggatcttttgagaatttggagaaaaacaaacaaaacaatagtttttgttacacataacatagccgaatcggtattcctttcggacagggtctgcgttttgtctccccatcccggcaggctttcggcgattatcgacattgatcttccgagacccagaacggtcgaaattaaagacacgcaggagtttacggattatgtggcaaaaacgcgcgacagttttgagggggtctgaaaaatgaataccttaaaaaagctctgccgtgccaagtggtttatgccggttttatggacgcttattattatagcggtttgggagctgtttgccacggtcgtggagctgaccgagcgctcgcccgaaaactttttgccccacataagcggaataataggctcgataatttccaccgaaaagataaacggttctcagacggcattcggcatggtgcttgaaaacgcgggagcgacgctttcccgtgccggaataggctttgcggtgggaacggcgcttggatttatactggcgcttttgatgagcctgtttgatacggttgaaaagattgctttcccgtaccttatgcttatccagatgatacctgttttgggcttggcgcccattatactggcgcttacaggcgatattgcaaaaagccgaattgttatagccgcgatacttaccttttatccggtggcggcaaatacccttgccggctttaagtcggtgcaaaaggaaaagcacgagcttatgtattcgtatgcggcaggcgtagggcaattttattttaaaactatgtttcctgcctgtttgccgtacttctttacaggacttaaaatagccgctcccatggcaattaccgcatctatacttgttgataccttacagggcggcgtggggctcggatgtcttttgtcccagtctcttaaaggcgccatgacaagatatgttttctggcagataatcgtgctcagcgcggttgtgggagtgttgagctttgtattgataggcgcagttgaaaagctcgtttgcagacacaacaaatgatacggaggcgacggacatggtaaaaatgaaacttccttcaaagggtcggtacagcggaataaaggcggttgcctgtccgattgtgttcggagcgctgattataacgctttggcaaaccggcgcacttcataaaatacttaatacaaccacggtcattttgccgatgccgactaaaatcatggaaataatgagcagcaacggtgaggcgatttggcaaaatacggcggccaccctgtcggtggtcattccgggacttgttgtcggctcggtaataggatatttgcttgcggtgcttgcctgcttttctccgagattcggagctaccggacttacggtcatcgcggcgataagcgccgtaccgatagttgcattgtcggcggtgatgctccagtggacgagaaaggtcagtcccgatgtgtcggtcagaagctttgtcatgaagctgcttattgttgtgatcgtcagcgtggcgtctatgacgcttaacgcatacagaggacttaccgagctgccgcccttctcccttgaccttatgaaatcctacgcggcagggaaaacgaccgtgcttttaaagctcagagcgcccaacagtataccctttgtgtttacttcgctcaaggtcagtgttccggcaagcgttatggcggcattggtcagcgaatatttcgccgaaaaggtttgcggcgtcggcagaatgataagagaaaacattttaaaggcgcagtattccacggcttgggcttacatagcggtggcctgtattatcggaatagcgttattcgccgttttatcggcaacagaagctttggtgatgaaaaagcggcgttgaatacaaagttgtttgacggagcttttcattataaaatcaaaatatcggaggtaattgaaatgaaaatgaaaaaaattgcggtaattgccctgtcggcattacttaccctttcccttgcgggatgcggagacaaggccactcagaccgatcagtcgactcagtccggcgaaatgaccgacgaggagagaatcgtttcggcggccaaggccggtatggtaggcaactggggactgggcaacgaatatgaaatccaggcactgctcgcaaaatacgatcagcctaccgattatgtcagcatggacttcacaatggatcagtttgataccgacgccattaccctggcatcggccatgacatataacgagctcggtcttgttaaaaacgactatgacggcggctacggctacggcgacaaggtcggcacgatagatatgaacgaccagggcgttgcaatgcttgaggatatgattttctgcaccaaggatttcgcagaaaaaaatcccaacacggtccgtgcatttgtttcggcctcgctcaagggctggaaatatgcctgtgagcatcccgatgaggcggccgaaatagtttacaaggcaggctcctctgtttcctcggcacaccaggcttatatggcaaaggaggtcgtaaagctcgttcagaccgacaccaagggcaacaccgttaccgattacggtcacatggacgacgaggcgctgcagcaaacccttgaccttgcaaagaaatacataaagcttgacgacagcacggcttccgcaaagctttcgggtcttacccttgacgacatcagaaacgcctccttccttaccggagacataggaactcccgaaaagaaggatgtatccattcagcttaaatggctgccccaggcgcagtttatgggctattatgtcgcaaaggacaagggctattacgacgaggtcggacttaatgtcaccatcactcccggaggcggcgacatcggtgaaaccaccgcagttgcgggcggcacggtcgatttcggtgtaacatgggtgtcgaaccttatcaccgcaaatgccggcggaatggatcttgttgatgtggcacaggtctatcagcgctcgggtcttgtacttgtttacaaaaagtaagatattcgggtcaatgcggtttttaccgtgttgacccgggaagtttaacgaaaggatatgtttttatggatctgcttataaaaagcggaacgatcgttaccgattcggaaatgtttaaggcggatgttgcggtaaaggacggtaaaattgtcgccgttgccgagggtatcaggccggaggacggtacaaaaaccgtagacgccgagggaaagctcgtgcttcccggcgccatcgacgcacacacccatcttgcaatgccgttcggcggaacaatatcgtccgacgattactatgccggcacaagagccgcagcctgcggcggtaccacaacggtattcgactttgttttgcaggatttcggcgaaacgatggttgatgcggtaaaacggcgcgacaagctttgcagaccggcagcggcggtcgattacgcataccatgttgcgattaaggatgtaagcggagaccttatcaattcgatagacgaggcggtcgaatacggcgttccctcctttaaggtttttatggtttacgatttcggcgttaaggacggcgttttttatcaggtgcttgaaaaggcaaaaagcgtcggtgctctcattgaggttcatgccgagaacaacgaaatggttaatatgtttacaaaaaaattcctctccgagggcaaaacgggcgcatggtaccattacctttcaagacccgagtttgtcgaagccgaggcggacgaaagggcaattcagtgggcaaaatcccttaatgcccccctttacatagttcaccttgcaaacaagcagggcgttgaggcggtgacaaaggcacgggacgaaggctttgagatatatgccg

SEQ ID NO: 4327 - DNA, 5810 bp, Unknown
  16S sequences of unknown bacteria
gggatcagattcacccacgccgactgccggcggcatcggcgcgctggccatcggtgcgggagggctcgatgtggcttgtgccatggccgggcgtcccttccatctgcgcatgccgaagatcatcggcgtagagctgaagaacgcattgcgccgcggggtaagctccaaggacatcatcctgaaggtgctgcagatgctcagcgtcaagggcggcgtcggctgtgtgctggaatatttcggtgacggcgtaaagacgctcagcgtcccgcagcgggcgaccatcaccaatatgggcgcagagctgggcgctacttcctcgctgttccccagcgatgagaacacgctggccttcctgaagcagcagggacgggaagaagacttcagcgagctgcagccagatgaggatgtggtctatgattccaccatcaccatcgacctggcgcagcttgagccgatgatcgcgctgccgcattcccctgaccatgtctgtgcggtcagcgaggtcgccggcatgaagatcgatcaggtctgcatcggcagctgcaccaattccagctatcatgacctggtgtctgtgggcaatatcctcaaggggaagcatgtgcatccaaacgtatcgctgacggtgtcgccgggttcccgccagatcttcatggagctgtcacgcaatgggacattgagcgatctgatcgcggccggcgcgcgtatcctcgagtgcacttgcggaccgtgcatcggcatggggcagtccccgatcaccgacgcggtgtctttgcggacgttcaaccgcaatttctatggcagaagcggcacgctgagcgccaaggtatgtctggtctcaccggagacggcagcgctgagcgccatcaacggcgagctgagcagcccgctcgatctgccttatgagatcccgcaggaaccggcgttcatgcaggcggacatgtccatgttcatcgagcctgagcgtgcgcatccagagacggtggaagtcgtgcgcgggccgaacatccgcccgctgccgatgaacacagcattgccggacaccatcgacaaaaaggtgatgatcaaggtcgaagacaacatcacgaccgatcatatcgcgccggccggcgccaaggtactgccttaccgctccaacatcgagaagatctctacgtttgtcttcatgaacaataaggcggatttccatgactgctgcaaggcgaatggcggcggctacatcatcgccggcgcaaactatggacagggctcgagccgtgagcatgcggcattggcgccgatgtatctgggcatcaaggcggtcatcgccaagagctttgcccgcatccataaggctaacctcatcaatttcggcatccttccgctgaccttcctggacgaggcggactatgcgcggatcgacgatatggatgagctgcgcatggagcatgtgcgcgatctgcgcgtcgatggcaccctgacggtggaaaacgtgaccaagggcatccgctttgaggtcggctatgatctcagcgaactggatatcgagacgctgcgcgcaggaggaacgctcaacctcatccgtgctcagcagtaaagcagcttcggctgcttttcttctgacatgcttttgaagcatgaggtgacatgaatgacaggtattttacaattctttcggcgtgttctacaatacagttgtctgaaaagagagtgaaagcgtgaccagagatgaagcagaacgatgctgcggcattcccgagcatatcttgcgggaatatgagcagcttcgccggccttgcggcaatgaccatcatgatgaggcggacatcgcggcgatgagcctgctcatgacgcttcatgacatcggcttctctgcgggagaggcacagaggtatatgcggacggatgggcagggacagcgcatggagatgctggagcgccgcagggaacaggtgctgactcagatccatcatgatgagcggcagctggaacggatcgactggctgcgccatcagaacaggacagcacaggaacaatgaaggaggagacgacatgagcatcaagcagacggcaggcagagacggcctgggagagtttgcgccgaagttcgcgcagctcaatgacgacgtgttatttggagaagtgtggagcagagaagacaagctctctctgcgggatcgttccctggtgaccgtagtggcgctgctctcacagggactggtggattcttctttccgctaccacctgatgagcgcaaagcaaaacggcatcacccgtcaggagatcgcggagatcatcacgcatgcggcattttatgccggctggccgaaggcgtgggctgccttcaatatggccaaggagatctggacggaagatgaggcgcagatgcacggcggcatgttcgggcttggacagcccaatgacgcatatgcgcagtatttcatcggtcagagctatctgaacccggtgctcagcggagatctggccattgctaatgtgacgtttgagccgggctgccgcaacaactggcatatccatcacgcggacaaaggcggcggacaggtgctgctctgtgtcagcggacgcggctggtatcaggaatggggcaaggaagcccgcgagctgcatgaaggagacgcagtgatgatcccggcaggcgtcaagcactggcatggcgccgcgaaggacagctggttctcgcatctggcttttgaggtgccaggtgaaaacacctccaacgaatggctggaggctgtcgatgatgagcagtacggaaagttgaaataagcatatcgatcataagaggctgtgcgatgcgcacgtctctttttttacgaaaaagtatagaaaaaagtaatggaaaagcatttggtataagtatttgaattaaatagagctgaatcataaaatatgctcagaaatgacatagatgtgatgatggatcctgtaagcgccaaagccaaagacagaacacatgttgcggatcagtattgaccggttgtaactaccgggttgtatcatctgtgtcaaagggatgtgggagaatgagaaagagcagataaggaaggtgatatgcatggctctttccgcattgctggaactaagtgagaaagaatatgacgcttttgcgtccgtacacccatacgcgaattttctgaattcgatctattctggaaggaagtttgccctgcgcggctgggatgtccattatgtcggcatctgccacgatggagaaatggcggtggccacgctgctagtgtccgtgaagctgcacggcagctatcgttacttttatgcgccaaggggatttctgctcgactatgccgaccatgaactgccgcaagcgatgtgtcagggcgtaaagcagtttgccaaagagcgcagtgggctgtatctgaagatcgatccatacgtgccctatcaggaacatgatcaggatgggaaagtcgtggaggacggcttttgcaaccagaagatcgtggatgacctgcagtcatgcggatttgcgcatcagggctttaccagaggctatgacatggctaatcagtgccgctggatgtctgtgctcgatctcagaaataaagatgaagagacactgtttcaacgctttgacgcacagacgcgctgggcgatccgccgggcgcagcgaaatcagatcaagctcacgcaggccgggccagagaaactgccggatttcatgcggatcatcgatcatacagcggcacgacgcggttttgatacacaggatgagacttattaccgggagctgtttcaggcttatggcagtcaggtgaagctgatcttggccgaaatggacctttccgcataccagcgggcacttaggaaagaacagatgcagaagcaaaccgaactcagcgagatccagggatatagctgcaaacgcgccagacatcagaagatgctgcgggaagaactggatcagcttcagcagaaattgcgtgaagtcaggcagctggagctttatgcgcaggaaggcaaggtgctcatgggcggcgggatcttcatctgctatggtcaggaaatgatctatctggcgggcggaacctatgggcggttcctgcattttcacccggcctatgccatgcaatggcatatgatccgcgcagcgaagcatgcggggatgcgcgcctataatttctacggcatcagcggatcgtttgagaaagatcaggatggttatggcgtatttgccttcaagcgcggtttccatgcggatgtcgtcgaactgttgggagactttctgatgccgctgcggccatggacatggcgggcttatcgcctgatacaagagctgaagcgccatatcaaaaaacccggctcactgccgggtaagcagacagactgactctgtgtcatcgctcatcggaaacatgtcgaaaagatacatgtcgctgcaatgatagccttttttcaagatgtatctcaggtcgcggatctgggtgaatggattgcaggagatatagatgatccgttcaggctgcagcgcggcgcaggcatcgaggaacgcaggggtgctgccatctctgggcggatccaggatgatggcgtcgtaatgcgcatgccgctggctttctgccatgatgaagcgggtggcgtccgcgcagatgaaacgggcattgcagatctggttgcggcgggcgttttcccgggcatccttcacggcttgttcgttgatctcgacgccggtcagcgtgcggatggaatcggcgatgcataagccgatcgtgccgatgccgcagtaagcgtcgagcacgcgcatgcgcggatctggccgcagcaggtcatatgccttctgatacaggcgctcgcactggcggtggttgatctggtagaacgaggaagaggagatggcgaaggtcttccccagcagctcatcggtgatgaagcctctgccatacaggatccgttcttctttgccgagcacgacgctggtctgccggcggttgacgttgagcacgacggtgcggatggcggggtggcggcgaatgagctcactgatgaacgccttgcgggaaggaaagacatcgctggtgcagaccagggtgacgaggatctcgcgcacatcatgatcggtgcggatcagcacatggcgcaggaaaccgcccctgcgcctttcgtcataaggctcgatgcggaagcgggccatgagctccaggatcgatgcggcgatgtcgtcgcaggcttccgggtgcatcagacagcggcggtaaggcacgatgcggtggctgaactcctcatagagcccggcgcacggacggcctttttcatcgcggccgaagccgatgatcatcttgttgcggtaatggtcagggtcttccatgccgacgacatcatggacccgcagcggcagtcttgccttgtttacttcccgcacgatctgttcttttttccactggagctggccttgtgcgtcgaggtgcatgagctgacagcttccgcatcgcgcatagagcggacatggcggttcgatccggtgcggatgcgccttgatcacggtgtcgaggctcgcgctccagccatcgcgcagcggtttgccgatgcgcacacgcacttgttcccctggcatcgcgtgccgcacgaagatggtgtccttgccatggcgcatcatgccctgcccgcgcttggcgctctggatcgtgccttcgatgcgcatgcctgtcttcagcatagcagtttcctcgctttcatgatggcggcgtggggatcatccacgaggatggcgttcatgccggcatcgagggcggcgcggatgttgtcttgggcatcatccaggaacaggcaggcatcggcgtcgagctgatagcggctca

SEQ ID NO: 4328 - DNA, 32759 bp, Unknown
  16S sequences of unknown bacteria
cggggcttgcggcgcggcctgggcgggcgcggcggacggggttcctgcggcgcggcctgggcgggcgcctcccccgcctcctccgcggcggcgggcgcaagctcgtcctccgccgcggaggagggcgcctcgggcgcgtcctcgcgcggcttttcgtcccggggcttctccgcctgcggcgcttctttgggcgcggcctgcacctggtcaaagtcgtactcgcggtactcgggcgcgccgtccttgccggggtagcgcacgcgcaccttctcccgcacgacggagatctcggccacggcgccgcggccgtccggggtgagcacctccttgcccacgcggggcacgcggcggtaggcctcctcgtagttggactgctcgtacttcaggcagcacatcaggcggccgcacaggccggagatcttcgtcgggttgagcagcaggttctgctccttggccattttgatggatacgggctgaaagtcgcccaggaacgtgcggcagcagatgggccgaccgcaggagccgaggccgccgatcatcttggcctcgtcgcgcacgccgatctgcctgagctcgatgcgggtcttaaagatcgaggccaggtccttgaccaattcgcggaagtcgatccgcccgttcgccgtaaagtagaagatgatcttgctcaggtcaaaggtgtattccacgtccaccagcttcatttcgagcttgtggtgcgcgatcctctgctggccgatgacgaaggcctcggcctccttcttctcattgctggcgacgcgctggcggtcctcctcggtcatcacgcgtaggacgggcttgaggggctgcaccacctcgtcctcctccacctggcggacctccgtcaccacgtctccgcactccatgccgcgcgcggtctccacgaccacctggtcgccgatgtgcagctccaggccgttggggtcgaaataatacatcttccccgcgcgcttaaacgaaacaccgatcacggttgtcatttttctgcgccctccacgattcttctgagcaggggttccgccgccgagcgccactgcacatgcgcgtggacgcgcttgcgcacggtcaccacctcttccataatacaggcaacgccctcgattgtaaagtgccgggcaaattcctccagctcggactcgatctgcgcgtcaaagggcgcaaggcccgactgcacgcgcacgatgtcccgcaggaccgcctccatcgcctccaggaacggcaggctgtcctccggcttgcgccgctcctcccaggcgagggaggccttggggatgtccgccttctcgcgcagggcacgaaggagcgccacggcctcgtcgcggcagcggtaatacgggtcctgcccgcaaagggcgatggcgcggccgagcacgccctcgctcaggcgcgccgcataggcggcccgctccggcgtttgtccgcgcaaaaggagttcctgccggatcgtctcctccggcaggcgcggcatgtagacgggccggcagcgcgagcggatggtgggcagcagcgcctccgggtgcgcggtgagcaggaagaacacggtctgcccgtccggctcctccagcgtcttgaggaaggcgttctgcgcgggctcgttcatcttctcggcctcgtgcaggatcacggtgcgccgcccgccctcgtagggcttttccgaaaggccgtcgatgaggtcgcggatctccttgacgggcaggaccgccttgtccgtgcgcacctcgacgtggtccgggtgcgtgccggcgagcatgcgcgcgcaggggccgcaggcaaggcagggcttctccccctcgcccgtgcagtgcagcgccatggaaagcgccatggcgagcgtctttttgccgcagccagcgtcgccatggatcaaaaaggcatggacaaccgagcctgactggaaggagcgcttcagctccgccagcacgcccggttgtccatgaatttgtgagagtgtaagggccatcttttacagcttgatgaactgctccacgttgagcacgaacaccgtcgcgccgcccaccatgacctcgatggggtagggaacgtatacgcccgtcgtgcccgcaacgggggagggcgaagtcgcgatctgcttgcggctcttgcagaccttttcgatgacgttcatcgcgccctggaacttttcttcgtccacgccaagcaacagcgtggtgttgcccgcgcgcaggaagccgccggtggtcgccagcttggtcacactgtagccttcgttcatcaggttgctgaccaggcgggccgcgtcctcatcctggacgattgcgataatcaacttcattgtcagacccccttaacgcttcattggttcttatattgtattatacagcataatgggaagaattgcaaacgcttttgcgcagattgtaaattttttattacgccccgtttcctctccccctgctgccgctcagcgccggcgcttgaccgagcgcacgggcacgctgaactccaggagggtcttcccggtcagccggtcgcgggcgacggtggtgttcgcctcgtcgcgctccatctccaggtatccgctcagcgccgcgagcacgtccagctgcatgagcgcaaggtcccgggcggtcacggtggttctgtcctcgcgcagcacgctgctcagccggctgcgggccacgtcctttgtcctctctcttccgagcatctctctctcctcgctttctttcagccaaatttcaacaagagtttgcggaaaaacccggcgctcgtcagctcctggaaggggacctcctcccccatcaggcgcgacgcgatgttgcggtaggccagggaaacctgcgtgtttccccgggcgacgggctcgcccaggttccccgcgcggatgacggtctcgtcgtccgggatgacgcccagcaggtcgcaccccaggacctcgagcatgtcgcttgtggacatcatgtccccgcggcgcaccatgccggcgcggatgcggttgatgatgagcctgggcgcgggcaggtcgtaggcgcgcaggatgccgatgacgcggtccgcgtcgcgcacggcggagacctccggcatggtcacaacgaccgcccggtttgcgccggccacggcgttttggaacccctgctcgatgccggccgggcagtcgatgagcacgtagtccgcgccctgcacgagctcgccgacgagggcgcgcatctggtcggcggtgacgacgtttttgtcgcgggtttgggcggcggggagaaggtgcagccggccaaagaagcgcgggtcctccaccagggcctgccgcaggcggcacttgccctccacgacgtccaccaggtcgtagacgatcttgtcctccaaccccatgacgacgtccaggtttctcaggccgatgtccgtatccaccagcatcacgtgcgcgcccttgagcgcgagcgccgcgccgatgttgagcgtcgcggtggtcttgcccacgccgcccttgccggaggtgatgacgattgcctcccccactgcgtacccgctcctttctccttgcggacaggtctcccgcttttccgggaaatgtcctctttccgttccacaaacactatacctgcggcgcgcacatcccgcaaggcgacatgacattttcggagaaaacggtgcgttttccgacaggccgacgcacatttccggttgcggattttcccgctttgtggtaaattgatcgcagaagaaggggaggaagagaatatggactgcgaacgcctgccgtttgttcccgatacgcccaacgacgacctggtgcttttgcaccaataccgcgtatccgaaacctatgcgctgcaccggcatgaattttacgaggtgttctacgtattgcgcggccaggcgctgcacgaaatggacggttcctcccaggtggtttccgaggggacactggtcttcatccggccggacgacgcgcactgctacaaggtcctgaactgcgacgactttgaattcgtcaacgtcaacatcgcggggagcctggccgcgcaggcctttcgctggctccgcattccgcaggagagctttgaccgccccaagctcccgccgagcatccggctcctgggcgcgcagcacgaggagatgcagcgcaagttcctggagctctcgcggatgagccccgggccggagcggcgccgcagcttctgcgcgctgatcccggaggtgctgctgctgctcttcacgcgggcggacatggaaaggacccccgtgatgccgccctggctcacggaggtcctgcaaaaactggacgatcccgcctgcttcacgcaggggctgcccgagctcctgcgcatgacgccctacacgcaggagcacctgacgcggtccttccgccgctacgtgcacacgacgcccacggcctacatcaaccagaagcgcctgaactacgcggcttcgctccttgcggaccggagccttgcgcccgccgaggtcgcgcagcgcgccggctttcacaacctcagccacttctatcacctcttccgccagcagtacggctgcacgccgctgcagtattccgcgcggtatcgggacgagcagagcgcgcagtcgcgctatcttgcggccatcagccgccgcgcggagcgcgcctgcgcgatctacggcgcggcgcgcatcccgctggagggcggtctgttcgcgcactacgcctcggccgggcgcacgcacatcttcctctccctggagcgcgacgtctccgaggaccgcctggcggaggtgtttgcgcgctgggacccgcgcctgacgcccggcgcgctcctgcacatcaaccgcgaaaacgcgtcgctcttccactcgatctgcaaaaagtacggccgcgcgccggtcgccgtgcgccgcgaattcctcctgacccgggagcgctttctgcgcctggggcgcgaggaggggcccgcccgcctggagatgcggaccgccctgtccgcgccggacgtcgcgccgctgctgtttgcagccctgcccttcctctcgccggaggacgtgcgcgcgctgagccaatgccgcggctttgtcgcgcgggtcgaggaggcggtcgtgggcgcggtggggctctccgcggagggcgtggaggttctcgccgtctcccccgccttccgccgccaggggatcggcacgcagctgctgcgggcggcggccgcgcagttctttgcggacggcggggacctctgctccctctccctgccggaggaggcgcaggaagggctcgcctttgcgcgcggcctgtccctggcgcagaccgggcacgaggccgtctttgcgctgtaacgggcaaaaaaacatcgccccggcatccgaagatgccggggcgtctcttttgatcttatcgcgcggatttgggcttgcggaagagctgcgggttggtccgcacgatgatgatgccgtagatgatcatcgcgaggatggcgaccaccgtggcgacggtcagcacgtaggtgtgccagggcgcgacgatgtccgagaagaaggagagcaggaccgccgcggtgaacaggacggtggcgagcttgccgaagaagttggccggcagcacgatgtccttgcggtagagcagcgcgccgatggtgatcatgctgcactccttgacgcagatgacgatgggcacccacagcgggatgcgccccgtggcgtacaggcagaacagcgtggtcatgagcatgagcttgtccgcaagggggtccatgaccttgccgaactttgtgaccaggttatagcgccgggcgatgtagccgtccagaaaatccgtaaactccgcgagcagaaagaacgcgagcgcccaatagggcagatctgccgcgaaaaacgcgatcacgacgggaatcatccccatgcgcaggatggtcagcaaattcggcaaattcatgtagaatccctcataccttccggaaaatgttttttgggggaaaaagaatgcaggctgtggcaaacgccaaagcctgctgattcggtttcccgaaacaatttggtcgaggtgacaggatttgaacctgcgaccttttggtcccgaaccaaacacgctaccaaactgcgctacacctcgaaactggagccaacaaagggactcgaacccttgacctgcagtttacgaaactgctgctctaccgactgagctatgttggcgcgtcatctcaagcaccgacactcatggattatagcaggttgtttccgatttggcaaggggtctttccaaaaaatctgcaaagtttttttccaggctctgtccgcgtcgggccggcagctgccgtgcgcccgccggatgcgggcgcacggcgccggtccaaaggtcagtagccccagtatgccgaggcgcactgcgagcaggtggacgccgtggagctgctgctggacccgcagcaggtcgtgctggaggaatccgagcagcaggtcgtgctcgtttcgccgctcgtgcagcagcaggagctgtcgtcctggctgcaggagcaggagcagccgcaccggttgcagcagccgcagcggttccaccagttgcagttgttccaccaattgcagcgccgcgcgctgcagccgttttcgcagacgatgccgcaacccaccgtgcggatgcagccgcccgggcaagtcgtggtgtaggggatctgcacaatgccgccgttgcaagaagaacaggccatattcaaaacctcccggtttcccatctgttcccatcttgtggataggtatcggcgaaaaaatcttcccgccgatacatcctatgcaccggcgggaaaagttgctataatggaaatggaaaaaagaacttcaggagggttggccatggaacgactcaacaaactcaaggaacgcctggaaaaaatcggctacaccgcaaaggtctttgcgaccggcgaggaggcgaaagcctacctcctctccgccatccccacgacggataccgtgggcgtgggcggcagcatgaccgtccagcagctcggccttgcggaggcccttcgcgcgcgcggccagcaggtctcctggcactggggcgtgcccgccgaccaggtggcggagatgcgccgcctggcctccaccgcggacacctacctctgctccgccaacgcgatcctgcccgacggccgcatcgtcaacatcgacggctttggcaaccgcctggccgccacgctctacggccccaagaaggtctacatgatcgtgggcgaaaacaagctcgccgacaccctggacgcggccatggaccgcatcaagaacgtctcctgcccgcgcaacgccaagcgcctgaacctcaagaccccctgcgcggtgctcggccgctgcacggactgttcctccccggaccgtatgtgccacgccacgctgatcctggaccgcaagcccaacgcccaccccatggagatcctccttgtggcgcaggagctcggctactgaggaagggagaagcgccatggcatactggatctggtttccgcacgacttttccatcgacctgcgcggccgtgtggagatgcgccgccaggagcacggcatgacctgtccctcgatctggcgcatggacgcgccctcgcgcgccgtcgccttccgcagggcgtacaccctggacgcgccgggccgcgcgcgcctcttttcccagggcgaggcctacgtctgcatcgacggcgcgtccatcccggaccgcgcgcaggagatcgccctgcccgcgggcagccacgtgctcacggtctcggtgatgagcctgacctcgctgccggcgctctacctggagggggacgtggagacggacgggagcttcttcgcctgcgagaacaacgtggacttcgtcccttgcgggtggtcgcccgcgttctgcgcgcccgacaagcggcccatggactactgcctgcccacgcgccccctctccccggccggccggacggaagagggcctgatcgactttggccgggaggtcttcggcttcctgcacctgaccagcgccgcgcccggcgcctacaccgtctactacggcgaatccgccgcggaggcgctcgccggcaagcagggcgaaacctgggatgcgggcgcgttcctgcgcgcgggcgaggaggtccgcctgccctcgcgcgcgatgcgctttgtccgcgtggacggcccggccgacctttcggccgcgtggctggaggaggagtacaacggcctgccctggcgcgccgccttctcctgcgaggacgagcgcctgaacgcgatctacgacgtctccgcccgcacgatggagctctgcacgcgcgagttcttcctggacggcatcaagcgcgaccgctgggtctgggccggggacgcgctgcagtccgtgctcatcaaccactactcctatctggaccgcgccacgacccgccgcacgctcgccgcgctgcgcggccgcgatcccttcaatcagcacatcaacaccatcctggactacaccttctactggatgatcgccgtctgggaggactacttctacacgggcgatccctcgttcctcgcggggatgtacgaaaagatggtctcggccatggactacacgctgcgcttcacctccgcggacggctttgtcgtggggcagaagcgggactgggtcttcgtggactgggcggacatgcgcaaggagggcgagctctgcgtcgagcaggtgctgctgtggaaggcgctgcgcgtcttggcggacagcgcggcggtcctgggcaaggctgcggacgccgcggcctatgccgcgcgggccggcgcgctgcgggaccgcatcctcgcggtgttctggtccgaggagcagggcacgctcctgcaccagcgcgtggacggcaaggtgcaggggcacacgcgctatgcgccgctgttcgcgctgctgtacggcctcctgcccgaggacaaggcgcgccttgcgacggagaacacgctgctctccgacgcggcgcccgccatcaccacgccctacatgcgcttctacgagatggacgcgctcctgcgcgccgggcgcacgcgcgaggtgctcgagggcgtgcgcgcctactggggcggcatgctggacctgggcgccacgagcatctgggagcagttcgaccccagcgagacgggcgacgagcactacgccatgtacggccggcccttcggccgcagcctctgccactgctggggcgcggggcccgtctacctctgcggccggcacatcctgggcgtcgcgcccacggcgccgggctacgcgcagtacgaggtttgcccgaaccccggcgatctgcgccgcgtcgagggcaccgtccccacgccggacggctccctctcggtgcgcatcgaggacgggcgcgtccgcgtttccagcacctgccgcggggagggcgttctcctctggcagggccagcgcgcgccgcttcccccctgcgcgggcccggagcccgtcgtcgtcgagctgtaaggcaaaagaaccgcccgcccccttgcagaagggagcgggcgattcttttggtaaccccttttttgaaatccgcattggcagcgcgtgcgcctgcgaagggggcgcgttagcgcccctgcaggccgagcgtttgggccacaggcccaataagccggccggaaccccgaaccgccagcggcggggcggggcgaagccgaagggggcgcgtcagagcccctgcaggccgagcgtttgggccacaggcccaataagccggccggaaccccgaaccgccagcggcggggcggggcgaagccgaagggggcgcgtccgcgcccctgcaggccgagcgtttgggccgcaggcccaataagccggccggaactccgacccgccagcggcggggcggggcgaagccgaagggggcgggcgattcttcgttagaacccgtgcgccagggcgtattccgtcagcgcctggccgatgagggcatgtccctcggcattggggtggatgccgtccacgcagaggcggcgcaggctgtcccctgcgcgctcgaacgcgccgcgcacgtcgatcaggtgcgcgttcacggtccgcgcgacctggcagaggatctccgaatacccccggtgcgtgcggtagatgcgctccacgtcccccagccacctcaggacgttctcgcccttttccaggccgcgcgtgacccaggaaaagtaccgctcggagtcgatgggcggcagcgtcagcaacacggggatcagccccgcgccgcgcgcgtcgcgcaccatctgcgccatgttctccgcgaactgctccggcaggacgtgcggatcgtgccgctccttcggcgtttccgagatggcgacccaatcgtaatccacgtcgttgccgccaaagctcagcagcaccgggctgccgggctctgcgctctgcaatccgttctccagggccaagcgcccgcgctgcgacgtcatgccgaagcgcgcgtggttctccatctccacgtgcagcgcctccgccgcgcgggaaaacccgctgcgctcccgcaggcccacgtaccgcccgcgcgcggcgtcgaacacgattcccttcgcgatggaatctccccagacatataccttccgcagcatgctctcatctccccgtcatctagttttcaagattagattatctcttttgtgcgccgttgtcaagtgttttttcttcgcacttgtcccggactcctttttatgttacactgttcttcagaggagtatgcagagaggagctgaaccgtttgcagcaagaggatctgcggccctgggccgaacaagtgaaagcctaccacatgccgcgctacgacgaacttccggcgatcgacctgtacatggaccaggtggtcgccattctcgaggactgcctgcgccttttccttcgcgacgcgcaggagaagcgcatcacgcccgccatgatcaacaactacgtcaagctcaaggtgctgcccccgcccgtcaagaagcggtacacgcgggaccacctctgccagctcatcctgatctgcctgctcaagcaggtgctctccctgccggagatccagcgcctgatcgccgcgcagctcgagacgcgggacgtgcgcgccatgtacgacggcttctgcgccatgcaggagcgcgcggtcctttcggccctggagcgcgccgcggcgcaggcgggcggggatcgctccgacatggcgctgcgcatcgccgcggaggccaacgtgggcaagatgatcgccgaaaagatcatggacgtccacttccccgccccctcgcgcgagaaaaagcgcgaaaaagaatagacggtttccggagaaggcccccttgacagggggccttcttgtgtctataatgtgcttgtacgataagtacactaaatgacaaaggagggaccgcatggagatcctcatcagcaccagcacgagcaagcccatctacgagcagatcacctcgcagatcaaggcgcagatcatgagcggcgccctgcagccgggggaggcgctcccctccatgcgcgcgctggccaagtccatccacgtcagcatcatcacggtgcaaaaggcctacgaggacctgcaaagggacggcttcatcgaaacgacggtggggcgcgggacctttgtcgccccgctgaaccgcgacttttatcaggaggagcagcagcgccaggcggaggagcacctgctgcgcgcagcggacatcggccgcacgagcgggattccgctggagacgctcctcaaaattctgacgatgttctatcaggaaggggaatgaccatggaagccatcttgcaggtggagcacctgacaaagcgctacccggactttacgctggacgacgtctccttctccctgcccaagggagaggtcatgggcctgatcggcgaaaacggcgcgggaaagagcaccaccatccacgccctgctcgacctcatccgccgggatgcgggaaacgtgaccttctgggggcaggcgctttccgcctccaagccgctgcgggaggacatcggcgtggtgctggacggcgtgaacttctacgagacgctgacgcccgagcaggtgggcaaggtctgccgcgcggcgtaccgccagtgggacgccgatctgtaccgcagctaccttgcgcgctttgccctgcccccgcgcaaggagatcaaggcgctctccaaggggatgcgcatgaagctgctgatcgccgcggccctctcccaccggcccaagctcctgatcctggacgaggcgaccagcggcctggaccccgtcatgcgggacgagatgctggaggtgttctgggactttgtgcaagacgaagagcactcgatcctgatgtcttcgcacatcacgacggacctggagcggatcgcggaccgcatcacctttctgcaccggggaaagctcctcttctgcaagcccaaggacgagctgctcgaccggtacggcatcctgcgctgcggcgcggcggactttgccaagatcgacaaggcggacatcctcgcctgccggcgcgaggactatcagtggagcgtgctggtcgcggacaaggaggcggcgcggcggaagtaccggccgcaggtgctggacgacgccacgatcgacgacatcctcctgctctatgtgaaaggggagcaaaatcgatgaaaagcctggttctcaaggatctgttcaacatcgcgcacaacgcaaagtccatggcgatcatcctgctgctgttcgcggcgatcttcatcccgtcctccggcgcggaggggtacctcttcatcagcgcgatcctgtgcagcatgatgatcgtgaccacctttgcctttgacgacgcgtgcaagtggccgcgctacgcgctcaccatgcccctgagcaagcgcgacctggtccgcggaaagttcgcggtgctcgccatcttctgcacggtggggacggtgctcggcctgctcctcggcgcggtgggcgggctgctggcgcgcaaggtttcgctggaggccctcccctcgctctgcttcctcgcgctgcccgcctggggcttcgccatgctgctggggagcctgtccatcccgctcgtcttccgctttggctccgagcgcgggcgcatcctgctgatcctgtcgttcatcgttcccgcggggctgttcctcggggcgcaccggctcctgctcctgctgggcatcgaattgaccggccaggtcgtgctcgcgctgctgggggttcttcccctgttcgcgctgctcttcggcctgctcatggagcaggtcagcgtgcgggtgttctcccaccaggaggtgtagcgcatgacgaacgcttcggaaacgcgggcgccgctgggaaccctgcgcgcgctcctctccatcctcctcgcgatcgcggtgctcgtcgcggcgcagacgctggcgctcctgctgggcgaaattctgctcggcgccggcgtccccggcccggcgtgcaacgtcctgaccgccgtgctctatgtattgttcgccctgggcggcgcggcgctgctgtgccggtttgtgctccatcttcccctggcggcgctgcggatcggccggctccggattcgcccggtctgggcccttgcggcctttgcgctgccggcgctcgtgctcgccggcgcgatcctggccggcgggcgctgggaggtccatcgctttgacgcgcagaccgtgtggctcacggtgacgggcggcgtgttctactacgggctcgcggcggggatcgtcgaggaggtgatcttccgcggggtgattctgggatgcctggagcggcgctggaaccgggagatcgccgtgctcgtcccctccgcgctcttcggcctggtgcaccggatcggcgcgtccctggacctgcccagcaccgtgcagctcctcgtggcggggccgatcgtgggcatcctcttttccctgatcgcgtgtgagagcggttccatcgggaacagcgcgctcgtgcacggcgtctggaacgccgccctcctcggcggcatcctccacatcgggagcacggcggacagcgcctcgatgtacaacttcgtcctgacggacgcctcgttcctgctctccggcggggactttgggatcgaggcctccgtgctcgccatcgcgccctacctgctgggcatcctgctggccgccgttctgctccatcggaagaacaaggaggggatcgtatgaagaacaccgcgcgctgccccaagtgcgggtcgcacaacctcgtgcgcgttccggacgacgcgcaccggtacctgggcaacagcatctccatcaccaaggtggtctgggtcacgcgggtgcccgtggcgcgctacgtctgctgcgactgcggctatgtggaggactgggtcgagacgcaaaaggacctggagaccctgcggcgcgagtattcccgctgaacgcaagaaagccgccggcgctgccggcggctcagcttgtcgataaacctcttgctgaaaattgggcaatgaaaataacgtcgggattcccgggcatgtaccgggaatcccaacgccttgacagaaaaaaacagccgattttgtgtgcgcagtgcgcaaaatcggctgttttttcgccggaaaagggtactgggggaaaccaaaaagcatcccccgcgcatcgcgcgggtggtgcgtttggtgtccctcaggaggctgtcgaactttttcgacaggctgagccgccggcgctgccggcggctttctttgctgggggttagttcttttcaaaccggccgccgacctggctgccgaaggtgtagccctggcgctcatagaggttcatccaatcgcgcatgcgggtggtgaagtcgcgattggtgttcgtcttggacatgagggacaggagctggtccgtggcgtcggaggtgttggccgaggagagcagcttgcggatgctgaaggcgcactcgagctcctccttgctcagcagaaggtcctcgcgccgcgtgccggacttgttgaggtcgatggcggggaagatgcgcttttccgagagcttgcggtccaggtggatctccatgttgccggtgcccttgaactcctcgtagatgatgtcgtccatgcggctgccggtctcgatcagggcggtggcgatgatggtgagcgagccgccctcctcgatgttgcgggccgcgccgaagaagcgcttgggcttgtggagcgctcccgggtccaggccgccggacagggtcctgccggtgggcgggatgaccaggttataggcgcgggccaggcgcgtgatggagtccatgaggatgacgacgtcgcgcccctgctcgaccaggcgctgcgcccgctcaaagaccatctccgagacgcgggtgtggtgctcgggcagctcgtcgaacgtggagtaaatgacctcgccgctgatggagcgctgcatgtccgtgacctcttccgggcgctcgtcgatgagcaggaccatcagctccgcatccgggtagttggtggccagggagttggcgagcttcttgaggaggatggtcttgccggccttgggcggcgcgacgatcagggcgcgctggcccttgcccacgggcgcgatcaggtcgatgatgcgcagcgccaggtcctgggaggcgccctcgcactccatggtgtagcgctggttggggaagatgggcgtcagctcgtcgaactcgcggcggtggagcgcctcctccgggggctggtcgttgatggccgtgatgtagagcagcgcgcggttcttttcattgtccttctgcggccgcgtcttgcccgtgatcttgtcgccggtcttgaggtcgaacttgcggatctggttgatggcgacgtagacgtcgtgcgcgccgggcaggtagttttccgtgcgcaggaacccgtacccgtccgcggtgatctccaggatgccctcgcagtcgccgcaggcgccctcgctgagcatctggctgacggcgggcttgatgtcctcggagaacaggggcagcacggcggcgctctgcgcctcgcgcaggggctgcacgcccggctcctccacctggacggcgatgtcctcctgcgccaggggctcggcgtaggtcggctcctccaggcccagggcgtcctggctgcggtccttcttctggcggccgccgcggcgcttgggcggcgcggggaggtcattttggtccaccacgatcccgtttttctccatgatcttgagcacgagctcgcgcttggggtaggtggtgggcgagtccacgcccagctccttgcccatggttcgcagctcctgcagcttcatggactccaattcctgaaatgtcactgagattctcccttctgagcgatgtgaaaaaaagaaatgcaatgcagccgccccaaagagatgggcgccggtttattgtatgcgctcccgctggggatttataccgggagcaccggcaaagggacggccggtctgtcaggattccttgccgggccagcgcgccacggcgatgtcgcgggtgatggcctgctccacccagtgcgccatgtggtcgtagggtccgccggtcaggggcacaaagccggcccgctccagcatctgccgcgcctgctccaggggcagggtgttggcgttgaaggagagcgcgaccgccgcgcccggcagcaggaccttctgccacgcgcgcagggcgcgggccatgagcttgtccagggcgaccttgctctggccgtcccggctctcgtgctgcacgccgtagggcaggtcgcacgcgagcgcgtggaaggtgcgccccttgtagaaccggtcggtgagcagggtgtcgcccagggtcagggtgagcgtgcgcggatcttcgcgaaagcgctcggcgttttcggccagggtaaagcgcgtgcgcgtgcccacgctcttgccgtccgccgtcatggaggaggactccacgcggtgcttcaggcggttgtgctcgcagtatttcttgaggaacttgcgcacctccgccacgtccgtcttgtcgatctccacgccgctggcgtcgtagtcgcggcgcagcgcctcaaacagcgtggtcccgcggccgcacatggggtccagcacctgcagcggccggtcgaaccacttggcgtattccgaggaaaagaccgccaggttcaccagcatcccggtgaacatctcgttcgtctttcccttgtacttgagcacgccggagaggtccccgccaaagcggagctgcccgccgggctgcaggggcacaagcgcctccccctgcacggcaaagaccgcgtatgcgcacgagaggcgggacagcagcctgcgcagccggtcgtccacctccgcaacgtcaaaggcgcagaactcgatgccctgcatctccaggttgcgcacctcgatctgctcgtcgaacgtgtgcagcaggatctccatctccgcagcggcgagccgcttcatcgattcaaaatagcgaacgttggcgtgcggccacaacagcaccgcaatggtcatcgcttcattcccccaagaaaaacatggatgttgagtacacacaatcagtatagcacagcgcaaaatcggtcggcaaggttgattcatgttaaagtttgcatacaaaatggaaagaatgcaaaaaggggaaggcggattcctccgcctcccccgaagggtctttgtttattcctgcgtaccgctctcctcgacctcggccagggtgacctgcaggtccagcgtctcgccgctgcgcaggaccgtgatggtcacggtgtcgcccacgtcgtgcgagtacagcacggactgaaggctgctgaaggacgtgacctgctggccgtcgatggcggtgatgatgtccatctgcttcatgccggccgcttccgcgggcgagccctcgttgacggagacgaccaggatgccggggtccatgttggagaagtggacttcccggccggtgatgcccaggcccggacgggtgatcttgccggtggcgatcagctcctccacgatgtccttgacgtcgttgatcgggatggcaaagccgatgccctcgatggtggagccggaagaggtggagccggaggtcttgcgggagttgatgccgatgacctcgccgtcgacgttcagcagcgcgccgccggagttgcccgcgttgatggccgcgtcggtctggatcatgctcaggtaggcgccgtccacctccagggtgcggttggcgtagctgatgatgccgtaggtcgtggtgccgctgagctcatcgcccaggggggagccgatggcgatggcgaactcgcccgtgcggacctgatcggagtcgcccagggtcgccggggagaggtccgtgcggtccaccttcagcagggcgatgtcctgcagctcgtcgccgccgatgacctcggcctcgatctcctcgccgctgtgcagcacgaccgtgacgcgggacgcgccctcgatgacgtggtagttggtgatgacgtagccgtctgcggagtagatgacgccggagccggagcccgccagctgctcaatggtctggggttcgctgtccccgccgccgtagtaggggaagtagaacccaccgaaatacccgccgtagttgccgccggtggtgacggtctggtagttgtggatgccgaccacgctgtcctgcacggacgccacaacgtctgcaatctggtcggagagggccgcaagcgacgtggtcgctccgccggaaacggcctgcgcctgctgggtgggcgcgggggtcgcggtggcctccggcgtggcggtggcctcgctgccgagctgcgcctgctggctgttcatgccctgtacaatgacgacgccgagcaggccgcccaggatcaacatcaccagcgcaatggaaacaatcacaacggcattgctgcggcggccattgcggtttcctccgccggaaaaatcattgggattgtttgaattgttcggatagccattgtagttggaataattggtattattgtcatggaaattgctcatacaagacgcctcctaatcttgcttttcaaattctgaatacagtataccccaaaggatttgcaaagtcgtgaacgccgtatgaacattcgtaacgcttttgctacttttttgttcccgccgcagccgccatatccagggaaaacgtaaaattcgtgccctggccctgcgtgctctcgacggtgatatcatgaccgtgctgcagcaggatttgcttgacgatggagagcccaaggcccgtgccctttccggaggtgtgcgccttgtccaccgtgtagaagcggtcgaacacgtggggcaggtccttttcgtcgatgcccgcaccgtcgtcgatcaccgagacggtgcagatcctcttttccaccttggtccggagcgtcagcttgccgtactggccgcagaacttgatggcgttgtccacgaggttggagaccacctgctcgatgcggtccacgtccgcatggaccgtgcagggctcgccggcaaagtcggcctccacctccatgttcttctcctcgatgcggccctcgtacttgatgagcacgcggcgcatgagctcgttgatgttgaagtctacggggttcatgggcacgttgcccgactcgatgcgcgaaaggtcgagcaggtcgcggatgagccgcgtcaggcgctgggtctcgtcgtagacgacctgcatgtacttgcgctggtcctggggggggatggtgccgtccagcatcccctgcaagtatccggcgatggaggtgatgggcgagcgcagctcgtgggagacgttggcgacaaagcccttgcgctgctcctccatgttcttgagctcgtcgaccatgttgttgaaggcgcgggagacctcgccgatctcgtcgtccgagtagacgcggaccttgacggtcatgtccccctggccgagctgctttgcggcgtgcgcgagctcgcgtaaggggcgcgtgatgcgcatggcggtgtacgcggtcaggatcaggcccagcaggctcgccagcatggccgccgtccacagctcctggaacaggggcacaaaccccgtgttgaagagctccagccgcttgtggatgaacacggcgcccaccgtctccccccggctggacaggggcatggccacggtgatgacagcgttcttcccaaagtagctgtcaaacccgccctggatggtcatgggctcgccgctctggagcacgacctgcatgtacttctgcacgtcctcgctcgtaaggtccggcgtggaagcatccagtcccgtcacgttgagctgcaatccgttgcggtccaccagccatacggaggagtccagggcgatctcgttgatgcaggagacgaagacgcgcgtggtgatctggtagtcggagaggtcctcgtagttgcgcgcgatgtcctccgcctcccgcttcatctcctccacgcccgtgttgagctcgttgatccacatgaagcgggagaccagcgcgcccagcaccagcagcacgatcatcagcaccgccatgaaattgaccgacagacgcaaaagcagcttgtggaacatggattacttcacctcgaacttatagccgacgctccaaatggtcttgatgtgccagccgtactcctcgcagccggtcagcttttcgcggatgcgcttgatgtgcacgtccacggttctggagtcgccgaagtagtcaaagccccagacctgctccagaagctggtcgcgcgtgaacaccttgttggggtgcgaggccaggaagtagagcagctcgatctccttgggcggcatctcgatgtccttgccgttgtaggtgaccaagtacgtgctcatgttgatgaccaagttcgggaaggcgatctcccgctcgggcgccacgaccgactgcgtgcgccggatgacggccttgatgcgcgcgatgagctccttggggtcaaagggcttggtcatgtagtcgtccgcgccgagctccaggcccaggaccttgtcgaacgtctcgtcctttgcggtcagcatgatgatggggatggtgctgatcttgcggatctcgcggcagacctgccagccgtccatgccgggcagcatcaggtccagcaggacgatgtgcggcgggttctttttgaagaggttcagtgcgtcgtcgccgcgggtcgcggtctcggtctcgaacccctccttttccagatagagcttgatgagctggttgatgttgggatcgtcgtccacgatgagtacgcgcgtgttttccatgttctttccactcctttttgtctctccaaagagaatcgtcgtctatttgagcgtcacgatggtgacgccggtctcgccctcgccgtagcggcccaggcggaactcggccacgtgcggatggtggcgcaggtgctgcgagatctcgctgcgcagaaccccggtgcccttgccgtggacgatggagacctcgctgacgccggccatcatgcagtcgtccaggtacttgtccacgttgtcgagggcctcctcggggagctggccgcgcacgtccagctccagggagacctggggcgcggcgaccttgatggcgcggcggcccttctccttcttgggcgcgtcgctctgcgcggcggtccgcagcgcggagaggggctgcttcatcttcatcaggcccacctggagctgcacctcgccgttcttgtccggcagggtcaggaccgagcccgtgcagcccaggctcgggatgcgcacggtctggccgagggtgacgctcttgagcggcgcgccctcgcttgccgcgctctccttggccatgggctcggcgagcttgtccaaatcgccctggagcttcctgcgcgcctccaggatctcgcggtccttggcgttctgctcctgcgcggccttcttgaggtcgcggatgatgccctcggcctcggcctgggcgctgtgcaggatgcggcgggcgtcctcgcgcgccttgcgcaggagcttttcgcgctgctcctcgagctttttgcgctcctgctcggcctggtcgcgcaggcggacggtctcgttgtgggcctcctcggcgagctcccgctcgcgctcggcggtctggcggtgcatttccgcggtggtgatgacgtcctcaaagcggatctgctcgccgctgagccactccttggccgcgccgatgatctcctcggaaaggccgagcttgcgggagatctcaaaggcgttggacttgcccgggatgccgatggagaggcggtaggtgggtcgcagcgtctcgacgttgaactccacggaggcgttctccacccccgggtgcgtcagggcgtaggccttgagttccgagtagtgggtggtggccagcgtcctcgtcttgtaggagaggagcttgtccaggatggacatggccagcgccgcgccctcggtcgggtccgtgcccgcgcccagctcgtcaaagagcgcaagggagcggggcgtcacgttctgcaggatgtggacgatgttgaccatgtgcgaggagaaggtcgagagcgactgctcgatggactgctcgtcgccgatgtccgcaaacacgtcgtcaaagacggcaagctccgtgcccagcatggccggcacctgaaggcccgcctgcatcatcagggtgaagaggccgacggtcttgagcgtcacggtcttgccgccggtgttggggccggtcacgaccagggtcgtgaagtccttgccgatccacaggtcgctgggcacgaccgcctccgggtcgatgagcggatgccggccgcgcttgatgtcgatgtagcccgcctcgttgatcttgggctgcacggcgcgcatctgccgcgcgagcgcgcccttggcgaagatgaagtccagctccgccaggattcgctggttctccagcagcgcgccggcctcctgcgagatctcctcggaaaagcgctggaggatcttttcgatctccgcgcgctcctcgcccatgaggccgcgcaggtcgttgttgatctccacgatggccatgggctcgatgaagagcgtggccccgctggaggactggtcgtgcacgatgcccggcacctgcgagcggtactccgcgcgcacgggcagcacgtagcgcccctggcgcatggtgatgatggcgtcctgcaaatagcgcgccatggagctggagtgcagatagccgttgagcttgtcgcggatgcgatcgtttgccgagcggatcttgcggcgcacggaggccaggccggggcttgcggagtccgcgatctcctcctcggagaggatggcggcaaagatctcctcctccaggcggcgcgtggggtacagcgcgcgcgccaggcccacaaggtgcggggtttccgtctcctccgcctcgtccttttccccgacgagcgtgcggcggacggagcgcgcggtctgcatcagccgcgcgcagagcaaaaggtccttgggcgagaggattcccccgaccttggcccgggcgacctgcgcctgcacgtcgtcaaaggcggagatgggctgcacgcccgtgcgcgccacgagcgtcgacgcctcctcggtctccgcctgcatccgctcgatctcccggatgtcgctgacggggacgagcgcggcgcagcgcgccttgcccaggcccgacgccgcccgctccacgagcatgtcccgaatcttataaaattccaggaccttgagtgatttttcctgcatggtttccaacctctcctatcattccacaccttggtacaggtgtccaaccatcgtctgttcggtttcctgcaccgcctcgccgtcgagcgcgcggcagaggcggcggaagtcctcccgcccgccgaggacgcgcagggccgcaaagccggcccgcgcaaggcgcggcccctcggccagggcggaaaactgccgctccggctgaacctgcacgcggcagccgctggcggcgcggtacggccggagcagcagcgtttcgccccggcggtccacaagggtctctcccctgcctccgcagagggagcaggtttcccgcccctgcgcgcccaggccgcgttccgcgcggatggggcagtggcgcagcgtcatccagggcacgttcccgcgcacgatcatctccatcggcgcgcgggcggcgaggcgctccgcctgcgccagcgtgcactccgcggagaccgtcacgcgctgcgcacccgcgcgcagcagcgcctgcacggcggcggaattcatcgcgcccagccccgcgtcggcgacgcaccccgcgcaaagctgcgcgacgttgttgcacacgagcgttctgcccctgagcaagggcagcgcctcgtccatctccgcatcggagagctgcggcggcagcaccaccgccgccccggcgggcaggcgcgccagcgccgcctccagggcctgcggccgccaatcgcgcggcgcaaagtagagcgcatccgcctcattcttaacggcgaggagctcctcggccgactccgactgcaggatgcgcagcgcgcgcgccggcggggtgtaccgcggcgcgggcgctgccgggcgctcccggatctcgaccggcggcgcgttgcgcgccagcagcgcgcgctcgcaggccgccgcggcctcccgccgcagggcgttgagcgcggagacgggcaaaaacgcgcccgcatccaggtcgatctccaaattccccagctccagcaccgtgtccccgagcttttcgatctggcggcggaccgccgcctcgtccaggggccggccgcgggcgggctgcacgacctcgccctccgccgcgcagccgccgagtgtgaggcgacacggctgcccgatgcgcgcggaaaaggagccgtccacgcgcgtgcgccggcgctcctgctgccagctctcctgcgcgcggcggatctgctcggcgtccgtcgtgcggaagatcgcgtccccggggcgcacgccctcgggcacgcggatggagccgtccggcgccgtctgcacgaggatgccgtggtccccgccctttccgcgcgcctcgaggccgtcgccgtcgtgcaggggcgcggaaaggcggacgctcgcgcggccgcgcgatacgcgctggacctcgcccacgcgcacgccccagtggttgggccgggcggtggccatgatctgcgcatcgtttccgccgggcgcatagccgcgggtaaagccgccgcggttgaagatggccagcagctcctcccggtcgcccggctgcggagccttgccggcaagggcgttgtccagcgcgcggcggtaggcggcggtgaccacggccacgtactccggccgcttgagccgcccctcgatcttcagggacgaggcgccggcggcaacgatcgcgccgaggtcgtccagcgcgcacaggtccgcggggctcaggaaatggcgcttcttcccctccatcgcgtaggacaggcggcagggctgcgcgcaccttccgcggttgccgctgcgcccgccgatcatggaggagagcaggcactggccggaatagcagacgcacagcgcgccgtggacgaacacctcgacctccaggcccacctgcgcgatgcgctggatctcctcgagcgtgcactcgcgggcggggacgacgcgcgtcatgcccgcctgcctggcaaaggccgcgccgcgggcggtggcgatggccatctgcgtgctggcgtgcaggtgcagcttggggaagcaggaccgaaggagcgcggcgacgcccaggtcctgaacgatggccgcgtcgatgccggccgaaacggcctcgcgcacgacggcgtagacctcgtccatctcctcgtcgcgcacgagggtgttgaccgtcatatagagcttgacgccgcgcttgtggcagtagccggcggcctcccggagcgccgggccgtcaaagtttgcggcgcctgcgcgcgcgccgaacagccggccgcccacatagaccgcgtccgcgccgttctgcaccgcggccacgagcgcctgcatctcccccgccggggcgagcagctccacttttttcacgtctttccctcctgcttccctcgtcattgccatacagtatagcactttggacccttttcacacaagaaaggcggaagaaagttcacagaatccacgataaattgattctgtggaatgctctcctccgccggatttggggttaccgcttacttgcccagcatggccgcgccgatgatgcccgcgtcgctgccgagcgtggcgatctcgatcttggcatagggcaggtccttatagaacacgtacttggccaccttctcgcgcaggggcttgagcaggaagtccccggccttggagacgccgccgcccagggcgatgatctccgggtcaaaggcgttgatgatggccacgatgccgatggcaaggtagtagatgtacttgtcgtagacctcgcaggcgaccttgtcgccctcgcgcgcggcgtcgatgacggtgcgcgcctcgatcttgctcaggtccccgttcaccatcttgacgatgaggctgtccgggttcttctccaccgcctcgcggccctgacggatgagggccgtggccgaggaatactgctcccagcagccgatggagccgcaggtgcagggacggccttcgcactgcacggtcatgtgcccgagctccgagcccacgccgtgggagccggagtagatcttgtggttgatgacgatgccgccgcccacgcccgtgcccagcgtcaggaacacggagttggcaacgcccgccgagacgcccgccacggactcggcaaggcccgcgaccgtcgcgtcgttgtcgatgaagatgggcttatcgatgatggactgcatgatctcgcgcaggggcaccatgtgccagcgcaggttcgtgcagaagatgaccacgcccgtcttggggtccgcaaggcccggaacgccgacgccgacggccttgacgtcgtccagggtgtagcccgcgtccttgacgaccttcagcgagaggttcgccatgtccttgatgatgggttcgggaccgcgctccaggagcgtgggcacgctgtccttgtgcaggatcttgccgttttcgtccacaagaccgactgcgatgttcgttcctcccaggtccacaccaacgtataccatagatgctgcctcccaaatctttgtgtgatatgtattttcgcttggaaaagcgatcttacccgttttgaatcttggccgagagcctgtcgttgagctcctgcgcgccgttgtagcccatcttcttgaggcggtggttgctggccgcgacctcgatgacgatggccaggttccgccccgggcgcacgggcagcgtgagcttggggagcttgacccccagcaccgcggtgaagtcctcgttcaggcccaggcggtcgtactccttgttgttgtcccagagctccaggtggatcaccatgtcgatggacttggagttgatgaccgcacccacgccgtacatgttcttgacgttgatgatgcccacgccgcggatctccatgaagtggcgcaccatctccggcgcctcgcccacgaggcgcacgtccgagaccttgcagatctcgaccacgtcgtcggcgaccaggcggtgtccgcgcttgacgagctccagcgcggcctcgctcttgccgacgcccgactcgcccgtgatcatcacgccgatgccgaacacgtccatgagcacgccgtggcgcgtgatgcgcggggcgagcttggcgccgatgaacatggacgcctggagcatgaagcgcgtcgtgaccaggcgcgagcgcagcagcgcgacgttgtggcgctgggccgcctccaccatctccggcggcacgggcatgttccggcacaccaccaccaccgggatgttgtaggacatgtacttgtccagccgctccttgcgcacctccggctccagggcgaggatgtactgcatctccgccttgccgatgacctgcaggcggtccgccgcaaagtagtcgaagaagccggaaagctgcagccccggccggttgacgtcgctggtttccaggttgatctcgtcgcggtcagccatgacgacgggctccagttccagcgtgtcgataaactccttgagcgagatcatgcctgtatcacctctgcaaaacgtattgttcgagtatctgggccacgccctcgtcctggttggtgggggcgatgaggtccgcgtgttcctgaatttccgcccgggcgttgcccatgaccacgcccacgcccgcgcactcgatcatgctcaggtcgttgccgctgtcgccaaagcacatgacctccccgggcaaaacgccgaatctctcggccaaatcaagcaccgccgcgccctttgtcgcgccgtggtccgtcatctccaggtagaagggcttggagtcgaagacgcacagcgcctggccgaagcgggacacggcctgcgccttcaggcgcgccatcttctccatgtccgtctgcacaaagagcatcttgaagggcggctgctgcatgtaggcgatcaggtccccgacctgccggcccatgtggttggccaggcgggcgtacaggcgcgtctcctccgtctccgcctcgaaaaagtagtcgtcctcggaatagccctggacgtaccacccgttctccttggcaaagcggacgatctgccgcgcgaggtccaggtccaccgggcgctcccggatgggccggcccgcgccgtcgtagacctgcgcgccgtttgtgcagatggcggcgtcggccacgccgatctgctcgacgtagttccacatcgagtgcttgccgcggccggttgcggggacgatgcgcacgccctgttcatgcgccgcgcgcagggcgcgcatcgtgcgctcgccgatggtgcggtcgtcgagcagaagcgtgtcgtccatatcgaatgcgatgagcttgatcgccatagcgtcctcctccggcgttaaaatcctctctcattatatcgggtaatggggaaatgtacaagcctggattttcattttgcgtggaagaaggcgtacacggcctcggccgccgggcggttcatgccgggcacgtccagcagctcctccatcgtcgcctcccggatggcgtccacgttggggaagtgggtcaggagcgcgcggcggcgcgttgcgccgatgccagggatctcctccaggcggctggcgacggagcgcttggtccgcaggccccggtggtgcgtgatggcgaagcggtgcgcctcgtcgcgcacgcgctggatgaggcgcagggcctcgctgtgctcgtccaggcggatggggtcctcgcgcccgggcaggtagatctcctccaggcgcttggccaggccgaacatggcggggtatttctccatgggcacggcgtggatggcctcctgggcgaagcgcagctgctcggggccgccgtcgatgagcaccaggtccggcaggtccgcaaacccgtccgggacccggccctcgttttgcgcctcgatccgctcgcgctcgccgcgggtgaagcggcgggagatgacctcggccatggaggcgaagtcgttcgcgcccacgaccgtcttgatgcggaagtggcggtactggttcctcgcgggctggccgttgatggccacgaccatggaggccaccgagagcgtgccctgggtgttggagatgtcgtagccctcgatgcggcggggcacaaagtccaggcccagggcctgcgccagctccctgcaggcgccgacggtgcgcgccttctggcggatgaactgctcccggcgcttgctggcgatgtcctcggcgttctttctggccatgtccacgagctttttcttgtccccgcgctgggggacgaggatgtggacgcgcgaacccttcttctcggtcaggagcttctccatgacgtccagatcctccacagcctcgcccagcaggatctccttggggatgtagggcgcgttgtcgtagtattgcaggaggaacatggccaggctctcctcctcctgggcctcggcgcgctgcatgatgaagtggtcgctgcccaggatcttgccctcgcgcatgtagatgacctcgaccacggcgtccacgccgtcgctggagacggccacgacgtcctggtccccgccggagacggccagggccttctgcttctgcagcacgcgctccatggccgcgatgcggtcgcgcagcgtggccgcgcgctcaaagtccaggttttttgaggcctccagcatctgcgcgcgcatcttccggaccacgtcctcgtgcttgccgttgaggaaggcgaggatctcgtcgagcatctgccggtactggccggggaagacgttgcccgtgcagggcgcaaggcacagccccatctggtagcgcaggcagggcctgtgccggccgcccacgccgtgcccaaaggaaaagtcgtgccggcaggtgcgcagggggaaggagttgtgcagcacctccagcacgtcgcgcacgaccgtcgcgccgatgtaggggccgaagtacttcgcgccgtccttctccacgcggcgcacgagttccacgcgcgggtagtcctgccgaaggtcgatgcggatataggggtactgcttgtcgtccttgagcaggatgttgtagtaggggcggtacttcttgatgaggttgcactcgaggatcagcgcctccagctccgtgtcgcagagaatgatgtcgaagtcgtcgatgttggcgaccatggcctggaccttgggcgtgtggtccttggagctgtggaagtactggcggacgcggtttttcaagttgatcgccttgcccacatagatgatctccccggcgcgcttcatctggtagacgcccgggctctccgggagctgggagatcttgaattccagcgttgggttcatgggtacaacctcctggggttcgtgtctagggttttgccgcgccgcgccagcggtcggcctcgtccgtggcggcctgcccttcgccgtagcgcacgcggtcatagagcgcggcaaaggcggagtccacctccgcgctcctgcacagctgctccggcgtcatggcggcggcctgcgggcaggtcttcttctgccggcggagcaggcaggcgtaggcgtagcgcacgcgctcgttcggggtcatggcgctccacttcggcggcggcgtgagcgcgcggcgcacgcggctgcggatctgccgcccgatctcccggcgcatggactccgcgctcagcagctgctcgctctcctccgaatactcctccgcgcccgcctcctgaaagcgctgcatccactcgcgcaggcgcgcggcgagggcctgcgcgcccttccacagcgcgcgcagcacaaacgcggcaagggccaggagggcggccgtggccacgatcgtcaaaatcaccgtgcccagcacctgcacccactcgggcaggggcgtcccctccccgaggccgcttaggtccatctcccccattccgccgccggactcggtcgtgcccgtgctttggccctgggggatcaggcggagcagcgcggcgagcgcgccgcggatcccgcggccgaccgcctcccgcagcgcgtcaaagaacgcaacgagcgtcagcaccgcgaggaagccccaggtcagggcctggtttccgcgcatcatccgccgcgcctggccgccggcgttcgtgcgcacggactggcggttggtcagcagcagcgacgccacgaggtagaaataggccaggacgcccacgcgcgcctgcactgcgggcaggccgttgaataggcccatgagatagaccaccgcgcagacgatgagccccgcgaccatcacgcgcgcgtctatgagctcggtttcgggctcgttccacctgcgccgcgcgcccgtgagcgccacgacgaggttcatcgcggcgagcagcaggctccagggaaagaggggcagcagcgcggcgcccaccgccgcaaggccggccgcgagcagcgcaaagagcgcgcggcgctcgcgcaggaagcacgagaccgcgtttcccgcaaagctcgcgccgcacaggagcagcatcgcgggccaggccggcgccccggccgacgcggcgacgtacaggacgacgggcgcggccgtgagcgcgaggtacgcgctgtgcaaaaggtagagcagcagctttttcatcctgcggccgcctcctttcccacgggcaggaccgtggcgctgttgccgcgggcgcgcaggcgctccacctgctggcgcagaaggtcgttctcatacccggacacgatcacgacgtccgcgtccgcgggcagcaccagccgctcgaggaagacgtggaacggcagcacgcgccggatgaccaggcgcgcgcaggcctccagcaggatctcgctctgctgcgggccggcggcgggggccaggtagaccgtctcgccctcggcgggctttgcgcagccgttggagccgaagcccacctccaggccgtcctgaatcgcgtagcacatcagggacgcggccagccggatgccctgctcgaccaccgcgcggtccgcctcgtccgcctcgtcccactgggtctcgcgcgcgacgacgttgagcaggacgacgaggcggcttgccgcggtgaagtcgtgctgcttgacctcgagccggcccgtgcgcgcggaggcgcgccagtggatgtcccgcggcaggtccccggggcggtagtcccggatcccgctgtagaggaagaggtccgggttgatgaagcggcgcacgatggcctcgccctgccagcgcgttgcgggcaggccgatctcctcgcgggagagcaggcgcgggtagaccaccagcgcgcagttcatgggccgctccaccgagctttggctcacgcccagcaggtcgcccaccgtcatggcataggaggagagcgcatagtaccccctgtgcatggcgcgcacctggtgcgtgcgccggacgcgctgccacgcgcccaggaagaacacggagcggtggtagcgctggccgccgatctccaggttctcctgccggccgaagaggagctcggtcggcatgcgcgtctcgatgcgcagccagggcaccggcaggatgcgccggttctcaatcgtctcgatcatctccaggctctcgcccgcaaagacgcgcgccttggtaaagcgccggtcgaccgcgacgccccgcagccccgcgcgctt

SEQ ID NO: 4329 - DNA, 19574 bp, Unknown
  16S sequences of unknown bacteria
ataccagcttgacggaagcactccctcaccgaccatgaccttctgtcccggctctacaagcccttcccgctccattttaaattccattctgcgcatgaaatccttctttctgtctgttcaacctctctattctacctgattccctcttcttctgcaagcatctccacacaggaaaacagaattttttcgtatctggttattttcagcttgtcatctggtatcaaagactatataatagaatgtgaggtgagaattatgaatcaggactatacaaagctgcttggatccattttaaaaaatatggcgctgatggatcacatccgtccatccgaaatcccgaatattgacctttatatggatcaggtgaccagctttatgaatgatcatctccagaattccagacgatttgaggatgacaagatcctcacaaagacgatgatcaacaattacgcaaaaaacaagctccttcctccgccgataaaaaagcgctattccaaagagcacctgtttgtactggtgtttatttattatatgaaggggtttttttctcttagtgatatccagacgattctgaagccggtcacagaccgttttgctgaatcggatgagtcgctctccatcgaagatatttatgcagaggtacaccggcttgggtctgaacacatttctgatatcagccgtgatatcatgaacagtttccacaccgctgccaattctctcgaaggctacgacggagaagaccgcgataccttacagctttttaattttatctgtctgctctgtttcgatatctatctgcgcaaacaggtcatcgaaaggctgattgattccattccggatccaccggattccaggaaaaagtaaaagcagggccgtagccctgcctttcttttattcgcctgcttctcttttatcctgcagacgggaaaataccatctcatatccgtcatttccataattcaaagaacggttgacacggctgatggtcgcagtggatgcccccgtcttctctgcaatctccagatatgtccgcttctccttcagcatatgcgcgacttcaaatcgctgcgaaagtgaaagcaattcattgaccgtacacacatcctcaaaaaagagataacactcttccttatccttcaggcacagaatcgcttcaaacagctcatccactgcctctgtccggattttcttactcataatacgataccctctcctgttattttttctgaatcacctgacttgcggctttcctctatcataacactttactttaacactgtaaagttaaatctttttaaaccgatttgtatatgtcttgtattcctcgactgagcggttaactaccagttcttccgggaaatccatagcctttaacagctcataggcatagtcatgccctccgacctcccatacattgtgcgcgtcactgtccacaataatctgcgctttgtactttttgcagagctccagcatgcggatgtcattcggaagcggctccttacgcgagctgtccggctttaaggagctgttattaagctccagaagtacatgatgctcttttgctgccggtacaaccagctcaaaatcgaccggatacctggcatcgtccggatggccgataatattcacaaacggattctctatcgctttcaggtagcctttcgtgacctcctctatactgcccggcttcaggcatggcgtatgcatgctcgcgaccacgacatccatctgctctaacagtccctgactcatatccagctttccatcataattcataatatttacttctgaaccaaacagtacctcgattccgtacatgctgcgcggaagagaacgcaaattcataaaataaaaagaatggcaggtccccggcatcgccatcgcatgatctgtcactgccagcagctccagcttctgatcgaccgctgcttttgccatttccataatcgtattgtacgcatgaccgctcgccagcgtatgcgtatgagaatccagcttatgtatcatttatttttcctttcttctcttttcatccgactgctctccatttttatatggaacaaaccttttctccctgtaaaaccataccccggcaaagcacgtagctccaccggggttcttttatcctatgatacacggattgcttcgcaatcctgtcactttgtaaatgtcgtgcactctgtctcctcacagcgacaggccgccgcgcctgaaacatccacatggtcggcgctgcaacagcagttctgattgtactggcagtgctctgcctcacagcggatgtccgcattggcagacggcgttcccatcgaattgctggcagatgtaccttggcgctccttgaagctctcgcagcaggtatcctggcatacggtcgcatttcttccacccacctcgatatctcctctgctgcagtacatggcattgttatacacacagctctgtgcagaacatactaattccggcataaaattacctccttctgaattccgtttttcggattcagaacttagtatatccactcacagatttttaattccagtcagtctttctttttttcgtcctcttctgcgactgtttcacgcagaactctggtacgaatctcttctttaatattgtcaaggaacgcatccagagtcgtctgtccctcatcaccggcaaaacggctgcgaacggatacgagcttctcttcctcttcctttgctcctacgatcagcatataaggaaccttctgcagacgcgcatcgcgaatcttgtagccgatcttctctgctctggaatctacgcttgaacggacaccttcgtcgttcagctttgcatttacctgctgagcataatccaaatatttgtcagaaatcggaagcacacgcacctgctccggagaaagccaggtcggaaatgcacctgcaaaatgctcaatcagaatgccgatgaaacgttcaatcgagccaaacgccacgcggtggatcatgatcggacgatgcttctcgccgtctgctccgatgtattcacactcaaaacgctgcggcaactggaaatccagctggatggtaccacactgccaggtacgtccgatagaatcctccagatggaagtcgatcttcggtccgtagaatgcaccgtcgccctcgtttacgacatagtctcttccaaggtcatccagcgcaccacgcagtgcctctgttgccatctcccaatcctcgtcacttcccatggaattttccggacgggtagaaagctctacgtgatatttgaatccgaacagctgatatacttcgtcgatcagttttgctacgcccttaatctcctcgcggatctgctccggcatcataaagatgtgcgcatcgtcctgtgtaaagcagcgcacgcgcatcagaccgtgcagctgaccggacttctcatgacggtgtaccagacccagctcacccatacgaagcggcaggtcacggtaagaacgcggctcagactggtaaacaaggattccacccggacagttcatcggcttgatcgcaaaatcagtatcatcgatgacagtcgtgtacatattttctttgtagtgatcccagtgaccggaagtctcccacagatgacggctcagcatgatcggagtggagatttcgacgtagcctgcttttctgtgaatctctctccagtaatccagaagagtatttttcagaatcataccgttcggcaggaagaacgggaatcccggcccctcatctctgagcataaacagaccaagctgcttaccaagctttctgtggtcacgcttctttgcctcttccatacgggtgatgtaagcttccagatcagccttcttcgtaaaggaggtaccatagattctggtcagcatcttattcttctcactgcctctccagtaagcgcctgccaggcttgtcagcttaaatgcctttaccggcttggtgctcatcagatgtgggcctgcacacaggtctacaaactcgccctgctgatagaaactgatctgggcatcctccggaagatcctcgatcaattctaccttatacggctcatttttttccttgaaatacgcaattgcatcggctctggacttcgtataacgggtaatcggaaaatcttcttttacgatcttcttcatctccttttcaatcttctccagatcttctgtagtcagcggagtctcgctgtccacgtcataatagaatccgtccgcaattgacggtccgatcgctaatttgatattcggatacagacgcttgattgcctgtgccataatgtgagaggtcgtatgacggaatgctccggcgcccttctcatcatcaaaggtcagaatattcagatggctgtccttatccactactgtacggagatcaaccacctcgccatccagttcacctgccgttgctacgcgggccagcccctcgctgatgtcttttgcaatctcatagaccgacattggctgtgcatattcttttattgatccatctttcaatgtgataatcatttatatttcctcctcttcttccgcttcagcagcctcataaaattttccgccgaaggaattgtcacaaaaccaccggattccgccctttaacggcgaggtcagccaaccgatcaggactccggcaagcacaagatccaccgcaagcagaattttctcctgcggagaccatgctgcaaatgcaaatgctttcagcttttctttcataacaggcactcctttcttctggctctgtgcatatgataatgttggaggaaaaaggtattttgaccttttgcccctggcatcatcatatgatgaattgcagatatcaggtacgcatcctctcggagcgttactttacaaaacacaatttcctgtaaatcaaaaaaccgtcctctgcaatccagtattgaattgcagggacgggtaacttctatggtacatcccgggtctttctgaacccatatggtatgatgtccaatatcactcgcggttccaccctgtttgtcaggagcacatcaaagatccgtgcacactgtcttttctgatgcttaaccacttcattgaacgataacggtgtcaccggaccggattggggtcactccgagttagttttcaaacggttccgcataaggacttttcagctgccgccctctctctgcatgctttcacattttactcttctcatctgcgtgtttgctttttatagttttttcttcgaacagattaactgcccgaaatctttttcagtataacatttttccctgttttgtcaactcctaatcgcttcagaaaattgtgctgaaaataatgcacagttactctgttctgctgtagtcacgatctgaccagctgtctgcagattcgtttttagcttctgtagcttccggcgctgctgctcaagcgtccgggtagtacactgcacctgtggctttatctgatccaatgcctttcctgactgaccaaagagcctgcgcagccgccccagaaccgccgccatcctgcggttatattcatcaagcgctgtcaggacttctgcaattccccccgaagaaaacacaagcataccgcctgcattcgtcacttctgcatcagctccgttccccttcagcatcgctgccggtatccgttccatctccgtattcgtctcatgcagaattgtaagcagacgtcgcagttcctctccggaaagctctattccggccctttgtccgatatatgaggagatcagccccagtgttgtatctgagatacggctgcccagccaatctgccccgtcgatcagcccgtcaaagccatcccatcctgcaatcatatctgccgtctgaagtgccttcgcgatctgtttcatcctaaaatccgagagaaactgctgcaatttcttcgagaaatccggattggcctgcccatattctgcgagataggccaacagctttgctgtccaggaagggttctttccccttaatgcaatataagtcaattcttccgcagctgccccgtgaaatccggcttcggcaagtgtcccaaacagtaagagtgtcgccttcttctgtgccgacggcaatgatcgcagatagctgttcagaaactgatccagcgcttccatcgcaggttcccggcttccggggtacattttacagctgccattctcagaaaacttcagaagggtattcggacagtgattttccaggaaaccacccgcacctatgtcccagcccttataaaattcacaggtaccgacatcgttcaaaagcaagttaacataatctccttctacgttacagttccgtaccttgtgctgattccctgcgatctgtctctggtatttctttacaaattcatctgaaaatccctgcccgtcgaacgcgacgcagcgatccaccgacggttctaaaatcgtcacgtattttgctttgtttccgcctttcgaatgcccggtgactgtgacagtcgcataatcctccagtgcaagactctgataccaggacagggcgttcttctgctgaagcgtcgacactccgtccagtacatcggtttcaccaccgccgataaagttatccttccactctccgcctgccgtcccacggtaacagacgactgcctcctcaaaccccggttccgtaaacagcgcgctcacaccgcctccgccgcccacacctgtatccacataggtttgcgcaagtgtcatctgcatcagacgttcatctttttggatcgaccggagaatttgctgccagtctgtccctgtcatatagcttccgtaattctttccttcgtcaaatcgttttatatcgatcgattcaatcatcgtacggactgttcttccctgatatgtctctgccgtaattgatcgcagcggttcttctgctgtcatatacatgagattattcagcaaaaggagctgctcggtactaagaggcatccggaaatgagtacctttaccggacaattcggtgtcctgcggtattgccatttagaatgaactcccttcttgactttcaatacgtaaagcgggggaatgcttatctgcgttcaaaaaacaggaaaacgtatatatcctcacacgtccgccatcagttctgtttttatcaatgtatttcattatgttttccgatttactttctttttcatctgtttctgcatgcacttctgcttcttccggcagccgcagcaatactgcgatttcataggatccataaatcctctgacggcgaatctcctgctccagacgcgctgccaatacgtccggatccccgcaagcggttccgtctacatacaactcggtgaaatttgcaagtgcatcctctcctgccagaagcgcctcccggacagcctgcaggcttgcctctgtatatgcctcgtcgactgcacagtcaaaaaatgcacgacatcctacgcactccggtacactcttctgaagccaggacagaagggctttctcataaggatgggacagcaatataccaaaaaaggtatctctaatcgtcctccttccatctttttctgtcagatacagtacatagcgtgtctcttctccatctgcaacaaaccagaaagtggattccgtatcggcgtccgttcgccttgctgcaccgtctacgatctgaaaagaatgtgatggatagttggttttcagagtttcttccgccatccgcatatctcgcactaattttttctgccacgtcaaaagcattccctgctcgatagcagcttcatctacggagatttttttcaggatttctttctccgatttcgtcagttctatttttattgatttatcttccttcaaatctcccatctgctctctcatttgtgttccgttttgccaaacggcattccacattccaattccgatcgtgaccgcagccaccccgactattaatcttgcaaggatcttctgtcgctttttcattcatcgatttcctttcatatgagtacgaactgatatccatttccgattccatagtcttgcaggcattgttcccgggagagcatctctccacgctcaatgctgcacagacagagtttttctagttctcctgccatgtggttcctttctttctgtccgataagcaccgtcatttcttccatcagttgccggatggatgtctgttcttccacccgcatatcatagcttttatcgtatgccggcgcatacacttctaccaaaagtattgttattccctctttcatttttatttttctgcttacactgcaagtggaattttcacacgctgcacctgttcccctgcactggcaggtggcagcagagcgattccaggcttcctatgctttttctgctcctggtaggaaaggccggaaaagtccagcagtgtctgtgataccacgtctccgcccagacagacgccggatcgcccacgtgacagattccggtaaattgcatcacccgcataacgactcagctcctccggatgaatcgctgcaaagaaaaataagcctaatccttcccctttttccgtaatattttctaaaaacccagccatgtccggcacacctgcctcaggttttcgaatatgagcgatccactctgcaagattcaaaataataaaaaaggtctgtcccatctctgctatctttgaatactgctctgctccaaagcatccgatttcttccagctcctttttccgctgatttttctgcaccagctcttcctgcagttctattaaaaactcataaagctccacatccgtatgcagatatcgaagctttccctttgcctgcctgttcctgtcattttctgtcttcaggctcatttcttctttttcgtctgcttccgtttctgctccatgcctcctccacttttgctcaaaatccaccacgactgccgtgcctttctttttctgtgcgaccgcagccaatacttgcaacagattctgctttccgcttttcgctctgccgagaatcagccagcaaaacagcgtccgcagatccagcgagacgacggttgcctgatccatatcgtatccaaacggaagggcatacggatccgtcaaaagtgcctgtatctccgcattttgcaaaaaatcatccactcctgtaacgtccggaatctgcggaatgcctctggcatgcgcacccgtccagtgattcgccatttcaacacacgtatcccgaagcttttgcagacgttcatagtcatcttctgcatcaaccggcaacgccacctgaccttccaatgcctgatctccctccttccaaagtccacgtcccggcaccgcgtccggtggtgtcggtacctgagtcagacgcaaaagctccatatactgaaaccgatccggaagacttaaacaaagcacctgccgaatgcttctggcaatgctcattgaaatctctgtcatcccgacacctgccgcagtcacaatcaggtaaatgccgcaggataccccctcctttgcaatgcgctcaatctgcttttcataccggttctccgtcctctcgcgaaactccgaatagtcatcgaccaaaagcagaatcgccggcagacgttcggatgctctgagccggtattgctcataagttcctcctcgcatttgctttttcctctgttccatctgaactttcagcatactaaagcaacgaccgatccgctctgaatcatccggaagtaccattcctccaacctgaggagccatcgcaaatgcctgcagactctgattgccaaaatccattccataaatatgaatttcttctgccgtgtattgctgaatcagcccatatacaattgtctgtaataccgtactctttccgcttcccactcctccaatgacgagaagtcctccatgatgcaggaaatccacacacagaggcaactgtcgctgtcgctccggatcatccagtaatccgacagaaacagaaaaatcctgtggctcttttttctgatccggcagctcagaaagcatcaaacgctctggaagaacggacagccagagccgtctgggcaacagataagcactctcttctgcaatatgatgtaaatgttctactactgcctgtagctgcgtctgctcacggacgatcgatctgctacgtttcttcttccctgccccgctatgcatccgctgccctgttgcggtcaaaagctgtaccgtttcccgttcacaatcgtctttctcccacctggcaccgcaaaatccggcctgcagttgctcgtatatctcatcattaccgacctgcagataacagcgtcctgcctgtgtcagatatgctgcatccggatgatgcagcatgtcattgctgtcctgccgatcctgtacccgcaggcaaagtcgaaaccgggcattactccagatattatcatctaccgttccacccggtttttgtgtcgccaaaatcagatgcaggccaagactgcgcccgacctgcgccacactgaccagctcccgcataaaatccggttcctcccgtttcagctcggcaaactcatcaataatcagaaacaggtgcggaatcgcttcctctgcttcgccttcatgatacaacctcagataagcactgatattattcacttcatattctgcaaaaatcctctgtcttctgcgattctcactcttaaccgagatcatagctctctgaatcagatgtccggaaagattggaaatctgtccggctagatgtggaagtccggaaaacagatttgccatccccccgcctttataatcaatcagaaaaaaagcaacttctgtcggactataggaaattgcaagcgacagaatcaatgtctgtaacgtctcactttttcctgatccggtcgtccctgcaagcagtccgtgcgggccatgatatttttcatgtaaatcaagaaagcacggtatcccgccttccttctgcccgatcagtgcccgcagagaatactcacttctgttgttgctccagcgctctgaaatctttagctgttccggtgtctctacctgatacagccggaaaaatgtcacacgttccggaatttctgttcctgtctcccgctctgccgtgcgaagatttgccagatttttgactaaccgctctgctgcatgcaattctgttacgtcaaatttgaccgctgtccgcatgtcggcatcctgcacccggtacagacctgaaaaatgacccggctgcttttgattactgatgacaaatccacagtcatttggcagatcttccgtctgctctgccagtatcagcatactgatcccgtattgaaacgcgttcttctgcaaataatactccaacagctcacctttcagcagccgtcggtcactcacaaatacaagataataaggcagcggctctttgtcatatgatcccgactttatccgctccatccttacacgcagcacccgctccagcgcacaggcaacctctgatacttccgctgcctttcccgccacaaatcgtagccgtccatcccctgaccacgtatggggcagccagcgaaacagtgaaaacatcgccttctcatcgggatttgacgcatcataaagcagcaccagcttaacctccgtatagctacagccatatgcagcctgtatcaggatttccctcgccacttcataggctccctgttttccttccccgccgaccagtccgaccagtccatgctccctcagattcagaccaaccggcactacctgcagactttcatacttttgccgtattcgctccggctgacccgccaatgcatccggatgcaaggaaaaccgttctttcgatatctcgatttttcctgggaacggccgctccccaagacccagccggaaaaagagaaaatccgcatgtccgggattacggctccagagctccggaaacggaggtgtctgggcacaaagcatagccgccgacggataccgcccacccagcacggctcttgcatgctcacagtatctttttatctgcgcctcctgattggcaagatattcctgataactttgactgcgctccagtttctccgtcctctcctttcttttctcataaacgattcgcgtcatcccccacgctgcgccgatcagtgccgatccaagcgcagtcaccagtcccgtatacaaaaatgccccggcctgctcacttcttgcagcagtcagcagacatccgcacaccatcggcagggtcattgtaagcgatgggccaagcgtcagataccatggtccctctgccctagactgcagctttggcggtccctcaatttcaaatgtcttatcatccagcggagtcaggcttctgggcatccgatgcatcatactcaccgtctcctgacacacatccggtatcgccacccgcttccggagtgcatttttctcaagaaataccgtctgtccgccccgcatttccaatcccggtatgctggcatccactgccagcatatctcccagaaataccagcttcagccccataatccatagtacatccccatactgcaaccgcgtaacagttcctgcccggctgtgattgatatacacaccattacggctgatatcatgcagcacaccaataccatcccgccattccagtatcgcgtgttcccctgaaacacagttctgcacatcgtagcagatctcattcctgatgtcctttccgatccgcagctgcccgctgccactaagtgccagcttttcatagatacagcacaccggatcccgcttttggatcagcattgctgccccggttagatcccgcaaggtgagtcggagcagctcctgctcctgccaaatgattccggtatagtcccttccatccttccataccgtatatgtcgctccatccaaaagctgccatcccgcctctgtctttttcacgcgtacccgtaccgtttctccacagctaaactcctgcttcaaaagcagcagttcctgctctgccctgtcctgttccgaaaggaaaaattcccggtatcgcttttcattataaacggtaagcacatagcccatgccatcctccgaactgcatccccttacgccagcttactgctttacacaccggaagcgaggaaatgctatttactatgaagcctgccaacgtacctcatcccactatattatttttcagtgccgaagctgctgtctgtgcttcctgctctgcccgttcgtattcctccgccatcgcagtaaggtcattgacctgctcctgcagcattttattaattttctctatatctgccccaagcgcctgaaacttatttaaataggaggcagatgaagcacccgaccagacactttgactgatccccgctaccagagccagcatctgtgccgtgttattttttacctcgctgccgcaggaagcaaaggcggcagccgtactccgcagttcctccggcgttacttttaaagttcctgtcatatttttctccttccatgtgtttttaaaagcctttctgcacaattccaatactacggctctctgcctgttcatatcccgcaataatctgctgcagcacctgataatactcttccacagtctgccgaaacaggtccatcttcatacagtcttcctgaaacgcacggtcaaatgctgcttttcctgcgccctcccaactcgcactcagcttctgctgtgccagaaccagctcctgtaccttatttgtataacgctcacccagctgccgcagcagttctgctttctccttcagcgctgaggctgtcacctgaaattctgccattgtcttcctcctatgatgttccttctgaacgtgccagtgcctgcagctctgcctgatataatcttgccgcagtactccgaagctgcgaagcttccattgatagctcacgtctggtgacatgcagcatctgccgaactgcctccacatcccgtcggcatccgctcgccacatctccctgaaaacagagtgcaagcttctggctcatccacgtcagctcgctgctcaggctgtgtatctctgccgccagcgcttccagttcccctgcctgtactctggcatggttaaaattgatctgaatctccgtctgtccgattttctcacctcttttacagaatatttcgcttcagtgctcctgctacggtctgattcttcgcctccgccgcagtgtaaacaccagccgcctcacaaagcttcccgggataaccggaaatcgcactgcaagcctgcttcacctcgtccatcgatcctgcaaacgcacttctgcagctgtctccggccgccccgtaccagtacccctttgtccggttcagcttcaactcaatctgatatatcgcctgccacagctttccgtcccactttgcatctgagcagcctttttccacaactcctctgtagatacatgcaaagtcccacttccactgctgctgtcatcttccacctgccatcccctccctcagttgccggatgcagcggacatacgtctcacaacatcgccgcacagactccaaaaaacgccccagccactgccatctgctttgcagttctgataataactgtcgatattgccgataccacaaatgcgctgctgtcccgctccacatttttggaatctcttccagtacggattccagcatcccgatttcctgctctccgcgtttccaccaaagactcatctctgcgacatctgcccgcagcagctgtgtactgatttcgattttatcccgcatgcaatctgcctttcccgttttattttctcgtataattttttattttattttcttttttgtttatgattttattctttttaatagtagaagatatttttgtataactataattattcttattgtttgtaataaattatatatcacattataatttatttcaatattctttttgttgtttagatatatttaatctttattatatcctctttttatatgtgtattttctttttacaaaacttcagcaagtctggtctgccattacaaaaggtaaaaacacctttcctctaaaacaaaaaaatacagtcatcagagtttctttttctctgataactgtacttttgttactatttgatttgaacgctttacctcaaataaacattccccacgtaaagctgcgaatgtccgctttgactgatatcagttttacagaacggaaacagacagctcttccagccacaaccgtgcacacgcatcgcttggcatacgcagatccccacggggtgagagagctacgcttccgaccttcggaccatccggcaggcaggaacgcttgaactgctgtgcaaagaaacgacgataaaaggtcttcagccattttttgatcgtctcctcatcgtacacgccggaaaatgcataccgtgccacacggtaaagcttcgccggagcataaccaaaacgcatcaggtagtataagaagaaatcgtgcagctcatacgggccaacgagatcctctgtcttctgtgaaatcacgccatcctttggcggaagcagctccggactgaccggtgtatcaagcacatcgagcaaaatcgctttcgtctcctcatccccacatgtatccgcatagtagcgcaccagatgccgcacaagtgtctttggcacagaacagttgaccccgtacatcgacatatgatccccattgtacgttgcccagccaagggccagctccgacatatcgccggtaccgatcagaaggccgccctttttatttgccatatccatcaatatctgtgtccgctcgcgcgcctgactgttttcataggtcacatcatgaatcgacgcatcatgaccgatgtcccggaaatgcaggttcaccgcatcgcggatatcgatctccaaaagctctgctccaagtcttcttgtcagctcacaggcattctgataggtacggtctgtcgttccaaatcccggcatcgtcactgcggtaatcgcatcacgggaaaggccgagcaggtcgcacgccttcgccatcacgagcagtgccagcgtggaatccagcccgccggaaataccgacgacaatatgtctgcttccggtatgttccatccgctttttcagccccacagcctgcatcatcagaatttcttcgcagcgtttttccctgtctgccattccggacggcacaaatggtgccggatcaaaatatctggtcagctccgtctcatgaatatccagatgaaatgcgatcttctcataaccatgcgaatcggtctcaaatgacgtcattctacgccgctctgcgcttaagcgtcgtaaatccaattctgtgtaaatgctttttgctccaaaacgatcagactctgcaagcacatgcccgttttccgcaatgacattgtgtccggaaaaaatcaggtcctgcgtagactccccttctccggcacttgcgtaaatatacccggcaagcagtcttgcagactggcctgcgatcaggctctcacgatatgcacttttcccggtcgcctcgtcgcttgcagaaagattgacaagcacagtcgcccctgcaagtgcatggccaacgcttggtggattcggcgcccataaatcctcacacagctctgcagctgccacaagctccgggagctccctgcagcaaaacagcagccgcatgccaaacggaaccggactgccaaatgcgtccacccattcgacttctgcacagccttctgtaaaatgtcgcttttcataaaattcattataatttggaagatatcgtttagggacaagtccgagcaggtgaccgtcgcaaatcaccgcagccacattgtaaagcttgccatccttttcccatggaagccctacaaaaataagtgccttttttcccttcgtaaactccacaatctgcttcaggctctcctttgctgccagcagcagcgtctcctgccagaacagatccgcacacgtatatccggtaatgcaaagctccgggaatacgagtatcgacgccccgtaccggcacgcctcatcaatccgctcacaaatccgctctgtattatatgcacagtctgccacccggatctttggtgtcagagccgctacctttacaaacccgtccttcatgcttcttcctttctgccgcttcaggctaacgtctgcttcttgccagcaggctctttaattcttctaccgttacgggatactttttattacagaactgacagccaacctcaatcgtctccccgtcatggatcatatcttccagctctttctttccaaggctgatgagcgccttctcgatacgctcccgcgagcagtcgcactgatatccggtcggaatcttttcattgatctccacgccaaactctccgagcagctcctctaatatctgttccggcgtcatgcctgcatcaagcagtgctgtcacagatttgacattcgaaagctttgcctccagacgatcaatcacttcatctgaggtaaatggcatgagctgaatgataaagcctcctgcctgtttcacggtattatctttttccatcagtacaccaaggccaacagaggttggcacctgctctgaagtcgcaaaataatacgtcagatcatctccgatctcccctgtcttcagttcgcactgcccgacatacggctccttcattccaagatccttgatcacgctgagcacaccaaggccaagcgcgccgcctacatcgagcttgccaaacgcattcggcggaagcatcacctccggatgctgtacatacccctttacatgagccgacgaatccgccgtcaccgtcagtcctccgatcggtccggaacactgaatctgaagtgtcagaagatccttttcccctttcatcatcacactcatcattgctccggctgtcaacagtcttccaagtgctgccgtcgccaccgggcttgtattatgatatacccgaccactctctactatgtcctttgtcgtcgctgcaaatgcgcggatctgatgatccgcagctgttgctcttactatataatccatttaatcattcctttctttgtcgaagcggatattcacaatccgcttcaccacctgcaactacagtatatgaatcgcacccagcagtaatccagccgctacgccggatacatacagcactgcgagcagacgcagattctccttcttgtcaggattttcccgaaagagtacaagaagtccggtaccggctccgcagagcaatcccgcaaacatcgcgccgctgtcaagcagtccgctgatataaagctgtgtgatcagcacggaagctgcacagttcggtatcatgccgacaagtgctgccagacctgcctccagccccgggatgcttccgaaaatgctgctcactccgtttgcctgcaactcctccatcacaaatccgagcacaatcgaaatcacaaccagaaataccgtgatctgaatcgtatggctcaatgcagaacggaaaatgccatgctcgctgcaatgacaatgctcatgctcgcacatttccggatgttcaggaatcggcctgcgccatcccatgcgctccgctacgaaatcaatgatcataccagccacgattccggctgcagcctttgccagcaaaatacgcaaaatctcagaaaccggcagaccctccgagatcatgatcggcaacatttcatctgatgtcgacaaaaataccgctatcagtgtacccggtgtcaatatcccgcctgcaaacagtccggctgcagcagctgaaaatccacactgcggaatgatcccgatcagtcctccgagcagaggccctgctttccctgcgcggtaaatcatttcctttgtctttcggctcatccgatgctctgtatattctaccgcaaggtatgacaaaaacaaaaatggaagaatttttgcgcagtccagcactgcttcttctataatttcccacataataagttctcctttagcctcccggctattcgctatcataacataaaaaaactgcagggacaacaccgtttcctgtgcaaacgaagttgcctctgcagtcctttgctgatacgtgtcaaagcggatatgcacaatccgcttcgcgtttagtttatttatagcaactgtgcaaatacggatgctcctacaacagtgagtacgcctgccactgcgatcgagagactgctcattgccccttcaatctcaccaagctccatcgcctttgcagtacctattgcatgcgaagcgcttccgagcgcaataccctttgcgatcggctcctcgatcttgcagatccgaaatacatgctccccgatcacatttccgagaataccggtcacgatgatgaccgcgactgtaatcgtcacgattccgccaagctcctccgacacacccattccgattgctgtcgtaattgacttcggaagcaaggtaacatagacatcatgatccagacgaaacaacacagccatcgccagtacggaaaccagactcgtcagcacacccgaaatgagtcctgccaatattgcacgcagattgtggcgcagcagctccagctgctcatacaacggaatcgccaggcaaactgtcgcaggcgtcagaagatagctcagaagatgtgcaccggtttcataactttcataatcaatatgaaataccgcaagaaatacgatgacaaccacaattgatacaagaagcggattaaaaattgccagcttccatttctttttcaggaacataccgatctcataagccagtatgctcaccatcactccaaaaaatacggaattacataacatttccttcatctgtctcatcctc

SEQ ID NO: 4330 - DNA, 32759 bp, Unknown
  16S sequences of unknown bacteria
agcgacgcctgctcccgtacagagcagacccgcacccgcggcgcctgcggctgccgctcgtcccgcgacgccgggagcgccccgcgcgccgaggtatttccgcaacggacaggagcagggcgtctatatcgcaaaacccggcgtggacgccaacgcgggcacgggttcgacctaccgtccccgcacggacagaccgtcccgccccatgggcgaccgtccgccccgtccccagggagacagaccttatccgggcagaccgggcgctcccggacgtcccggcgtcgcgggcggaaagccccgcgctggcggagcggccgccgcgcccgtcgtacccaaggaaagcaagacgtttaccgcgcctcccaagaaaaaggtttacgacaaaacctacgtcgaaaagaagcccgtctccaagcgcacgctcatcaaacagcagggcatgacggtggaggacttcgacgaaaataagtcgggctacagaaagctccgtatcccgaaaaagcagaagcgccaggagctccagtcggtcaagatcgatcacgcgattgtgacgacgcaggaaattcccctcaaagtactttccgataagctcggcatttccgccgtcgaaatttccaaacggctgttcagggaggggattatgaagagtataaacgattctatcgattacgacaacgcggctttgatcgccgccgatctggggatcgatctcgaatacaagcccgaaaagacggcggaggaagtattgcaggatgcggtggtgacggaggaggatacttccaagctggtcgcccgcgcccctgtcgtcacggtgatggggcacgtcgatcacggcaaaacctccctgctcgacaagatacgcgccacgtccgtcaccgcgggcgaagccggcggcattacgcagaacatcggcgcttataccgtaacggcgaagggcaaacagattacctttatcgacaccccgggtcacgcggcctttacggccatgcgtgcgcgcggcgctcaggtcacggatatcgtggtgctggtggtggcggccgacgacggtatcatgccccagaccgtcgaggcgatcaaccacgccaaggcggcagacgtgcccatcatcgtcgccatgaacaaaatggataaatatgaaatcaatcccgaccgcgtcaagcagggattgatcgagcagaacctcgttcccgaggaatggggcggcgatacgatgatcgttcccgtttccgcaaagacgggggaggggatcgacgagcttctcgacgcgatcagccttcaggcggaaatcctcgagcttcgggccaatcccgaccgtcaggccaagggtacgattatcgaagccaagctggataagggcaagggccccgtggcgagcattatcgtacagaacggtaccctgcgtacgggcgacaacatcctttcgggcacgacgatgggccgagtccgcgccatgttcgacgataaggggcgcagcgtaaaatccgcagggccttccatggccgtttctattctcggtctcgaggacgtacccaacgcaggcgacagcatcatggccgtcgatcaggcgctcatgaagcaggttcaggaagaaagaaagaacaaagaacgcgaaagcatgatcaagcagcagagccgcgtcacgctcgacgacgtgtttgcgcaggtggaggaaggcaagatcaaaaacctcaacctcgtcgtgaaagcggacgtgcagggcagcgtggaggccgcgcggcagtcgctggaaaagctcggcaacgaggaggttcgcgtgaaggttattcatgcggccgcgggcgccatcaacgagagcgacgtcatgctggcggacagcgccaacgcgatcatcatcggcttcaacgtccgtcccgacaccaaggcgaagaagcttgcggagtccagcaaagtagatgtgagaagctaccgcatcatttacgagttgatcgacgatatggaagcggcgctcaagggcatgctcgcgccgaagattagggaaaacctcatgggcaaatgcgaagtgcgtcagacgttcaacattacgggcacgggcacggtcgcgggctgctatgtcacggaaggcaagattgtccgcggcggcaagctgagaatttaccgcgaggacatcatgatctgcgaaggcggcgtgaaacagctgaagcggtttaaggacgacgtcaaggaggtggccaagggctacgaatgcggctgcgccatcgacggcttcaacgagatccgcgtgggcgatatcatcgagtgttatgtaacggaggaaatcaaggccgaatgaaggtttcgagaagttcccgcctgaacggggaatatcaaaaggagatcagcgagattatccgcacccgcctcaaggataaggagcccaagctttcgggcatcatttccgtgacggaagcggacgtcgcgcccgatctcaagacggcgaaagtttatatcagtatttacgcgaaggacgaggcggaaaagctcgcctccttcgatatcatttccgccaacgcgggctttatccgccacgagctggcgcaggttatgcgcatgcgcacggtgccctcgctcaccttcctttgggacgggagcatggcctacggcgcgaaaatggacgagctgttcaaaaagattcaaggcggagaagaaacggacaaaaaagacgattgaaaacggaaaaggagtatcagtgagctttgtaaattcgacccttgaagagatagcggcgagggtaaagcgcgcgcgcagcgcggtgattttaactcatatgcgccccgacggcgacgcgataggcagcgccttggcgctttcctgcgccctggacgcgctgggcatagagcattgcgtatgcgacgaatccgagcttccctccaatcttgcctttttagaggggctggaaaaaatcgaaaaaaagcccgacccgcaagcggagctttatatcgccgtagattccggcgacgagccgcgcctcggcgcgctggcggacgattttcgtctcgcagtgaaaaaaagagatacgatcaacatcgatcaccacgtatccaatacccgctacgcaaaatataattacgtgcgcgaatgttcggcaaactgcatgaatatcgccgcgctcatcgaagccatgggggtgccttttaataaaatcatggcggaatatctcctcttggggctgctgacggattcggggaatttttcccacgacgacgtgacggaggaaacctttctgacggcggcgaagctggtgaaggcgggggcggatattcggtttctcaattataatttgttcaaaaaacagccgcgtgcgcgcgcggagctctacgccgacacgatgagccgtatccgttattttttagacgataagtttgcggcgatcgtcattacgcaggccgccatgaagaaattcggcgcggacaacggcatgacggaaggatttgtggatttccccctggcggtggacaccgtggaagtgtgcgcgtccgtcatggaggtaaaaaaaggacagtataaaatttctctgcgttcgaaacgctatgcggacgtcaataaaatcgcgggcttttacggcgggggcgggcacgtccgcgccgcgggctgtatgctgttcggcgacgtggaggagatactcgacaagctggtttataccgtttcccaatatttgtaagttttcttaaataaataacagctctttccaaacgggaagggctgttatatgtttacaatacttaaattttaaaaatattaaaagatattttttataataatattgacaattctaattttatatggtaatatatgtggtaagaaaagcttaattgattagcgaaggctgaatttaagaagtaggaggatacgcaaatgacaaaaaacaaaaagctttggttgattaacggtattgcgtttttacttgcctttcttgttggtttatattatgcggttccttattttcagaaaccgaacgtaagcgtaagagcaatatcggtcttggaagaaccagttgattatgaaaattttttctatgagaacggactggaaaatgttgatatgtatgttgaggaagagactaattctatttttctcagcttcagaaaaataattgacggttccatagctgaagaagatatcggaatcgaatgctcgttagatgaagatataacattacaatttatgtttgagtattcggccgataccaacgatttctattttttagttgatacctatgcgtttccgtcttactatgaaggacacgagcgtttatttggagttccgtttttaacggaggagggagaaatcgatatcggatttgccacggaagacgggcctgtatttttaagcgactttgacgaaaatatgcttttgcaaaattgcggctggttttcgagggctcttaaaaaggtagcacttgccgctacagtcgttgcggtgactgctgcggtggtcgcagtggcggttgtggtggctcccgccgtagttgcggcggcaactgcaataggatcggcagtagtgggaacatctgcaggagctaccgcagttgccgccctcggcgcagctgcaactgccggcgcggccgcaatttctacaacaacctttgcaatagccgcggctacagctacgattgccgcttgtgttgccttagttgcggagatcgcggaagaatatgtggaattgacagatacgttcgcccaaagtaccgaagaagaagttcggtcgaataaggcttgggatgggacgatttattatccatgtcttcgcgtgggtgatggaataaaactgcaggtatcacctttccccgtaaacgatgaagttgccgttgcttggatcaaactcgggggaaatatgtacacttatttttcggacgatgccgccggaatattggaattagcgggatatgttccccaatgtcatccggtgcacaaaggtggacaatatcctcattatcatccgtttttagacaatgtagaagtaaaaatagcaggagacggaagacaagtatatggccctaaacacagtattcattcgttttacggcagaagaaaataagaggagggagaagcatggattacagagcgccgtttgaattggtggatagattgctgacaaaaaaatattcgtttaaacgtatttcgtttgaggaaacgtggatagtaatgcctgcggcagggtgggaagacggaaaaataattccgttgaagcctgaagaaaaaacggtaccgttgaggacagaggaagaagtgaacaccgatccggagcatgtggcgtgttactggctggacgatcctgaggtttttaagaaatatacggatatgtcgcaaccgaatgcgcttctcttatcacgtcttttggttgtagtgggtttaaacgaaaaaagagacgaaacggtggaaatatattcaggttgggggcgtgaatttgagttggccaacgatttaactcggataggggaaagtagttgttttgacgaatttcattcaaaagaaagagtatcggcgaagtcgactgggaataaatagatatttttgaaaaattatcacggtgaacatggaggtaaatgcgattacaaaaacaaaagttaaaaaggttacatgtggaataattgtgtcggtactcattatttctgttattctttgcgtcggtctaaccgttcccctgtcggcaaaacaaattttttataagtcgcttaagagtatagtcgaattaaaggcttctgcagaaagtgttggagataattatggtaccgcggtatttattgataaagacggaactcttgtcaccaatgcgcatatagtaacttataagcatcaaggttcgataaaaacttttgagacatattttatccgatttgcttcggaggaagactacagaaacgtcgagttgcttaaatatgatattaaaaaagatatcgccctgctgaagtttaaagataataccgctcaatgcaagcctttgaaactcggtgattcggataaagtgtttttcggtgagcgggtatatgcaattggtaacggatctaatcttggattgtctatcacacaaggcataatcggcataccgaaagtaaatatcgagtatgacaacataacgagagaagcaatacagtgtgatcttacaatttccgaaggaaacagcggaggggctttattagataaaaaaggccgattgataggaataacgacgtttcagataaaagattcttcgggagatattatatatggattagcatactgtatcccgattaatagcgtaatagattttttaaacggataaaaataaattttcgataacgcccgcgtcctgactggcgcgggcgttttttgtcggatatgcacgaagatgcgcaagtttgcaaaaaagaggctctcttcgcggaaaaatatgccgccggagttgatttttttataaattgagagtataatagaggagaaaaaatctcgcggattacggaatcgattatggcacagaaaacgaaaaaaacagaagaatttatctccctgagcgcggaggccctcggcgtcgtctcctacgccgattattttacgcagacgccgctgtttacctcgcttcagatcaagaatgcgggcgcggacgcggctacggatctgacgctgaccgtctccaacgaaaacgggctcgtcgtctcctgcataaagccgatcgcggaagtgccttttgaaagctcggtggaggtggatctcggcaacgtgctctccccgcattatttcgtcgggctggagatcgtgcgcgaagaaagggtgtgtatcgagctgaagcgggacaagcagacgattgcggcggagacggtgacggtcaccgctctgcccttcgattattggcaggggacgtcgggcaatgcggagctgctcgcctcctttgtgcgccccaagctggccgactgcgcccgcctgcaggcggaaatcggcgtccagctgaaaaagtggggggtacccggcgagataaacggttacgagggctgcgataaaaacgtcatacgacagacggcggcggctctgtatgcctgtatccgccgctatgctttcgaacgcgaggaatgcgatatctccgcgcccgtggaggcggggagcggcgtaaagctgttgaacgagcgcagggccacgcctctcgaaatggcgcttcttgtcagcgcgtgtctcgaaagcctcggcctgcaccccgtgctgatcttaggcgaaaaggaaattacctgcggcgtgtggctgtacgacagctgtttcatggacaccgtttccgacgatctccaaagattgggaaaatacgttgccgacggcatcaacaatttaagctgtttcgacgtcaacgatctgttttcggataaaaacgtggcgtattccacttcggaagcgcactttgttcagaaactcaacgcgggcgaccgctatgacaaatatgtggatatccgccgctgccgcatcgcgcatttgctgcctttgcccctgcgcgcgcgcaatcttaagggctacgagatactctccgaggaggatatgtcccccgacgccgcgccccgcagcctcaccgcggtcaaaaaactttcgctcgacggaaaacagagcaaggacaagcagtgggaacgccgtctgctcgatctgtccttaaaaaatacgctgctccatttccagcccgaaaaaatggtgctgcacgttttgtccgccgaccccgattccaccctgaaggcgcttgccgaaaaaggagagatgaccctggcgggcggaacgctcgccgtaaacgaagtggcgagaaggaaggtgtttttcggcgtttcggccgaggtggcaagcatgcgcgagctgattgcgctggaggtatcgggcggcatcatgcgcacgttttccgaaaacgtggtgctggacgaaacggtgtcccgcctgatcaagcgcagcaaggaggcggacgaggaatcgggcacaaaaatcctctatctcgcgctgggctttctgcgctggtattcccgcgaggacggcaaggaaaattacgcgccgctcgtccttcagcccgttacgctcaaaaagggcaaggggggcgtcggctacgcaatcgcacccaccgacgaggatttttccgtcaactccacgctgctggagtttttgaaacaggaatttaatatcgatatccgcggcctggacggcgcgcttcaggggctgaagatttccgagattctcgccatggtgcgcatggagatcgtcaacatgaaggactgggaggtgttcgacgacgtatatgtcgcggcgttctccttcgcccgctatcagatgtggcaggatcttcgcaggaatatggacgagttttcgaaaaacgagctcatttcctccctgctccataaccgctgcgaaatcaaggataccaaggacgtcgagttcagagaggacgactgtccgcccacgcagacgctgatgcccctgcccgcggactcgtcgcagtgggaggcggtggccttgtcccagacgggcaaaaccttcgtcctgcacggccctcccgggacgggtaaaagccagacgatcaccaacatcatcgccaacgccttaaacgacggcaagcgggtgcttttcgtcgcggaaaaacaggcggcgctgtccgtcgtcaaaaaacgtctcgattggctcggcctgggcgatttctgtctcgagcttcattccaacaaaacgaacaaggcggacgtattgcagaagctggcggcgacgctggcgcttgcgggaacgcaggaaaacgtcagcctttcggaaaaatcgggctccattacccagctgaaaaccgatcttgcggaaccgctttccgctctgcataaaaaacgccgtctcggggtttcggtatatgaggcgctcctcatctgcctgaaaaacaaaaacgcgcccgatatcatgaacatcgagagcacgttttacgacagcctcaccaaggaaaagatagagaattacgaaaatatgatggtgcaggcggccgcggcggcgaaggaatgcggcggcgtctataattcgcccttttccaacgtcaacctcaccgaatacagccgcgacaaacgggacgccatttactgctcgtccgaagtcgtcatcgcggagatcaagcacctgaaaaactacgtcgcgctctttttggagctctaccgccagcggatcagtacgctgacgcgcaagaagctggacgccctgacgtcggtggcggggctgctggacggcggcacgctgaataaatatttcaaggaaaacgaggacgagttttatgcttttttcaacgcgaacaagcgcctcgacgtctgcctcgactattatttcaagcgcttcaaaaagctggtggatatcggcaaggaatacaaggaactcggcgcctggctggatgcgggcggcgcggattacgcgcgcgacaaaaccgcctcagccgtcgtcaaaaaactgaccaaggccgcttcctcgccgcttagcgaagaagatatcctcaagcatcttcaaaacgtatgcgaaatttacgaggcgatggagcgtatccgcgccaataccaagctttcgcaaaatttcacctccgcgttcggcagagtggactttttcgacgcgagaaaaaatttcctcgccgacctctataccctgcacgagctgtgcgcgacgctgtttatggactacaacgcggacagcttcaacagcatgtgcgtccgcgcggccaacgattacaccaagcccgttctgaagggcctgctccgttcggtggacagcttccgcgcggcggaggagagctttttggcgatcaccaacgccgaccgcgggcaaatccccgaggaggacgtcctcgagtattacaccgccaaagcgggcgcgctgatcgacaatatcgacatgctggccaattggtgcatgtaccgcgccaccgcggaaaagctgaacgacgcgggacttacgtttatgaccgacgcgctggagagcggcgctctgacgggcgaaaatatcgtagatagcttcgaaaagaatatttataaaaactttttgcagacgaatattccgctcgatcccgtgctgtcccgcttctccgccgcccttcaggaggaagagaccgagtccctgcggctgaccatggacgagtttgccaagctctcccgcgaggaaatccgttcgaaactcatttcccgcctgcccaccccttccacggagggcagcctcagcctcgaactgctcaatttccagcgattggcgaaaaacaatctccgaggcatgggtttgagaaagctcttcgaggagcttcccgagctgatgaaagtcctcgcgccctgtatgctgatgagcccgatcaccgtttcgcagtatcttcaggcggaaaacggaatgttcgacatggtgattttcgacgaggcctcgcagatgcccacgtcggaagcgatcggctcgctggcgcgcgcgaagagcgcgatcgtcgtcggcgatcccaaacagctgccgcccaccgccttcttcagcgccaattacgtggacgaggacaatctcgaaaacgaggacatggaaagcgtgctggacgactgtctcgctctggggattccccagcggcacctgacgtggcattaccgcagtaaacacgaaagccttatcgctttctccaatatcatgtattacggcaacaagctgtgtactttcccgtcgcccgacgcgcccgacagcaaggtgaaattcgtgcgggtggaagacggcgtatatgaccgcggcttcaccaagcgcaataagcccgaaggggacgcgctggtcgccgaggtaatcaggcggctctccgatccgtcggcgcgcaagtccagcctcggcatcgtcacgttcagcaacgtccagaaggactatatcgaacgcaggctgaccgccgcgatcgcggaaaagcggctggacggccccgcgtacgaccgcgaggaacccattttcgtcaaaaacctcgaaaacgtacagggcgacgagcgcgacgtaattctcttttctgtctgctacggccccgataagcagggcagggtttcgctgaacttcggcccgctcaatcaggcggggggctggcggcggctgaacgtcgcggtgtcccgcgcgcgggaggaaatggtaattttctcctccatgacgggcgcgatgatcgatctgtccaaaacgggctccaagggcgtggcggggctgaaggcctttctcgagtttgcggaaaagggcaggacgaccctggcgatcccttcgggcaacctcgtcgccaaaaaatcggggatagggaaatatatcgccgaggagctttcctcgtacggctacgactgccgctacgacgtgggcgtgtccgatttcaaaatcgacgtcgccgtcaccgatcccaaaaataagcataaatttatccttgcggtgatgtgcgacgggccgaaccgtttctccgttaaggacagaaacgtgcttcagattcagaccctcaagcgcaacaactggaacgtcacgcgcgtgtattcggtcaactattacaacaaccccaagcgggagatcaaaaagatcaaggatctcctcgacaagctgacgggtgcggacaaacgcggcggtacggggcttaaccgcggcaaaaggccgtataaggcggcgtcgctcgaccagcgttttgaaaacgccacgtttatcgcctcgggcgaaaacgacgcggagatcatgtcccgtctcaaggcgatcgtttcggcggaggaaccgatttcctacgatttcctcgtgcgcaggtgtctttcctcgctcggcgtaagcaaatacggcgccaaggtagatgcgcgcatgcaggcgttggtcgcgctctgcgggtttaagtacgagcgtattttcggcgccgcctattaccgcaaaacggacaaaaacacaggcttcgaccgctatcgcgtggagacgggggaaaccttgcgcaaaaacgaaacggatttcacgccctacgagattatcgcgctcatacgcggcgcgctggaggacaaagtggcgctgtatatggacgagattatggtgatcgtatgcaatcttctgcgcgtcacgaggcccaccgacaaatttgccgtctatgtcaacaactgcgtgacgctgggcgaggaaaagggcttgttcgtgcgttccgtgtccgacagaatctcgctggcctaaccctcaacgcttttacggaaaacactcttacgcttttttacggaagatgctcttaagttcttctacggaagatactcctaaacgttgctacagaacatacttttaagctttttttacggaagatgctctcaagttcttctacggaagatactcctaaacgctgctacagaacatactcttaagtgtttttactaaagaatctcatgaaaaaatttttcagcgtcgccgaaaacagatcggacgggaagcttttcaatttccgtcccgctttgtttgtggcggcgttttttgcgctcggaatcctgttcgcgtacgggaaaaagtacggggctgtttcgcccctgtggcttcttgcgggagttccgatcttcgctctctccgtagggtttgccgcggacaggcgcagggcgcttttcgcttcgggcgttctcgtcctctgtttttgtttcggcgggctgtcttttgcgcgggcggtgcaaaggttcaaagactgcggcgtttatgcgggcgggcataccgtcgtggggacgatcgccgaaaagaaggaatacggccgcttttccgtactgtacctcaccgatctgtatatcgacggaacgcgggagcaggggcagctcgtcgccgccgtgggcgcttcgcttgcggagaaagccgcgctttccgacgaggtggtgctcaggggcacagtaacgacggataccgacgagttcggtccgtatgggtttcgtgcgggagatatcgctgacaacgtacgcttcaaggcggaggccgtatctttagcggtgacgggaagagacggaaatcttttccgcgcggtacgtttccgtataaaaagcgccctgtacgcgggcatggacgacgatacggcggcggtcgcgtacgcgcttttgacaggcgacgtatcggggatcgaaagcggtctgctcgaaaacgtacgaaggggcggaatcgcgcatattttcgccgtttccggcctgcatgtgggcgcgctttactctttttgcctgctgcttttcaataaaacccggctcaagcggcttccgaaacttttccgttttttctttgtgtccgcgatcctcgtcttttacggcggcgtgtgcggcttttccgcttccgtgacgcgcgcggcggtgatgtgtttgaccctgtatgcctcctctctgatcggcacaaagcccgatcttcccgaaagcgcggggcttgcggcgctgtttcttttgattgtccgtcccgtccttttgttcgatgcgggctttcagctctcctttgccgcctgcctcggtatcggaacgctctcccataccttccgcgcggctttttccgctccctttgcgcgcgccgcgtccgtttcgcaaaatacggcggaaagtttttccttaaagctccaaagggggctcgtttcccttctgtccgtctctttggccgcgcagattgccaccgcgcccatcttgcttcactctttcgggtatgtctcgctctggggacttgcgctcaaccttctttttgtgcctctcgtgggcgcggcgttttcctttctcctcgttcttgcgttcgtcgcagccctgctgccccttgccgcggctcctatcctgctgtatgttccttccatgctctggtcggcgcttctgctggccttttatgcggtcgatttttcttcgtttgccgtcgaaggaatacgtctcggctcggccgcgcttctcttttatgcgttttttatttttctgtcggacaagctcaatcttcccgggcgtttgagaaaggttcttttggggataatctgcctttcgtttgcagccgccgtgtgcgcgctcaacctgtgaaaggcgcgtctgccgaaaggaaaaaaacggtaaaacgtttttcttgcattttcgggacaaatatggtataattaaaaggaaagcaagcgccccttacaggcggatgggatataaaaggaagcaaaggccgcttacagacagatagggcatagcgggaaaggagacgccgctcaaaggcgggcgtatagaataaaaactttagaaggcggagccgttaaaagaaaattcgcggggaggcggagggtatgaaatatgtggactttaaaaaatttacggacgagcacggcgcgcttcccgtctatctgttcgagggagaggagacgtatttccgcgaacggggctgcgagcttctcaccaagcggtttctgaaggagcctacgctcgattttaccgcgttcgagggcgccgcgctgaagggcgataagctcaagtcgctggcggacgccgtcaactgttttccctttttaagcgaaaaacgcttcgtcaaggtgacggaattttatcccgccgaaaaggaatacgacttctatctgaaacccattttcgaaaacccgccgaaggacagtatattgatgattgtcaattcggggaaaggaaagacggggagcgcgccgcttgcgaaaaagccgggcgtcacctatgtggactgcggcagggcggacgaagaaacgataaaaaagtggatctacgtcacgtgcaagcgcgcgggcgtgtatgcggacggtgtcacctgcggcaagatagcggcgtactgcgtctgcgatatgtccagaatcgccatggagacggaaaaactgctgatctattgccgcgcgcggcagagcgaccgcttaagcgacgaaatggtggacgaggtggtctatcccgattccgaatataaaatctacgaattggcaaacgcgctgtcgcgtaaaaattattcggcctatacccgaattttaagcgagctttcgtccaaaggcttcgacgaaatttccctgctcaattccctgtgttattatttcaaggggctttacgaagcttcgctgacccgcggcggcgaccgtgaggtggcggcggcgctggggatcaaggaatacgcggcgcgcaaaaaccgcgagcaggcggcgaagtttcccaaaggggagctgctgcgttgctacaggagcatttacgaagcgatcggcgggatcaaatgcggtgagcttaccgccgcctcagcgctgaaaacggttaccgcgcggctgtttttcggggaaaaaagggcggaataacccttcgaacgcagcttataaaagaaaatgctgtgaaaaacgcgcaaagctatgaaaaaacactttatttttaggcgcgtatcttatataatatattctgtaatcgtatagcataggaaaccgtttgcgggaaacgacggcgggaggaaaaattatgaacacaaacgctttggcggcgggtttcaccgacgcgctgaccaaactcggcgaaaatatcataggcttttttacgggctttaccgtggcctacggcgtggagatagtgcttttttatctgctgatctattatgtctcgaaggtgctccgcgacaacgacgccacgcggctgatgcttctgtattgggggctcatcgtggtcatgggcgcgatgaaatacgcggtggagctgttcgatacgcagttctatttctatttcgtgctcattttgtccatgttcatgttggtcatgttcaacgtggaggtcaaaaagagtctgtgggacattcacagccccgcaaaggaaaagatagagaagctggtcaacggaacggaagcccgttcgcaggcggacgtggaacactgcatttcggacatcatcaaagcgttgcagaacatgtcgaaaaacaacgtcggcgcgctgatcgttctttcgaagggcaatctgcccaagcaggtgatccagagcggcgtgcggctggacgcggagatctccacccagctgatcgagggaatatttttccccaaggcgcccctgcacgacggcgcgatgatcattcgcgggcataaaatccaggcggcgggctgttttctgccgctgacgcaaaagacgagttatcccaaggatttcggcacccgccatcgcgcggggatcgggattaccgaggtggccaacgtggtgtcgctggtggtgtccgaggagacggggatcatttccgtgattaaacagggaaacgttcagcggtatgccgattacgatcttttgaagagcgccctgcgcgactattattggcaggaattgcccctgtcggacaagaaaaacaaataaaggaggcggcgaatgaataagctcggaaaatttttgaaaaacgtatttgtcagaaagctgtggatcaagctggccgccgtgtttctggcgatatttgtggtattgctgctgaatatctgatatttggcggccgcggctgtcacgttgcgcgcgcggcgcttcatacaatatagtggcatggaaatctactgacgacggcggggaaaaggagaaaatccaaacggtagaaaaaggcggttcgtccgaggcgcttttttcggtaaaagcgaggtctttatgggcatcaaggtttgtaagttcggcggaacgtccatggcggacggcaatatcattcagtccgcggcgaagatcgtggccgcagatcctgcgcggcgttacgtggtcgtttccgcgccgggaaagcgtttcggcggcgatattaaagtgaccgatctgctgtataaatgcagcgagctggcggagaccggcggagcttttgaggcggaattttccaaaatccgcacgcggtttttgaatatcgaaaaggaaatcgggctcgatctgggcgtagagggcatgctggacgaaatcgaagaacgggtgcttcggggcgagggcagggactattgcgcgtcccgcggcgaatatctcgcggcccgtatcatggccgcggtgctggacgtcccgtttgtcgatgcggcggacatcgtgcgctttaaggcggacggcagcctcgacgaggagacctacgctttggcggcttccgtattgaaaaaatacgcccgcgcggtggtgcccggcttttacggcaggggcgcggacggaaagataaagaccttctcgcgcggcggcagcgatatttcgggcgccgtattggcgcgcgccgtaaaggcttccctctatgaaaactggacggacgtcagcggatttttcgcctgcgatcctcggatcgtcagctcgccccgctgtatcgacgagctttcctatcaggagctgcgcgagctttcctatatgggcgccaacgtcctgcacagcgagtcgatttttcccgtcaaaagcgcgggtatccccatccgtatccgcaacaccttccgtcccgaggacgaaggcaccctgatcgtggccacgtcgggcagaagacgggaggacaacgtcgtgacgggcatagcggggaaaaaggatttcaccgtcattctgctggaaaaatccatgatgaactcggagatcggctttgccgcgaaggtgctggaggtgctcagccgccacggcatctccttcgagcatctcccctcggggatcgataccatgtctgtggtcatcgacaataaatacctcgaaaacgacgatctcggcgccattttggaggagatccgcgaagcggtgcggcccgaccatatctatacccacgaaaacatcgcgctggtggcgacggtggggcacggcatggccaggagcgtcggtacctcggcgcggctcttcaaggcgctgtccgaggcgggcatcaacgtcatcatgatcgatcagggctccagcgagctgaacattatcgtcggcgtggcgggcgaggactgcgcgccgtgtatccgcgccatttatcgggagtttttctcgtaaggtctttggcggaaagcgttttatgatttttcaaactccgatcctctcgggtcggaaattctttataggaggagcgtcatggacaggctgttgaaaaaaaagacgtactttgcgctcctgtacgtctttaccgcattgttgatagagatcattaccttttgcgtgatggggctgggcgtattcccctccttctggggaatagatctcgcgtttattctgggtctggcgatcattattttcgtcattccttcgcccgtcgcgtccattgtcgtcaacggggttctgctgggcgttcaggttatcgtcgcgtttatcaacgaggcgctctaccgcatgagcggcatggtgttcagtctcaatatgctcaacctcgctacggaggtgggcggggtcttttcgcgcgacttcgtcaattggtggctggtggcggggctcgtcgctctgctggccgccgaaataacgtgcatggtatttctcaataaatatcttaagacggagcacgcccgttttacccgaaatgcggtcatcattctgttggtttgctgtatcatcggcgaaaacgccgcgatgatcctctatcaggccacgctcaacaccttccgcagcgccaccgtgtcggacgagctggccgattataacgacgacaatattttatacaccactcagtttattccctcgaaggcccttaaaaaattcgggtttttcgggttctatttcatgaatgtttccaatacgctcaattccctgctcggcggggggcagacggacggcaggcagtcgcttctggcgctggacaactatttttcgcagggggagatgagcgaatcgacctacggggacaacctctacacgggcgtgctgaacggaaaaaatatcgtattgatcgtcatcgagtcgggggagtggtacggcattaatcaggaatacacccccacgctttacgccatggccaacggcggaatttctttcaccgaatattacgcgcgggataagaccaatcattcggaggcgatgtccattttgggaagctatccgatcgaccctcaaaacgacgtatccacaaaactcaaggagtccaacctttcctttaccctgcccaacgttttgcgggcctcgggatatacgacaaactatttccaccccaacaccaaaagcttttacaaccgcaacgtcacccacggcgcgggcggcaattacggcttcgacacggcgcattttctggaggacatgcccgcgttggacgggtgcgacgaaaacgggaacgtaatcaaaaagaatttctataacttcgacagggacgcgctggtgacggaaaattatttcgacgactatacccgtaaagaggagggcgaccgggcgttttttaccatgcacatgaccctgtcctctcacggcgcgtacaacgatctcgtcgattacggggattatcccttcagcgatttttcagacgagcggtactacgattccgatatgacggaggaggaatgcctgaaggagcaggcccgcttaaaagagaaattttccaaaaaagcggccgttaaaaactttgaaaaatattaccggctgatcgacggctatccccaaacgttcgccgcgaaggggatcgagctggacacttcggacgcctctccctattcgcccgaaacgctggaaaaagtttatcttcggtacaagcgttttcaggcggggctgatggatctggacgaagcggtcaattcgctgctttacgacctcgagcgcacgggccggctggacgatacggcgtttgtgttctatgcggatcacaccgcttattacaacgagcagaactattatctcaaaggggtgccgctcggagagggctggaataccgctctctataatatccccgcttttttgtggtacggcggcagtatggactgcgatctcggcctcagtcgtctgccttacgagggctatcacaatctgtcctttcgggcgtcgaaggatcttaaaagtcctctgcggggcgggacgaaggtggataagtttacctgctcgttcgacattctgcctacgctgttgcagctgacgggatacagctataataccaacctctatcacggcgtcagcatgttttcggacaggagtagcgtctttgtcagccgcgaatcgggattgttcacaaacgatatctattacgacggcaccacggtctccgtaaagggcaaggacggcgtctggacgcattacgattacgagagcacgcgctattcggaggacggctttaccgaagacgtaaaggcttttttgaagcagaccttgcgttactacgaaaaacagtccatgctggaggaaatgtataaatgcgactatttctccaggcggcccgtattcggaagcgttgccaaggacggtaaaatctttcattatattcgtccctgggacggcgcttcggaggcataaaaggtttagtttgtcaaaaaatcgtaccttgcggtgcgaaaaaggagtgataagaaaataatgagaacttacaagatttcgctgaaagaagcgtatgggatcgagggaggacaattggagtgtatcctttgcgaaagtccgtttgacgcccccgcacccgactggaagcgtcccgcggtgatcgtcgtccccggcggagcctattggggcgtgagcaaacgggaaggggaacccgtggcgagccaatttctcgccagaggctttcaaacgtttatactcacttacctttgcagccccgacggcgtttcctatcccgagcagctgatcgaactttcggccgcggtggattacgtaaagaagcacgccgccgaatataacgtaaacgcagacgaagtgtttgtcgtcggattttccgcaggcgggcatctgactgccgatctcgcggtggaatacgcttccgtcaaggaaaaatcgggcttggagctcgattgccgtcccaaagcggtggggctggggtatcccgtgatcagctctaaggcggggcacgaggattcctatataaatctgctgtcgggctatacggaggaagcaaggggggaactgatgaagtccctcgatctggaccaagaagtcacggacgatacgccgcccgcatttatctggacgacgagcacggacacttgcgtcccttccgccaattctctgctttacgccttagcgctggcgaagcacaaaattccttacgagctgcatgtatatccgcagggcgagcacggcgcttcaagctgtaacttcgaggtgaacgtacccgcggaatttttgaagagaaacgccaaatggctggacgattgcgcaagcttcttccgtctgtttacggaagaaaagtattgacgggacgaaaaaatttgatacgacgataaaaagctcccccgacaaacctgtcggggaagcttttactatttttgtctgatgtgggtatatacgcttcccgcaacgagggaacaatcgagcgctttggaaagttgagagacgttcaccacctgatagccgttgtccttgagggcgggaagcagccgctttacggcctcgacggtattcggatagccgtcgtgcatgagtacgatcgcgcccgggtatttctccttccatacgacgtcgtagatctgctgtgcggaaattcctttccagtcctccgtgtcgatcgaccagtcgataagcggggtttccgcctgtttttttactttatcgttaaagttgccgtacggtacgcgcaggaggtgatttctcttgccgtctatcttgcagagaatttcgtccacgacggagatttcctcccggattttttcgggcggcagcttcgtgaggtccttgtgccgattggtgtggtttcccagctcaaaacccgcggcgtaagcctcctttagccgggaaaaggtggtggcgtcgattctgattccgttggaaaagaaggttgcggaagcggggcagtcggggttttgcgcattgaaggaagcaaacgtccgcatgagcggcttcaaagtgacgtcgggcgcgtcgtcaaacgaaaatacgatcagctttttattgatgtcaacgtgggatacgtctatgtccgaggtactccacaccgtttcggaggtatcgtcgcgcgggggagtctttttagcggacgattcttccgaggacgcggaggaagtcgaggccatgcttgggatagacgattccgtttgggcggccgctctctgcgttccgcaggaaacggttaaaaaagtaagtaaagaaaataccaggcaaaaaagctttttcatgacggttatactcctgaatgacagttgacaacagtatctgtttttccgccctgttttatactccttttggctccgcaggcctttttcaactcccgatacattgagtatgcgcgtttgtgattgtatttgaccgcagtacgtcttaaaaatgcttttttgtcaatatttcaaacatatatagacaaaagaaaaaatatgtgatataatagataataaatcgtgtatcaatatatcaaggagcgatatcatgagatactatcttgcggtcgatatcggcgcatcgtcgggccgtcatattctggcgcacatcgagggcggaaagataattgccgaagagatctaccgcttttccaatacgcccgaagcgctgcccggaacgcccggcgcgctgggctgtcaaggcggaaagcggctgatgtggaacgcaaagagacttttccgggaaattctcaacgggctgaaaaaggcgggggagctgggaaaagcgccctattcggtaggggtggatacctggggcgtcgattacgtcttgctggacgaaaaggacgagcctatcgggggcgtttattgttatcgcgacggccgcacgaaaagcgcggtcgcttccgttcaccgccgcgttccgtttgcggagctgtacgcaaagacggggattcagtttcaggcgtttaataccgtctatcagctgtacgacgacaaacgcacgggcaggagcgcgaaagcacggtcttttctcatgctgcccgactattttcattttcttctgacgggcgtcaaaaagcaggaatataccaatgccacgacgacgggaatggtcaatgctttgacgcatacgtgggacgaagaaattatagaaaagctcgattataaaaaggagtggttcggcgagctggctcagccggggacggaagcgggagaatttacggaggaagtggcgtcgatcgtcgggtatagggcaaaagtcattttgcccgccacgcacgatacggcgggcgccgttttgtcggcgccgctcgaggggcagacgccgtatatttccagcggagcctggtcgctgctgggcatcgagcggaaccgcgcctatacgacggacaaggcgcgggaactcaactattccaacgagggcagcgtcggcggccgctttcgtcttcaaaaaaacatcatggggctttggatgatccggcaggttcgccgcgagctgggcgataaatacgattttgcgacgctcacctcgctggcgaaaatcagccgcgtgggagaaaccgtggacatcaacgacgccagatttctttcgcccgtcagcatgatcgacgccatcaatgcctcggtcggaaaacagctttccgcgggcggtatggcgtactgtatctttaacagccttgccaaaagctatgccgaaagcctcgaggggctggaaaagctgacgggggaaagctattcgacgctgaatatcatcggcaccggaagcaaaaacgagcttctcaacgaactgaccgcaaaatatacgggcaaaaagattgtaaccggcccgaccgagggcacggcgatcggaaattttttaatgcagatggtgggggcgggcgagcttccttccgtaggagagggcagaaggatgatcgaaaaatctttcgatatcgtagagctttgacgcggagaaggctcgggaaagggatatggcggcatgatatggagaaacgcggttgtccgccgggagaattttcgacgcaacagagcttgtaaaaaaatttttaaggagatacgattatgggttttatggacgaactgaaaaagagcgcaaagcagctgacgagaaaaaacattttcgacgcgccgtttatgaaggaaatgctcaaggcgacggcgaacatgtaccgtctgggctgggatgaaagaaacggcggcaatatcagctatctgatcaacgaaaaggacgtggcggaatatctcgaccccgacgaagtaatccgcaccattcccacgggcttcgacgcgggcaagctgatcggaaaaatttttatcgtcacgggcacggggaagtatttcaaaaacgtggacgacgaccccgaaaccaatctcggcattatccgcatcgccaaagacggcaccacggcggaattgctttggggatataaggacggcggaagatttacttccgagctgcccgctcatctcatgagccatatttcccgcctcggaatcgaccccgcgcaccgcgtggtgatccattcgcaccccacctatacgattgcgatgaacgccgtttgtcctttggacgaaaaggactttacgcacaggctttggcggtcgaatacggaaagtatcgtcgttttccccgacggcgtggggattttgccctgcatggtctgcggcacaaacgagattggggaggccaccgcggaaaagatgaaaaaattccgccttgtcgtgtggacaaatcacggaatttacggcacgggcagggatatggacgaggcgttcgggttgatcgagacggtggaaaagacggcgcagatttatatgctcactttgggccgcgccgtaaatattatccccgacgagacgctgaaaggactggcggcgcgctttggcgtcacgcctctcgacggcgtattgaagtaaggaggacgccgtggaacgttatgcatggaaagcggcgatcaaaagcggcaaacgcgcggaatatatccgccgtcacgacgagctctggcccgaaatgaaaagtgtgttgaaggaagcggggatcgtaaactactcgatctggctggacggcgaggaggttttcgggtattacgaatgcgaaaagggggccgcctacgctgcgcggatacaggcggaaagccccgtcgtcgagcgttggaacgagtttatgaaggacgtgatggacatgacgatggacgaaaagacgggcgcgcagccgctgctcgaagaggtgttctatctcgaataaacgtcggccgcgggaaatggttttccgcttaaaaaccaaaggccctgttcagcgcctttattcgtttatgaaaaatcccctgttttcgaattttcgaaagcaggggataagttttacttttgcggagttctccgtccgattactcgcccttgaaggggagaagggacgcgattctcgcgcgcttgatcgcggtagcgagaactctctggtgcgccgcgcacgtgccgctcattctgcgggggacgattttaccgccttccgttacgaatttcttcaaacggttgatatctttatagtcgatttcggtaactttttcctggcagaaagcgcagacttttttacggggcatttttttatagctcttccttacggcagtcttttcttccatgacttttactccttatgttattttttcccttgaaaaatcaaaagggaatatcgctgtcgtcgtccaggctctggaggacgggcttctttttagcggcgggagctgcggaacgggaaggagccgcgggcgcgtcgtcgaaggaatcgccgctgcccttgggggtaaggaattccacgtcctgcacgatgatgtccaccgccgtgcgtttgacgccctggttgtcttcataattccgaagctgtacgcttccgctgacggcaactttgttgccttttttcgtgtagcgcgctaccgtttccgccgtctggcgccatgcggtgcaattaaaaaagtccgtctggcgctcgccgtcctgagaggaataattcctgttgacggcaatagcgaagtgacataccgcaacgccgctgggcgtttcggtaagctcggggtcgcgcgttaaatttccgattaaaaaaaccttattcattacaattaccctttagttaagttttgtgatcattcgtctcaaaacttcgccgtcgatgcccgcgatacggtcgagctcgttgacaacgctgccgtccgcttcaaacgtcatgagaacgtaataggcttcgtttttgaacttaatcggatacgcaagctttttcgttccccatttgtccgtggacacaaccgtgccgttcatcgattttacgatagtttcgtacttttcgacttcggccgccttcacttcgtcagtggcgtcgttgttgagcaaatagagcatttcgtactttgccatagttttgtttcacctcccggtcttattcggcatactttttcggtatgcaaggctgataacagcttgtctcaaagctgtattaccattatacccgatttttgccttttagtcaattgtttttaagggaaaatagggcgatttttgtaagtaacgcgagggtggaataaaataagggaacggataattccgttcccttgtctgtttatgcgccgaccttatcgagaagttttccgacataatcgacaagttcggtgatggtcagttcgccgatcgtcgttttttcttggccttgggcattgaaataaggctcgattttttcgagggggccgaaatcgtatttaatattttttctgcggaaagcctcgtccagcgtcagtattttatcgtcggacaaatcgttcagcgtggcgctttgcatgttcgccgtcatgttggaaacgagggaatcaatctccttgatctggcattcctgttccttgccgtcctttacgaggagatatttccaggtgcccgtaagcaccttgctgccgtcctcgccgagcacgtaattgccgtccgcgtcctttttgtagattttatcttcaaacacctgctgaatggtgagcttgtcgaggtcggcggccagcgagttgatagtggaagtatccaaatgcttgaggaaggtgctgccgtttacctgctcctcgccgaggatttccgcaagcgtcatggtattgatccgcgtattgagttcgccgatagaagtttccgcaagatttttaaggagcgcgggatcggtgtctttgatgtcgatgacttcgccgagttttatcgtatttatctggctttgatcgctcaattgggcaattttccaatcggaaatttttgcgagaagtttagagtcgcccgcagtgcccacgagatcgccgatggtaagatctttggtgattgtggaaacgggggaattgtctcccgacagatcgccgatcgtgcggggggtatagtctcccagcatgacgacttcgccgttctccattttataatgcgtgccctcgacgccgtagaggagatacattgtaatcttgtcttcgggcttcgtttgaaggatagccgaaagccggatttcgttgacgaggttggaatccttcaattgcttgatggtgcggggctttgcgtcgccgagcatccggaagcccgtcttattgccttcgccgtcgagaatgtactcgaaatcctcgccctcgtttccgtaggccaatgcgatgagaatagaatcggagcttggcgtgagatcgagaacggtggcaagctgaatatccttgatgatatcggaggcgttatcgcccttcaggtctccgatggaggtctttttgtataatactttctcgcccgcgcaggtttcgtcggtatagagataatattccgcatcgcccgcgctgtcggccttggcgtagtaaatttccgtcttctgcgtttcgtccgtccctttgacgaacgtcaccttatatacgccctcgacgcccgtcgcctcggcggtcaccgcttcgccgttgtcgtcgtagagcacgccctcttttagcgtatatttctgcggcagcatgacaaattcttcttcgacgatcgtgtagtgagtgtcctttccgaacgcgagggaaatcatgatcggatcggaagcgggggtgagattcatgacgcttgccagggtaatcgtatcgaaaatcgcgctgtcgcccgccgtgaggtcgccgatcgtgcggggacccgaatcgcccagccagacgataaccttttccccgtccttttcctcgatgacgtaatcggtgccctcctcgccgtaagcgagcgccagcatcatgggatcgggatcttttttggcgtcgtcgaattgatcgagcggggaaatccccagcacgtcgccgagcttaagaccctttaacagtccgcttgccgtttcgtcgtttctcaaatccttgacggtggtgggcgccttgccgccctcgagacgcacgatcgcgttcgtcgaggcgtcgatctcgtaatcgacgccttcgctgccgtacgccagcgacaacaacattttatccgagctgccgtcgaggcccatcagcgtgcccagctccacattgtcgatgagggaggatgcgtcgccgttcatcaaatcgttcaaagtcgtctttttatacagtatcttgtctcccgcgcaagtttccgtttcataaaggaaataatccgcagctccggccgcgtcgggttttgcgtaatagatcgtctctgttgccgtttcgccctcgccttcggcaatcgtcactttatagacgccgcccgcaaggagctcggacgcggtttcgttgccttcgtcgtcgaaaagcacgccgtccttcagcgtatagacgatcggcagcatttctatggtctttacggtttcttctccgacggtctcttcgacgaccttataatgcttgtttttcgtgccataggcgagcgcgcacatcacgtcgtcggagggatcgaccttcatcaccgcgcccagctcgattttatcgaaaatttcgctcgtttggccgtccgtcagcgacccgatggtggtgggcggcgtaaggggcttgattttgccgtcctcgattatgtaatcggttccttcgctgccgtaggccagcgcgatgaggatcgcgtccgaagcggccgttaccttcagcgcgtctcccagacggatatcgtttaatatacccgtgaggtctccgcccatgagatcgcccacggaaaggggctggtgcttcagaaggttgttttgcttatcgaaggcgtgataggtatcgggcgtttcggccgctgcgagggaacagaccagcgttccttccttggtatataccgcgtaggtataggaaacggtttcttcgtcggccgccgcggcttttacggtcggttgggcggacagggaaagaatatatccgccgtcctccgcgagccattttttgcccgtttcgtcgtaggcatacgtttttccgtccgcgtccgtgatcgagttgttttcctcgtcgtatttgtatcggaggggaagcatcgtcacttcttttttctcttcgtcataggtatagctttcgccctcggcgccgtagagaagcgcgcggatcatagggtcggaattgtccagcgaattggtcgcgttcatgacggcggaaagcgtcattttatcgagcactttgttggtgtccttggtgaggtcgcccacggtggtaggggctgcgcttcccagcatggttacgttgcccttgtcgtctttgacggggcgcccttcgccgtccaccgcataatcgacgcccttttcgccgtagcagagcagcatcaaaatctcgtagctgtcgttactctccacgagaatgcccgatttatcgagcactttgcccacctccaccgtgttgagggtgtccgtgagaaattcgctcattccgctcaacggcgtggtcatgagcacgtccgtatccacagccaccccgtattccgaaatcttttttacgatgctctccgccgtctcgcgcactttcggggaaaatttttccaaagaggaaaggctggccgtctgattctggaaatcggaggagagcgcgccgaggtctttcatcagctcggcgatcgtcttctgggcgtattcctcggtgatatattcggtgtaatcgatgtcggagcccgtgattttattgacggctttgaagccctccgcaatctttatcttggcgtataaaacataccccaggcccgcgagtccgccgagggtgcagataatgccgaacaaaaaacccagaaagacggcgaggaactttccccaaaaaccgccgcccctgcgctcgtattccgtgtcgtcgtaatatgtagccataccgtttacctcacttttttcgcttccgccgttgccggggaagccgtttgcgtcgtatttgtccgcggcgcaaaaccgccgcgttttccgtattttcttttgtataattacattataatgcatttcggacgaaaatgcaagtatttgtccgaaattttcaccgaaagaagaaagttacggcctgccgccagcgggcggcgtatcgtcgggaaactcggaaaggaggttgtcgttcggaatgccgagatcgacgtttttcagcttctttgcgatggcgcgcgttctgcccgcggccgtctctatcgtatcctgcgcctcctgaagctttttctgcgtcttttcgagcacgtccgtaaacttcccgaattcgtgcttgaacacggccaaaagctgccaaagctcctgcgagcggcgctcgattgccgacaccttaaaacccgtctgcagagtggataaaagcgcgctcagattggtggggccgcagacgaggatacggcgcagggagagatattcgctgagatcgggaatcttcagcacttccgcatagaggctttcgatgggcagatacatcaccgcgaaatcggtggtgcggggcggcagaatgtatttcgacgcgatcgagtcggcctgaagctttaccgccttgccgagatttttcatcgcgcgctcctccgcctcgcggttgcaggcgttttccgcgtcgatgaggcgctggtattcctctatgggaaatttgctgtcgatggggagataaatgcacgcgccgtttttgtcgggcagaagcaccgcgaaatccaccatcgcgtccgtgagcgggttgagcttgacgccggccgcgaattggttgggcgccagcatctgcgaaaggagcgcgcccagctgcgtctccccccaggtaccgcgcagctttacgttggaaaacacttttttgatgtcggagacgctggccgcgaggctctgcacctcgccgatcccgcgatagaccgcttctaaccgctgctgaatgacggcgtagctttccgtcagctttgtttccagcgtccgggaaagcttgtcgtccacggtgcgccgtatttcgtccagcgcccgttgattgttttcggaaacgtaacgaagctggtcgtttaccgtcttttgcatattgttgagccgatattccgtcatggaaccgagcgacgtgatcgatttgttggtgtaatccgcgaccccgccgagtttgtcgattttttctttcagcgcttccatgctcccgtcgtttttcttctccgttcccttgttctttttgagaagcagggcgaacagcagcagtatgcagagcagaagcagggcgatacagattaggataagcgttttttcggtcatatattttttccttgtatttcctttgtgaagttgggctgccgcgcgggcgcggggaggggacggccgctttttatcgggtttttcagacgacagacgggggcaatcggccgctttttgtcggggttttcggatgacagacgggagaacaatcggccgcccccgttcggtaaaacgaaaaaccgtcagccgctttttttcgtcggttttctctccagcgcggtatgcagggcagacggggcaagaagaagcagccgttcttttttattgtccttgggacataccgcgcagtgcaggagcaactccctgaggacggaggaaagcatgcgggcgggaatcccgctctcttccagctcccgtcccgacacggcaagctgcctgagccgcatgggcgcgcgttctctctgcattttttcgagcagagcctgccatttccgatcggtagggcagggggaaagatcgtccatacaacccgaatagtccgcctgcttcaaaagcatcaatttttcgagcagatcggcttgccggacgaaaaatcgacgaagcttgttttctttcgctctgcagtcgaaatcgtacatgtgccagaggacgaggtcggcggtttccgccgcgacgtgcttgggcgctttcagccgtttgaggatatcgcccgcaatccgcgcaccctcctcggcatgatcgtgcgagtccccgtcccgcagcgtgcagaaaggctttcccacgtcgtggagaagcgcggccagccgcacctcttcgtcggcgtacaaaacagcgcgcagggaatgctcgagaacgtcgtatttatgaaagtctttacgctgtaccatgtctttaccgagcgtaagctcggggagaatttccccgaggacgcccgtttcctcgagcgccttcagcccctcgtaatgcccgcgcgggttatcgtagcgtttgtccgccttcaaaacggcgcacagctccgcccagatgcgttcgggggaaatgtcgcggatgagcgcggcgttggccttcgcgcccgcgagacagtcggcggagggggaaaagccgagctgtcccgcctgccgtgcgaggcgcatcagccgaaggccgtcctcgccgaataccttttccgcccgatcgacggtgcgcaggcgtttcgcccgtatatccgagattccgtttaagggatcggcgaaagcgtccgccgcgatatcgtaatagacggcgttggcggtaaaatcccgccgctttgcgtctgaaacaatatcctccgtaaaaaatatttcgacggggacatgggtgccccgcacgtatctgtccgaacggaagcaggtgtattcgtaatccactccgtccgcgtccttaagcttcaccgtacccgtgtggcgatagaccgcctgcggaaaaaagccgctcctctccgccgcggacaaaaagacgtccg

SEQ ID NO: 4331 - DNA, 19211 bp, Unknown
  16S sequences of unknown bacteria
gagggttggataaacgacgctgtgaatttttgggaaaatcaaatgcaatgattagctcaaattatcaatagatcagagaaaggactatgacaatgaataattttatttttgaaaattctacaaaggtgtttttcggaaaaggatgtgtaaaggaatacctttcctgcctgacgaaagcctacggcgataccgttatgctatgttatggcggcggctcaatcaagaaaaacggtatctatgacgaggtaataaacatcttggaagccgcaggaaaaaccgttgtggagtttagcggtattatggcaaatcccacctatgcgaaggtattggagggtgcgaagctggcaagggaaaatgatgtcagtctgcttttgggaataggcggcggttcggttatggactgctgcaaggcaatttctgttgccgcctgttataacggcgatgtatggaaagatttctgggaaagacctggcgtttttgacttccggccgttacctctcggcgtaatcgttaccgtggcaggtacgggcagcgagtgcaacggcggctcagtcattaccaatgaggaattgaaaatcaagacgggcagagattatccgcaatgtaaccccaaatttgccctgcttgaccccacctatacttacagcgttcccaaaaagcaaatggtttccggcggctttgatattctgtcgcacattatggagacttatttcagcgagccgaatgaggacaatgtatcggacgatatttccaaggcgcttatgcgaagtgtaatccacaacctgcgtgccgctattcaaaatccgcaggactacaccgcacgaagcaatttgatgtgggcggcgacaatggcggaaaaccgtgttatcaaactgggcaagcgaatggattttgagtgccaccaaatggaacaccagcttggtgcatacacaaactgcaaccacggcgaggggcttgccgttctgcaccccgtttattaccgccatatttacaaatacggcttgccgaaatttaaacggtttgcaaccgaggttatgggagtttcggcagaggccaaaacggacgaagaaatcgcccttgcaggtattgaggctttggaagatttcattgtcgaaatcggactgcctgtatctttgcaggccttgggcgtgaatgaaaataccgacttaaaagaaatcgcagattcctgtgccattatgcccggcagttacaaaaaaatgacccacgaagaaatccttgcaatctttaaagaatgttattaaaaccggaaaggaagaagaacaatgaaaaagattatttcgctttttatggcacttgctatggtgctgtcgctggcggcctgctcgacaaatcaatcccccggcgaatcaacacccgaagaaagcagttcgcagacaaacgagagcacccctacgctgagtaacacaaacgggaaaaatcttgtggtgtatttctcaatgccggataatgttgatgacagtacggttgtcatagacggtgaaacattgggcaatacgcagtatatggcttatgtaattcaggaaaccgccggcgctgacattttccgaattgagccggaaacaccctatcccaccgaccacgacaagcttgttgaccttgcaaaagaagaacaaaacgacaatgcaagaccgaaaatcaaagatatgattgaaaactttgatacttacgaaaacatctttgtaggttatcccaactggtggggcgatatgccgatgatcctctattctttcttcgacgagtacgatttttccggcaaaacgattattccctttaacacccacggcggcagcggcttttccggtacaatttccacaatcaaagaacttgaacccaacgccgaggtgttggacggcaaatctatctcccgcaatgatattcaagacgcagagcaggaaatcgtagattgggtaaattctcttgatctgaaacaagccgaagaacagcagcctaccgatgaaacaggaaaaacattggttgcctactactctgcaaccggcaataccgagaatgtggcgaattacattgccaccgcaacagacggcgatttatttaagttagagcctgccgagccgtacagcgacgccgaccttaactggacggacgataacagccgtgttgtgcgtgaacacaataaccccgatgagcgtgatattgcccttgtaaaaagcaccgtagaaaactgggaggaatacgacacgatttttatcggctatccaatttggtggggcattgccgcttggccggttaatggctttattgaggcaaacgattttacaggtaaaacagtcattcctttctgcacttcttccagttcgggacttggcgaaagcggagaactgcttgcagaaatggcaggtacaggtgattggcaggaaggccggcgttttcgttccggcaccggtgaaagcgacgtagcggcttgggtagagagccttgaaaaataacgctacaaaaactaaacaaggagaatttgaacaatgaaaaatatacttatcttatcaggcagtccccgtaaaggcggcaactccgatttgctctgcgatgagtttatgcgcggggcaaaggaaagcggaaacaatgtaactaaaatcaatgttgcaagcaaaaaaatagcgccttgtcacgtctgctatttctgccgtgaccacggcggtgagtgcgcctataaagacgatatggctgaaatcttgcaagcgatgattgacgccgatgtgcttgtgcttgcaagccccgtttacttctattccattgacgcacaattaaaggcggtaatcgaccgaacagttgcacgctggctggagattaaggataaagagttttactacattatgaccgccgccgatgaagataaatcagctatggatactacccttgcctgtttccgtggctacgcagactgcgtaaacggtgcaaaagaaatgggtgtaatttacggcacaggcgtttatgaaaaaggtaatgtgctgaataccccggctatggctgaagcctatgaaatgggtaaaaatgtttagaagataaaatcaggaggaataaaaaatgaacattttgtttatcaacggaagcccaaatccaaacgggaatactgctgccctggcaaaagagcttctgcaaggaaaagaatacgaaacactgaatctgaccgattataaaatcggaagttacggacagaaattggagggcgacgggctgggccaggtcattgcgaaaatggaacaggcagaggtaattgttatcggctctccgctgtattggcacaacatctgcggctcagtgcgaaatatgctggatcgcttctacggtttagtggaagacggctcattgtcgggcagaacactttatttcctttttcagggggctacgccggaaaaatggatgttggaagccggagaatatacgatgaaacgctttgccggactttacggaatgaaatatgccggtatggcaaccaatcattccgaagcggctaaattatcaaagaaactttaatatcacattttaggaggatagcaatatggcagtaaaacaaacagcaggaagaaccgtccttggagaatttgcacctaagttcgcagagctcaatgacgatgtacttttcggtcaggtatggagcagagaggataaactctctttgaaagaacgctctttgattaccgtggtagcacttctttcgcaaggacttacggatacatcattcgttcatcatctggaatcggcaaaggcgaatggtattacaaaaagtgaaattgccgaaattattacacacgcagccttttatgcaggctggccaaaagcgtgggcggctttccgcttggcaaaagatatttggaaagaagacacaaaggaaacggacgaaaaaaccgcttatgaaaaatctatgatgttcccaatcggacagccaaacgatgcctttgcacagtattttgtgggacagagttatcttgcccctgtttcaaaagaacaggtgggcattttcaatgtaacttttgagccgggatgtcgcaataactggcatatccaccacgccgagaaaggcggcggtcagattttagtctgcgttgccggcagaggtttttatcaggaatggggcaaggcaccaatctgtatgacggcaggtgatgttatcaatatcccggcaggtgtgaaacattggcacggtgcagctccggatagctggttctctcatcttgcggtggaagtaccgggagaaaatacccataccgaatggtgcgagcctgtcagcaacgaagattatgcaaatataaaataaggagcaataaattatggaatatgtaactttgaataacggaatcaaaatgccaatggcaggaatcggagtttttatgatgtcacctgcagaggcagaaagtgcggttgaaaatgctctcaaaagcggtgttaggcttattgatacggcaaacgcctatatgaacgaaagcggaacaggccgtggaataaaaaacagcggcatcgcaagagaagatatttttctcgtaacaaaactatggccaactgtatatgaaaaagaaacggcgattgacgagagcttgaagcgccttgatacagactacattgatctgctttttcttcatcaacctaccgataactggcgtgaaggatataaagccattgagaaggcttataaggagggaaaagtgaaggcaatcggactttcaaatttccccgatgagcttttgcaagaggctattgatactatggaaatcaagccgcaggtagtacaggtagaggcgcacccgtattatccgcagacaaaattaaaagagattctttcacaaacagatatggctcttatggcgtggtatccgttgggacacggcgataaaaatttgattgaagagccgctgttctcgcagcttgggaaaaaatacggaaaaaccaacgcacagattatcctgcgctggcatacacaatgcggcaacattgtaattcccggttctaaaaacctggagcatatccgtgacaactttaatattttcgatttttctttgacagatgaggaattgtcggagattcaaaagctggataagaatacacgctattatacggctacgccggaactgatagaggcatacagcaaaatggaactgaaagaagatttgtaatgcaatggctgttacaataacagcgaaaagaggggaaataatggaatatgtaactttgaacaacggaatcaaaatgccgaagctgggctacggcgtatatcaggtatcaaatgaagaatgtgaacgatgcgtattagacgcaatcagcgtagggtatcgctccattgatacggcacagtcatacggcaatgaggaagcagtcggaaacgctattaacaaatgcggggttccccgtgaggagctttttattacaacaaaggtgtgggttacaaacggcggttatgaaaaagcaaagaaatctcttgaggaatctttacgcaaactgcaaaccgagtatattgaccttgttttgattcatcagccccttaatgattactacggcacttaccgtgcaatggaagaagcctataaagagggctggattcgtgcaatcggcgtttcaaatttctatcccgacagactggtggatttttgcaattttgtagaggtcaagcctgcaatcaatcagattgaaactcatgttttccaacagcagaaaaccgcccacgagtatatggaaaaatatggcgtacagcacgaatcttggggacccttcgccgagggaagaaaagatttcttcacaaaccccctgttggtcgaaatcggcaaaaagtacggtaaaagtgttgcacaagttgcacttcgtttcctcttacaaagcgatgtagtggtaatcccgaaatccacccacaaacagcgtatggaagaaaatatcaatgtcttcgattttgcccttgacgaaaacgatatgagagctatccgggcattggatgaaaaagagagcctgttcttttctcactacgatccggcagttgtagaaatgcttacaaaactgcattaacagcggtttcaaaaaggggtgaaattagtgaaaaaaggagtaattctctctgctgttatattgattgtttcacttttgcttaccgcttgctcggcaaatcagccgacagacaataccgaaaacaacagcacatctgtcatcgttcctgccgaatctgaagtgacgaatgaaacagaaaaatcacccccaaaaacaggtgttatcgccgagcagattctaaacggcgaccacggtgaaattcattatagttattacttgccggaggattacgacgggggcaagacttatccgctggtaatgacaatgccggggtacggtatgatgtggttcggcgaggattcgtcgggcagtaatttggagtggaacggttttagggcatggacagaacttcccgaagatgtgattgtagtttctgcacagcttaccgactggcacgaaacatctgcagggcaggcgattgaattgaccgaatactttatcgaaaacttttcagttgacaaatcaagagtttatgctgccggatattctgccggtggtgagacaatgtcgcaggcggtttctatgcgacccgatttgtatgcggcgtatctgcacggagcttcccaatgggacggtgactaccggccgatagcacagaatgatgttgctgtgtacatctttatggctgaaaacgacgagtattacggctctgaaaaggcacgctctgcctatgagggcttgcaagcggcctaccgtgaaaagggatatacagctgagcaaatcagcgaattgctggctcttgaaatccccgacaacgaatactttaacagccgtggaatttacaactaccacggcggaggaaatatccttttcaatgacgaaaacattttgaattggattcttgctaaacgaaaggcataaagagtatttcttgctttgctaaaactttttcagaaagagcatacaaaaagttctcaagagtattgacaaacatatgttctgtgatgtatgacaaaattctcaaaaatgagaacgacaattaaatatagtaaaatcacaattattagcagacgactaaaagtcggataaagtatgcgatatgctaagcgaaaatatcgccgctttcgccaacgctttggtgctgttggcaggcggaaagggaataaacagtcctgtcttttaatttcaaagccgatacattaacgtgataccaaacccaaatgggataagcctatccttttgaggttaagtcggtatgcgtttgtgtaccggcttttttgttgcccaaaattcggttacaactgaatgaccggctgaatgggatatgactgagggatgacttctttttggaaaagagcatagcaacgctgcggtgtgaccccgtggcaggaactgcatttagggagaacggcaaatagcataacggttgcggcaatacggatgtcgcataccgtaacgagcagggaaactgtattgacagtttccgcttaaatcgacagcctgcgttgggatataagccgagagcagttcttcccgaagtattcttctctttttatgacaagttagatgaactctgcgttgcttgtgagggcaagatctcacctgatacggaagaaaaattattgcactcattgacagtattaccgaagaacttgatactgccgaaggatgaaagaatggtgcaatcggggctacaaccgggttttggcctgtcaaaagcaggctcaaagaagtaattgattatgcgggaacccccacaagaccatagaaaaaaagtatgtggacagcgacctattcgccgccttgcagtatgctgcagatgataagaaaacggatgagtgcttttcaaaaatgctccaaaactgtgaaaaaacaaaaggcattgacacaagaagttgccgataaccgacaaaccttacaggtggcaaagcaaaaatcggttgatttaaggttgctgttaaaaccttgcgtgatatgaccgagataaacgaacccacgccgacacttgaaatttctctgattgagcgtattgaagtccataacaacgataaatcaaggggtcattgttatgtgaaagcagatatttactttgctgcggttggtatgatagatattccgaccgaaaacgaaattcttgctgcgacggaagaaatccgagaaaatccgcaaaacttccgcttcacagcataacaaaaagatatggtgtaacccattttactgagttacaccataccctacataaaaacttccttatctggcgtcgccaaaaagggaatgcagtttttatttgctttgatttttaaattttgttctttttgatttttaaccaaataacatatcctgcccaaattgcaacgcccagagcggataaagcggacgataaaccaaggtaaggagttttataaataaatgtgatttcgttgtcgccggcaggggcatacactgcacacataccgtaacttaccttttctatttccgtttcaacaccgtttacataggcggtaaagcccttgtcgtatggcacagagaaaaacaccaaatttgccttatccatttttattttgcagtcaaagccgtcgtcggtttgattgaaataatagcttgccatattgccacggtctatgcagtctttaatatatctttcgtatgaaaaatcatataaatcgtcatcgcttaacatttcaagttgtaagtcatatttttcggtaagggaaagatcttcaaaggccaaggcacgcattaaaatgttgctgcggcggctggcgtttatagcggacaaactgtcataagttacgaatttatcatagcaaaagcccatgggaacaaaatacttattctcatagatattataagggtaatcgtcctttataagtttatattggtctaagttgccatcttctttgtagtttttaacttcccagttgggcatcataagatattttacgcttaaaaggccacggatggcataaattgacgggtccggttttgaggaaacatcacgctttacgcccaccgatgggtaaaattccattatagacggcgttaccgtactgttgaaaaaccttatacacggcaccccggtaaacagagacatattgtcgtaacagttgtaggcgtccatacggtaattttttgtttcgtcatcaaagccgaaatcttccaaaatatcatagttttggggtttgtacagttgatcggcttcgtactggggcattttggtaacccccatgtgtaaaatgccaaatagcattataactaccaaagctccgctttgaagttttaatgtgtaatttgttttatctttgtaatttgaaatggtaacatacacaagataaaggctaagcagggcgataagcatgttcatccagtaaatagccacttcagattctatgcctataaacagcttgccctcatggtctgtgggggtaaggccgaatatgacaaagattgcggttataatccgagttatttttaatccgtggtatatctgttttttatccatggcgtaactttgcatattcatggcccgaagcataagtatgggcatatagaaccagcgagcgtagtaagatgagttaaaagcgtagaacatactgttgaaaacaggtataaaagcgcagattatgcaggcggaaaatgttataaagaaagccgagtgcttgttgtactttttgaaaacgaaaaagccgaacaaaccgccaaaagctacaaatgccgaaagacttgtccatttaatattgccggatgtgaaaagggacggaatgtaagggggatccggcggaagaaatgcagaggcaagtattgcaaaatattgctgaaccgtactgtacatccaaatgccgaaattttgcagggaatttaaaaccctggggttttgcaccagagaaacagcggagggtataagcagtaccatgcccattacacagcctaaaaccgcttcaaaaaacagattgaaaaactttttaaatggtatgcgatattcaccggtatatacttttacaaaaaagtagattattaaaaataccgcttgccccacaaagaaaaagtagttgtttattaagtttaaagccactgccaccgggaaaatggcttttctgtcattgtaaacaaattcatccattgcccatatcatatagggaaagaaaacaacggactcaataaagtggttaaagaatatgttgtaaatcgcaaaaccgctgaatgtgtacagcaaggctcctataagggcgtagttgtcatcttttgcatatctgcgcaaatagccgaaagcacccaggcagcctaccgcaaatttaagcatgagcaaaaatggcataaggtaaggtattgccttgtaggggaacaggcatgcaagccaaaagaatggggaacctaaaaggtaaaaggagtaacttgtgattaccgaagaacccaagtcgattgcccagccccattttaaattgccgctttgcaccattcttaccatatacatataaaatggtatctgctggctgttaaagtccccggcataggtaaaaaagcccttatccacaacgagaaagggtataaaaaggcagaatgccgttaaaaaaccaagcaaaaacgcctttaaataaaaattatgttttaaagtatttttaattttagtcattattacctctttaaaaattgtcgaatatcggtatgtaatcaattatcggcgttttcttttaaaatttctgtgattatattttccacatcttccatacggcacatggtgtttgtcattccacgcaagcgccgagcgcctcttaaccctttaagatacatggctgtttgacctctggcttttttaatgccggcctcctcgccgtttaccgtccgcaaccgctttacatggcggcgcaaaagttcaactctctccctaaccgacgggtctgccggtatgggcaagcccttgaaagcccggtctgtttgaccgaaaatccaaggggagcttaatgcccgcctgcctatcataacccggtcgcagccggtgtaatccgccatttttaaggcgtctgccggggttgttatatccccgttgcctattaccggtatgtttaccgcttcctttacctgtttgattatgtcaagatctatgccgggggtgtacatctgccgccttgttctgccgtgtaccgttataaagcttacacctgctttttctaccttttgggcaagttccactgcggttatgcagttgtcgtcccaacccttgcgcattttcacgcttacaggcaagccgccggcgttttcaacaaccgtccgtgcaatttttgcggctaagtccgtgttcttcatcaatgcgctgccggagttgttgtttgtgattttcggtgccgggcagcccatatttatgtctataaaatccgggtggtactccaaggcaatttttgtggcgattttaaaatcttccgggtcaaaaccgaatagctgaatgccgtacttgcctttgtgggggtagctttccataagactgcggctttttttatcgccgaaagccaaagctctggccgataccatctcgcttacggtaaaacctgcgccgtaatcatcccgaatttggcgcattacaatgtcgcaaaacccggccataggggcaagcaccgccctgttgtctataattaaaccgtttaaattcatacaaaaattattttcctttttatcacaataaatttgtcaataaattataccataaaattattatttgtgatatactgtatattgtaaattaagatatttttaattaaggagttatccccatgaagttacttgccattgacggcaacagcattgtaaaccgtgctttttacggaataaaagtgcttacaacaaaaaccggccaatacaccaacggaatatacggctttttaaatatattgcaaaggcttgaaaaacaggtggagccggacggggttgtcatcgcttttgatttaaaagcccccacattccgccacaaaatgtatcgggattacaaaggcacaagaaaaggtatgccacgggagcttgcagagcaaatgccgattttaagagaacttttgccggctttgggatacaaaaccgtatcggccgagggctatgaggcagatgattttttagggacattttcccgaatatgcgaggagcagggagccgactgctacattgccacaggtgacagggacagcttgcagcttgtgactgacaaaactacggttatacttgccacaacaggcaaaagcgagtttatgaacccggaggctgtggaagaaaagtacaagcttaaagtaagtcagcttgtagatctaaaagctcttatgggagattcctccgacaatatacccggtgtaaaaggcgtcggcgaaaaaaccgccgtggctcttttgcaagattttgcaactttggacggcgtctatgaaaatatagacagcgacaaaataaaaaaagcaatgagggaaaagctcattgccggcaaggatacagcctatctttcaaaagagcttggcacaatttgcaaaaccgcaccggcagacccggatttgaacctttacaaaaggggcataggcgagcctgaaaaggcgaaaaaaatactgaccgatttagaaatgttcacctttgcggaaaaacttgttctcgccgtaaacacggaggatgaaaagccgaaactctcaaaggcggaagtaaaagactacgacggcagtctaaaaaagtgcgttgtaatgcaggacaaaaacgggtttgctctcgtttgggaaaatcgggtacagcgcctggaatatgcggacgaaagacttaaaaaatttttggagggggaagaatttgaaaaaatcgcccttgattccaagtcgatatacagatattgttttgaaaacaacatagagttgaagaatataatttttgatattcagcttgctgcatatcttgaaaacccccttgccggcaactatgaaacagacacaatggcaaacgactttggccgggaacaaaaatttgaatgtgatattccgggggcaggttttgtgcagtcctgttatgaaattttatctcaaaaagttgagaatgaaaatcagcaccggcttttgtatgatattgaaatgccgctggcggaggtcttggcggctatggagtatcggggctttgcggtggacaggcagggaatagaggaattcggcgaaaagttaagggaaatgattgataaaacccgggaagaaatatatgttcttgtaggtgaaaaattcaatctcaacagcccgaaacagcttgctcatgctctgtttgaggttatgggcttgccaagcggcaaaaaaacgaaaaccggttattccacaaatgcggaaacactggaaaatctgcgccaatacagcccggtaattgatatgattttaaattaccgcacatatcaaaagttaaattccacctatgttgaagggcttatagacaaaataaagcccgacggcaggatacattccacatttaaccaaaccgaggcaagaacaggcagaatttcatcttccgagccaaatttgcagaacattccggtcaggacaaagctgggcagtgagatgagaaaattttttgttgcaaaacccggatatgttttgcttgacgcagactattcgcagatagagttgcgtattttggcacacataagcggcgataaagttatgcagactgcctttttaaacggcgaggatatacacacaaggacggcggcacaggttatgggcatacccacaagcatggttacgccgcaaatacgcagccgtgcaaaggctgtaaacttcggcattgtgtacggtatttcggctttctcactggccaaggacataggcacaacggtgagagaggcccaagattttatagacaactactttaaaaatttcagcggtgttaaagattaccttgacaacacggtaaaatttgcccaggagaacggttatgtcacaacaatttacaaccgaaaaagaatgttgccggaaataaacagttcaaataaaaacgttcggtcggtaggtaaacgcatggcaatgaacacacctattcaaggcaccagcgcagatataataaagattgccatggtaaaagtttacaacagacttaaagccgaggggcttaaatcaaaattgattttacaggttcacgacgaacttatcgttgaggctcccgccgatgaggcagagaaagccgcaaaaattttacatgaagagatggtaaatgccgcaaaacttaacattccgcttaaagcggatgtaaacagcggcgaaaactggtacatcgcaaaggggtaaaattatggaaaatacaatgttaagcatgaccgaaattaaacctttcggcataaattatatcgaggatgtaagtgaaattcactttcaggtatttgacggttggagcatgaaaagccttataagcgacattgccaacagcgcaacaaaaagttatgtggccgtttgcggcggcagagctttggcttttgtttcatatcttatgaccgacgatgcggaaatgctgtttgtatgcacgcacccggcgtacagacattccggtcttgccacaaaattgctaaaagaaaccattgctgccatgccggacgaaatacaccgtgttgtcttggaagtgcgcagtaaaaaccgggaggcaataagcctttacaaaaaactcggctttgttgaattgggcgtccgccgtgatttttacaccaccccaaacgacgacgcaatagttatggagttaaacttcaggggtgcaaaagaattagattaaattgataggaagttatataagttatgtatattctcggatttgaaagcagctgtgacgaaacggcggcatcaatagtcaaggacggcagagagataatctcaaatatcgtttacacccaggtggaagaacacggtctgtacggcggcgtggtaccggagatagcctcacgcaggcatatagacgcagtcagtgaggttatgcaaagatgccttgaccaggcgggtatgactatggatgacatagacgctgtggcatgtacatttgcccccgggcttataggggcgctccttgtggggcttaattttgcaaagggcttggctttcggggcagataagccccttgttccggtacaccatttaagggggcatatcgccgctttatatctcacatatccggaacttaaaccgccgtttatgtgcttggttgcctccggcggccacagccacatcgtagcggttgaggactacacaaaatttaaagttataggtaaaacaatagatgacgcagccggcgaggcttttgacaaggtcagcagaacattgggcctcggctatcccggtggcccggcaatagcaaaagccgcattgaacggcgatatgcataaatacaaactgcctacaccccataccgaaaataaatatgatgtaagtttttcgggcttgaaaacagcggttataaatatttataacaccgataatatgaaaggcgttcagacggatattgacagccttgccgcatctttccaggaaaaaatcgcacaaattctctcggataatctcacaaatgccgcaaaggaatacggctttgacaagatagctattgccggcggtgtttccgccaacacaaggctgagagagctgatagagcaaaaggccgacggcagaaaattctacgctccccgaataagcctttgcggggataatggggcaatgatagccgcccagggctattacgagtttataaacggcaaaaccgcaggcctggatttaaacggaataccctctctgccgatagattttgactgttgacacttgacaaaaccgtcaaaaactgtaaaatatagaatagcgtaatttataatcgaaaggagattattatgacaacttttgaaaagttgaaaaaaatcatcagcgaacagttgtatgttgatgaaagcaaaattacgatggactcggacattgttgaagatttcgaggccgacagcattgaaatggttgatattgttatggatatagaagatgaattcggcgttgaaattcccgatgacgctatggaaaccatgcatcgtatcggtgatgttgtcgaatacatcgacgcaaataagtaatataccgaacatacattgtccccgatagcaatatttgggacagtgttttttaaagatatttttaagaggtaaaaaatggcaaaagagaaaaattttgtaaatgaaatcactgccagagatgttgattttgctcagtggtttaccgatatttgcttaaaagccgagcttgttgattactcatcagttcagggcttttatatcatgcgtccatacggttgggcactttgggagaacattcaaaaatctctcgatgcaaaattcaagcggacaggtcacgaaaatgtggctatgcctatgcttatcccggagtcacttttgcagaaggaaaaggatcatgtaaacggctttgcaccggaagttgcttgggttacacacggtggcagcaaggaaatggaagaaagactttgcgttcgccctacaagcgaaactttattctgtgaccactggtcaagagttttgcagacataccgtcagctccctatgaagtacaatcagtggtgcagcgttgttcgttgggaaaagacaacaagacctttcctcagaggcagagagttcttctggcaggagggtcacacaattcacgaaacagcccaggaagcaaaggacgaaaccttgcagatgcttaatatttattccgattttgttgaaaaggaattgatgatacctgttattaagggtcagaaaacagagagcgaaaaatttgcaggcgcagaggccacatacacaatcgaggctatgatgcacgacggtaaggctttgcagtcagctacaagccactacttcggcgacggcttcccaagagcctttgatgttaagtttgccgacagaaacaacggtctttcatacccttatgaaacaagctggggtatttccacaagaattatcggcgctttgattatgagccacggcgatgactacggccttattatgcctcctcgggttgcacctattcaggttgtaattctcccgattgcacagcacaaagagggcgttttggaaaaggcaaacgaacttaaagcacagcttgaaaagctttacagagtaaaacttgacgacagcgaaaactcaccgggttggaagttcaaccagtatgagatgaagggcgtgccgctcagacttgaaatcggcccgaaggatattgaaaacggtcagtgcgttcttgtgcgccgtgataaccgtgaaaagacatttgttaagtttgaagatttggaatccgaaatttcaagacttttgaatgagcttgcacagaatatttatgatattgcccttaaaaacagagaggcaaaaacagaaactcttgacaatatggaggatattattgcttcatcaaaggcaagagacggttttgtaaaaactctttggtgcggtgacgaggcctgtgaggatatgatgaaagaaaaagccggtctttcaagccgttgtatgccatttggcgaacaggatgatattgacggcgtttgcccttgctgcggcaaaaaggcaaagcacagagttatctgggcaaaagcatattgatttactaagtcattttaaggtgatacctcacactttgtgtgcggtattgccttatgtttaatattaaaaattaaaaaatttggaggattttattatggcatttatgtcttacgacccatgggcaggtattacaagcagaaacggtattcccggtgatgaattggttgcaggcttgcagaagtctatcagaagggcaaatcgggaaatagctattgatatagcttatgaaatgtacatcacaagcgaacagtttgaggacaagctctggcgccgtcttacaattatcgcctgcgaggacatcggtttcggcaaccctaacgcaattacaatcataaacaatttggacatcgcaagaaagaagttcccttacaccgacggcgacagacctttcttctttatgtatgcaattcgtttcctttgcgcacagcctaaggagcgctcaacagactgccttaaaaaccttgttatcaaaaaatttgaacagggttatgtgcctacaataccggattatgcctatgatgtgcatacggttaaaggcagagcaatgggcagagatgtaatgcacttccttgacgaggcaagtaaggttttccctgttatggagggctatgacgacacataccgcttaaaacttaaagaagttattaagaaagaacaggaagaaaacatccagccgaaagagggctctttcacttacaatgtttggcaggcctaatttatgaaaacggctgttataacaggggcctccgggggcataggttttgcaatcgggcaaaaactggccgctttgggttaccatacggttttggcgtacaacagcaccccttgcaaagaacttgaaaattccgttgccgtaaaatgcgatgtgtcggattttgaaagcgttgaaaatttgtacaacatcgcccttgaaaagctggggcatatagatttggttgtaaatcgggcaggggttgcccacacagaccttgtgcaggatatgagccggcggcagataaaccgtgttgtgcaaacggatttaacaggcactattttctcctgtaaatttgcagggggaataatggcaaggcaacacttcggcaacattattaacatagcctctgtttggggggtgtgcggtgcctcttgcgaggcggtttactcccgggcaaagggcggtataatcgcctttacaaaggctttggcaaaagaacttgccccatgtaaagtaagggtaaactgtataagccccggggtgataaaaaccaaaatgctggactgctatacacagcgggaattggaagatttggcaggggaaacccctcttgaaagattgggtttgccggcggatattgctgaaactgctgcgtttttggcaggagaaagctcctcttttataaccgggcaaaacatagttgttgacggtgggtttatactgtaaaacaaagataaaattaaaagtcggcgtaaaagccgacttttgtgttattgggtgttttggcaggcggtggggtgtgttaaagtgctgtattcatcaccggttattgtctcaccgtttttgtacactgtaacctgccgaggtagaatgtccttgtcaaatataccgtaaccggccatatagtaatcatatctgtacgtgtattcc

SEQ ID NO: 4332 - DNA, 2051 bp, Unknown
  16S sequences of unknown bacteria
atttctcttttgatgagtgaaattgcaaccgaaagaaaacggtggggcttttactaaactatcgttacggtgcacaacaggtggcggcaacggctccgatctgtcatactgccttcgcaactccatacactcatcaaaagagaaatctgatgcggtaaaaagaggttggataaggtgtgcgcattctgtcagcagccctttgacgatgtggatgttcatttcgtgacagttccggcaaatggtactatcgcagttgatgtaccgatgactgtttatgaagtcatccacataacggctgtaccgttttccgtccgcgattacattttggagatagagttctcttgcttcggagagtaactcgaatagttcttccgctacatcctgttcggtagcaaagtgggttaggtgttgcttctcttcaaaaaaagagaagactttttaatttgttctttcatgttaatttacttgttgtgaattttattataaactcgaatatatgttaaaaaaacaggagaaaaaagtttttgtttctatatttaaagttccctgtttcttgatttgtatcgccctatttctaaacaaaatactacattattgattatcgtgtgaaaaatagtgtttctgaattgattgtataacacttcagaaaaagtttactttgtttttttcctatacgtacccgaattaaagtaaacctaaatctgcgtttgtaatccacctatatgcagatatggaaacagtaccattttatagcactcaacaatgctacgatttacattagactaatcgaacaacccgtttaccaaattaaccgcatcatcctttttctgattgataatttttgcgtacacctgtgtcattttcacatcggcatgaccgagcagcttcgatgtagtatagagatctgctccaagtgtcagcatcatcgtggcaaaagtgtgccgggccgtgtgaaaggtgaaccgcttgtcgattcctgcagctttcgcccaaggtttgataagcaggttcatcatcgacggactcggcaaatcgaacacatggtcgtctgccgtcttatctccccgttccggcatccacttcaacgcttcgggagaaagaggcaggtaaatcggttctttggtcttttgcatagataccgctaaacgatattgccccctatcaacgaaaacatctttccacttcaatcccacaatatcgctcacgcgcaatccgcagaagcaagagaacaaataagcggccttcaccgcctcattattcatcggagtggcaatcaacgcccggacttcttcgatggtcatatacgaccgtttgctctccggcaggcgaatcttatccgaattattgattttggcaaatggattgactttgataatctccgcacgaacagcagcgttcaaagctccgttcaggatacggtagtaggtgtgaagtgtaaagttcgacacacgctttcctttgggacggtattccgtcatcaaataatcaaggtagtcctggcagaatgccttgtcgattcgatccatcgtcatccgttctcctgcataatctttcaggatgcgaatggtaactgcgatttggtttccgtcctttttgcctcgctttgcctgattctctttatatgtattcatccaatcaagcaagaacaccttttccctgttttcaataccggcttccccattggtcaattcaatgatgcgcttcgatttgattgcattggccgcatccatcgtggcttgattccgtttccgggcattattgtccgtttccgggatgatatacattttgaggtactcgtatgtccgctttccgtcgcggtaaatatccaaatacaaactcttgcttccgtcgctcaacggcttcatccgaagacggatcggttctttgactttcgtcggcttttttactcgtggcatattctattcctttattcgttatttctgttgcaaaggtaggaataataatccgaattgaggaacaaataagaaacaaaaatgtaccgaataagaaccaatcaactgaaaacaatgaaaacaaccgaaaagaagtat

SEQ ID NO: 4333 - DNA, 13062 bp, Unknown
  16S sequences of unknown bacteria
gtggcgttgggtgcggaaaagctgatcctgctgacggacacgcggggcctgctgcgggatgtgcacgacgagagcacgctgatctctgaggtccgcgctgacgaagtgccggggcttattgcagagggcgtgatccagggcggcatgatcccgaaggtcaactgctgcgtggatgccgttgccaacggtgtgcaccgcacgcatattctcgacggcagagtccgtcattcgattttgatcgaggtgctctcccatgcgggtattggcaccatgatttggtgaggagggaacacttatgacctttgcagaaattcaggaaaaagattcgcaatatatcctcaatacctacgcccggaatccccttgccattgaccatggcaagggcgcgacgctttacgacgtggatgggaagaaatacatcgacttcacctccggcatcggcgtcaattccctgggctacggcaacgagacctgggtgaaggccatcacggcccaggcgcagaagctggcgcatatttcaaacctgtactataccgagcccgccccccggcttgctgaaaaactctgcaagcgcacgggccttgccggggtattttttgcaaactctggcgcggaggccaacgagggtatgctcaaggtcgcccggaagtattccagcgaccgctacggcgaaggccgcggcacggtcattaccctgcgcaattccttccatggcagaacgatgaacaccctgatggctacggggcaggaccatttccacaaacatttctatcccttcccgacgggctaccgttatgccccggccaacgatctggctgcgctggagcaggcggcagggggggatgtctgcgccgtcatgatggagctggtccagggtgagggcggcgtcaatccgctgcaggcggattatgtccgccaggtggcggccctctgccgggagcgggattggctcctgctcattgacgaggtgcagaccggcatcggccgcaccggtaccctctttgcttggcagcagttcggtatcgagccggatgtggtcagctttgccaagggcatcgccagcggcctgccctttggcggcttcctggtcaatgcgaagtgccgcggcgtcaggacgccgggggaccacggctcgaccttcggcgcgaatcccatcgccgccgccgccggcaatgtcgtgctcgatacgctgacggacgaatttttggaagaggtcaggcagaagggtcagtatctgcgggagaagatcgaggccatggacagcccgtataccaacggtgtccggggtctgggcatgatgctgggcgtcggcgtccagggcatgacccacaaggagctgtgtgccaagctgcgggatgcaggcctgctgtgcctaacggcggggggagataccctgcgcctgctgccgccgctggtcattacgaaagaagaaatggacgaaggcctggctatcatggcccaggtcatgaaaggagcataatatgcagcagcattttctgaaattattggacttcacccccgctgagattcagcagctcatcgacacggcggcagatctcaaggcaaagaaaaaggcgggccaggcccaccgctatcttgagggcaagaatgtcgccttgatttttgaaaaatcctccacccggacccgctgcgccttcgaagttgcggcgtacgatctgggcatgcacacgacgtacctcggccccaccggctcccagatgggcaacaaagagtccatcgccgatacggcccgggtcctgggccggatgtatgacggcatcgagtaccggggcttcggtcagaccatcgtcgaggatctggcaaaatacgccggtgtcccggtctttaacggcctgaccaatgaattccaccctacccagattttggcggacttcctgacagtccaggagaactttggccatctgaagggcatcaagcttgtctatatgggtgatgcccgttataacatgggcaactccctgatggttggctgcgcgaaaatggggatgcactttgtcgcctgcgcgccggagaaatacttcccggatcaggctctgatcgcccagtgccaagccatcgccgccgagaccggcgcgacgctggaattcaattccgaccccatggccgccacgaagggcgcagatgtcatttatacggacgtctgggtctccatgggcgagcccgcggaggtctggcaggagcgtatccacgacctttctccctaccaggtcaccagcgcgatcctgcagaacgccgggccccagtgccgctttatgcactgtctgcctgccttccacgaccgcaatacgaccatcggccaggaaatcgccgagaaatacggtctgggcgagatggaggtcaccgacggggtctttgagagcgcccagtctatcgtctttgacgaggcggagaaccggatgcataccatcaaggccgtcatgtacacgtttatgaagtgacgcgccatgcagatgaggacagagcatgattccatgggccaggtccaggtgccggcccagcacctctggggtgcgcagacccagcggagcctgaataacttctccatcggccaggagcgtatgccggcggacgcttttgaaaaaagcctgcgccctggccaatgcgaatttcggcaagctgacagaccagcaggctggggccgttgctgccgcctgcgacgcgatcctggctggggagtatccggcggagtttccgctgcatgtctggcaaaccggcagcggcacccagaccaatatgaacgtcaatgaggtcatcgcccatatcgcagcccagggcggcgtgacactccaccccaacgaccatgtcaattgctcccagagcagcaacgacgtcttccccacggcgctgcatatggcggcgatggatggtctgcagaaccgcttgctgccccgcctggccgccctgcgggatgcctttgcccggctggagactagatgccggggcgtgcggaagatcggcagaacccatctgcaggatgctgtccccctggattttgcggatgaggtcagcgcctggcgctacatgctggaggagaacgaggctatgctgcgggattgcctgccctatcttgcccagctggccattggcggcaccgccgtcggctccgggctcaatgcaccagcgggctttgacgaagctgtctgtgccctgctgtgtgacgagacgggcatcgcctaccggccggatgcgaataagtaccacgccctgtcctccaaggacgccgtggcgtttgcccacggggcgctgaaggcgctggcgtgcaatctgatgaagatcgccaacgatattcgctggttggccagcggcccccgctgcggcatcggagagattacgatcccggccaatgagccgggcagctccattatgcccggtaaggtcaatccgacgcagtgcgaggccatcacgatgatcgccgtccaggtcatgggcaacgatgcggccatcggctttgccgcctcccagggcaatttccagctcaatgtttttatgccggttattgcctataatctgctgcagtcgctgcagctgctgaccgacggcatgggcagcttcgcggaaaaatgcgtcgacggcatcgcgccgaacgcccgcgcaatgcggcagaacctggaaaactctctgatgctcgttacctgcctgaccccggccatcggctacgaggctgcggccaaaatcgcaaagcaggcccatgagactggcacgacattgcgagagcagaccatcgccagtggccttttgaccgccgaagaattcgacaagctcatcgctccgcaattgggaaaataagtgcaaaaaccgccccgaagcggaacagttttttcgcgttgcgacaaaaacagcggccaggcaaatgcgcctgaccgctgcttttatattttttctatcataagcggcccgccggggtattgtggcgggccgctgtgtggagtcgagattctggagagttttgcgcgatcacacctgcgcgcgatacaagaaggaaacgatctgagcgcgggtgcaggtgccgtccggggcgaagaggccgtcgccgatgccgctggtgatacggttcatcgtcgcccaggccacagcccgggtgtagtacgcgtctgccgggacatcgtcaaacgtatccagcatcagcccggggggagagccgaaatagcgccacaggaagcagacgctctgggcccgggtgcagggggcgttggggctgaacgttgtggccgtcgtccctgcggtgatgccctggtcgactgcccaggccacggcctgtgcatagtaggcgttccggtccacatctacaaagggcgtgttgccggataccgttggcttcccggcggcgcgccacaggaaggttacgatctgggcgcgggtacagggcgcatcggggctgaaggtcgtggccgatgtcccagcgacgacattatgatagtaggcccagaggaccggctggtagtaatactgggtggcagccacatccgcgaacgggttgggccgcgtgtcctcttcactctccgggacggagacggtgacaatcaagtttttattctctgtcggcgctttggtatcgtaatgatacgaaaaagagctgaaatgattctggaaggtcatcacacccgtcttgagatccagcgttgcgccggagccaaggatgatccgattatagtcaaacgaagtgctgagcagcgccatatcatagctataagtaccgtccagatgcggtgtcagcggcgcatcgctgcggatagtctgatacccaagtatgacttcttccagggctgtattttgggaaaggtccagcattcgcaatgcgttcaggtcacagttgaatttacgcagtgccgggcagccgctcacgtccagctgttccagctcgccattcaagcaattgagctcttcttaatcggggcagctccgcaggtccagacttttgatatgcgttatgccacatttcaaatagcgtagtgcgcggttattctgcaggttcagttcacacaactcgctggcagagcaaatgagcgtttctagctttgtattcgttgaaaggtccagctgcgataggcgggtattgctgcaattcagctcctgcagctccgttaacccggttatatccaacttctcaagccgagaattgcggcagtccagcttttgcagctttgtattcgcgcgtaagtccagccaaatagccatatatttctgatcaatcgtcagctcagttaagcctgtcagcaattcaagaccggtgtaatcccagatatcctggagtgacagcgacgtggcagcgcgcagcgcggccaggtgggcatcggtcaattccgtctcgtcctctgcggtgagtccggctggcgtcaagactgcgtcgttcagctgctggcggaaattctcactcgggaaagccgccgcgaaggtcaccggggcggcaaaggcaggcacaggcagcagggaaaggcacagcaccagcgccagcagcagggcagagatcctcatacgttgcttcataagatgtctcctcacaatttgaatttccgcaaaagctgcggttacacttagaatataggattttgatcaaaattgcaatgattttttataaaaaatttagatttgcagcacaaattctagtcacgtatctcactacattgcgcctggggcggtgcagcggcgattttttcctctgtccagcggtcgatctccgccttgagggcccggagatagggcgagaattggaccgcctcctggccgtaggtccgctgcaggtcatattccaggggcagccaggaatccaggctggcctcattatgctggatgaccgcctccagcttatccagcgctttatagagcttggcctccggcgtcgcaagggcggtcatctctgccagtagcgcctggaactgggcacggttggcgggcgggaactgggcgatccaatcttcatacagcccctgctcccgcccctcgtcctgggccgacttggaaaaggcggggatatcccccgtgaaggcctcccccaggtcgtggatcaggcacatccggaggacccggtctgtatcaagcgaccgaaactccggctcctgctccagcagcatggcaaacaggcagagccgccagctgtgctctgccacgctctcccgccgcccggtggaggtatcgcaatggcgggtattgcacttgagccgctcggcaacatgtaaaatttccaatacttcctgtggtgtcatcttgctcctccttgtaaaacgcatgaaaacgcacggcgcacagcgcgcgtgcaagaaaagggacctgccgcgcactgtctgcgctgggcaggtccctgccgcccggcctgcgcagcagggtagggcgatgggatgctttattccggtgtgcccggctgctccggtccggcgtcctgttccggctgttccggttctttcggctgggtggctgccgtctcatggaggaaggactggaagagaccctcttcctcttcggggatgggctggcccgccatgcaggcttcaaactgggtccggctcatgcgctcatgggccagcaggaaatctgccacggccagcagctgttcgctgtgggcggtcagaatgccggtacactgggcataggcccggtcgatcgtcgccttgacctcttcgtcaatgacgctggccgtctggtctgagtaggccagggtcttctcatagtcccggccgacgaaaatttccccatcgtcgtcatagacgacggcgcccaggcgctcgctcatgccgtagcgggcgaccatctgacgggcaatgctgctggcccgctgcaggtcgctggaggcgccggtggagatatcgtccatctgcaggtgctctgcgatccggccgcccagcagggagacgataaattcaaacatctcgttgcgggaggggcagtgggtgtcgtcctccggcaggtagacggtcatgccgcctgccgcgccccggggcacgatggtgatttgctgcaccgggtcatgggtcggcagatagtaggctgccacagcgtggcccgcttcatggatggccgtcagcttccgctcgtgtgcggagacgacccgactctttttttccggcccggccatgaccttcataatggattcctccatatccggcatggtgatgcatgggcggcatttgcgggctgccagcagtgccgcttcattgagcaggttgctcaggtctgcacccgtcatgccggaggtcgcccgggcaatgaccttgagatcaacgttatccgccagcggcttatccttggcatggaccttcaagatcgcctcgcggccccggacatccggcgcgtcgacgtagatctgccggtcaaaccggcccggccgcagcagggcggggtcgagaatatccttccggttcgtcgctgccatgacgatgacgccttcgtttttgctgaagccgtccatctccaccagcagctggttcagggtctgctcccgctcgtcatgcccgccgcccataccggcgccgcggcggcggccgacagcgtcgatctcgtcgataaagacgatggacggcgccattttcttcgcttggtcaaacaaatcgcggacacggcttgcgccgacgccgacgtagagctcgacaaagtcagagccggagatggagagaaactgcacgtccgcttctccggccaccgccttggcgatgagggttttgcccgtccccggagggccgaccagcaggacgcccttggggatcctggcacccatggcagtgtattttttcgggtcccggaggaaatcgacgatctcggccagctccagcttttcttcctccgcgcctgccacatcggcaaaggtcacccgctccttactggaatcggccacccgggcattggctcggccgaattttgctgcgccctgaccgccgctcatgcggttcatcaggatcagcataatgacgactgcgccgatgatcaacagaatatacggaagcatcgtcagcagaatcggcgttttggaatcaggctggtaatcgtaggattgcaggatgccttccttgtattgcttggtgatcagctcgtgcatgtcgtcgtaaaacgcctggaagctgcctaactcacatttggccgttgtttgatcctggagtgtcatggtgaggacgccgtccttgatggtgaagtcgtggaccttctcctccgcaaagagcgtgacagcttcggaataggagaggtaatccgccttgctccggccaaacagcgccgttaccgcagtaagcaggatcaccagcacgagaatgtaaaagacaaaggatgcaattcttgtttttttcaatagtccatctccttcccggcggatcaggcgccgtatacctccggcttcagcacgccgataaagggcagattccggtatttttcattataatccagcccatagccgacgacaaattcattggggatcgtaaagccgacatagtccgcttcgatctccgcctcccggcgggcgggcttatccagcaacgcacaaatttttaaggaggccggttccatggcggacaggtgattggccacggcccgcagggtcagccctgagtccagaatatcctctaaaatgacgacatggcggcctttaatctcgacagagacatcctttttcatctggagatgcccggtcgttgcggtgccgtcataggacgagacggccataaaatcaaactgacaggggatcggcgtcgcccggactatatcggcgaagaacacgacaacgcccttcaaaacgccgataaataccggatccttcctcgcatattcctgcgctagggtctgccccagctctgccacccgggcagcaatctgctcttttgtcagtaatatcttctgaatatcgtcatgcatgcgtgtgttcctctttttcttgcactaaaatcacgcgcaggcagggcttgcctgcttgcgcctgccaggcagggtccgttcctaacccaaaggctgccaggacagtttctcccatcgccaggaccgggatgcgatcccgctgggcccggggaattttacagtcgatcattcgccgcttcagcgtgcggctgccgccggacaagcgcaatacgtcccccggctggcgcggccggacttccagcgcgcgcccttttatcatagcataattcagtatgatttgtgtagtattatttgcgattttttcgaaattttctgctgccggggcaagctcacaccggatgcgcagacccaggctaggcaaaggcgtcacgccggggatctgcagcaccgcggcaaacgctggcgccggggcggactccgccgcaggcgcgatggtatcgtaattgcgggccaggcagacgccgggcagcgatagccgccccgaggcggactgggatgccagcagcgcctccagctggcggacatgctctcgccggggctgccggacgccaaacgcctgcaaaaagccgaagagcacccgcgcgcgcagcactggatgcagcacctgcacccgggcgatggaaaagccgtttccctgccgggcgtcaagtatggctacctgggccaggtcagataaataagcgtcctcttcgcgcaactgccgggctgtctccagccaagccgtctccagagcggggttctccgccgtcagacgcggcacgacatggtgccgcaggcggttgcgcaggcaaaagtccgtcgcgttcgatgcgtcctcccggtggggaatatgctgcttctgcaaaaagtccaggatctcagaccgggtcgcaaagagcagcggccggatgatccggccccggcagggcgggatcccgctcagaccccgggggcttgctccccgcaccaggcggataaggctcgtctccagattatcctgggcgttgtgggccgtggcgattttggcgtcccaagggatggcctgggcaaagcaggcatagcgcaggctgcgggccgcgtcctccaggctttggcccgtcttccgctgctgcgtggtgacgtccagatcgcagcaggtgaagggaatgtgccgcgcctggcagaaatcccggacaaatgccgcgtcgccgtctgcttccgggcgcagatggtgattgcagtgcagcacgctgacggtcagggcgtattcctcccgcagcgccagcaggcagcccagcagcgccatggaatccgcaccgccggagacggcacagataatggcatcgcccggatcgatcagtcccgccgcagtgttatagcggcgaaatttattcagcatgacgccactccagatcggagaaggtcgtatactggggcagccattgcagcttaaccgtccccgtttcgccgtgacggttcttggcaatgatgcactcagcgacgttcttctcctcggaattttcgttgtaataatcgtcccggtacaagaacagcacctcgtcggcgtcctgctcaatggcgccggactcacgcaggtccgacagcatcggccgcttgtcttgccgggattcgttggcacgggagagctggctcaggcagaccaccggcacctgcagctccttggccatgatctttaaagagcgggagatatccgccacgatctgctggcggttttcgccgctggcgttgcgctggccggaggaggtcatcagctgcagatagtcgatcacgactagccccagcttatccagcctgcgacacctggcgttcatctccgctacggtgatggctgggttatcgtcgacccggatgtccgtctggctcaaggccgaagcagccaagccaattttgccccactcgtcctccgacagctgaccggtggccagcttctggttatctacaaagctttcgttggcgatcagacgcatggccaactgctcccgggacatttctagggagaaaaatgccacggtgatatcgtactttttcgcgacgttcaaagcgatattcagcgccatggacgtcttacccatgccggggcgggctgcgatcagcatcaggtcggatttattgagcccgttgatcttctggtccaggtcccgaaggccgctggacaggccggggaacgcgttgccggactcggcaagctccgtcagccggtcgaagactttcaggaggatcgtcccgatatgctccagggtctggcctgtgttgccgtggctcagggcataaatcttcttctctgcgttttccagaatactgaccgccgggccggtgcccgcctggaccgattcctggatctccgccgccgcttgatcaatgctgcgcagcagcgccttatcgtgaacgatggcgcagtactgggcgacattggctgccgtcggcgtgatgtccatgagctgcttgaaatattccagcgtcgtcttttcgtcgaagacgccgcgttctttcatcttgtccagcaccgtgaccgggtcgatgggctgggagaaattgaacatggcatagatcgtctcgaaaatatcccggttctgctgcaggtaaaattcctccgggcgcaccatgccaatgacatcactgacacagcggctgtcgatcagcattgagcccaggacagactgctccgcctctaatgagtggggtacctggcgcgacaataattcatccatgtccttcacctcctgcgcggacgaaacgggcctcttacagctcctcgaccttgaccttcaaattgccgacgacctcatagcccagcttgcacttgacggtataggtcccgacgtttttgatggcttcgtccagaacgatcttgcgcttgtcgacatcaatgttcatctgctccttcagcgcttcagagatctcctgggttgtcacggagccgaacagacggcctgcgccgccgcccttgacccgcagggttagggtcacttctttcatttcgttcatgatgcgtacggcctcggcccgctccttcgtctggcgctccaggagtgccttgtcgttcatccgcatggtgttgatattgtccggcgtcgcctcgacggcgatcttccggggcagcatatagttccgggcgtagccgtcggaaacctcgatcatctggcccttcttacccttgcctttgacatcctgctgtaaaattaccttcataataaaaacctcttttcattttcgcttgatcttaatcttcaaaatactggtcgatggacgagacgagctctgtaatcaccgccgacatctgcttgccggaaatctgtgcgccagccatggcaggattgccgccgccgcccaggggctccagaatcatctgtacattgatatctcccagagaccgggcggaaataatgatctgcgtatccatcgggaacatgacaaaggagcactcgacaccctgaatggacagcagctcatctgccgcctgggccgccaggacccgggacacggtataatccaacgccgccacagcgatgttctcccggtaaattttcgcgcttttgatgatctcgtagcgggagagagtatcagccaggtcgctcttgagcagctttttgatatccgccgggtctgcgcccagcttgcgcaggtaggccgcggcctcaaaggtccggctgccggtacggacaccgaagtttttcgtatccagcacgatgccggacagcagcgcctgagcttccaccgggagaatgtccccagcctcaaccgtgtattgcagcagctccgtcaccagctccgacgccgaggaggcgaagggctcgtgcagattcaaaacgaccttctcaatataatccgccgcccggcggtgatggtctaccacgcagacgcggatgatgctctccagcagcggcttactctggacctggtccggccggttcgtatccacgacgatgagcagactcttggagtctgccatcagcagggcctcctgcccggagacaaagacgccttcgtattccggctgttgctgcagctgggcgatcaaggcccctgcggcgttctcctgcaggtctagaacgatgcgtacccgcttgcccagcttccggcagatgcagaccataccggccgccgcgccgacggagtcaagatccgcgttcttatggcccatgacaaacacatgggtcgattggcgaatcagctcagacagcgacccggccacgacccgggacttgaccttcgtccgccgatccgccgtgacgg

SEQ ID NO: 4334 - DNA, 2160 bp, Unknown
  16S sequences of unknown bacteria
gcggagcagcgtattctggtgtgcatgttggcttatttcggcatcgcgctgtttgccatgattctttccacgcaggcgcagttctgggtgctggcggtgctggtgggaatatttcagggcggcgtgcaggcactgtcccgttcttatttcactaagatcattcctgctgaacagtccggtgaatacttcggcttgatggatatttgcggcaagggagcctcctttttgggcacgactctggtcggcgtggtttcccaggccacgggcgacatccatttgggcgtgggagtgatcgcggtgctgtttgccgtgggagcggtgcttttttgcctggcggtgcgtgtgccgccggaaaaagcaaaataggagcgccttggtattgaaattacaaaacaaggagaattgctatgaaactgatgattgcatcggatctgcatggctcggccggctactgccgcgcgatgctggaggcgctgaaacgggaagggagtgaacggctcctgttgctgggtgatctgctgtaccatgggccgcgcaatgatctgcctagggactatgcacctaaagaagtgatcgcgctgctcaacggcgtgaagaaccagttgctctgtgtgcgtggaaactgtgaggccgaagtggatcagatggtactggatttcccggtgatggcggagtactgtgtgatcttctggggtggacggacggtctatgctacccacggccaccagtaccatcgggggaacctgccgccgctgcagcgcggcgacatcctggtacatggccacacccatgttccggggtgggagttctttgggagggacaacctatatctgaatcccggttcggtttcgctccccaaagaggggagtgctcatagctatctgcttttggatggaacggttgtgctgtggaaaaaactggacggcagcatcttccatcaattggatctggctgagttttctgcaaaaatccattgacaaacgtttctttcactgctacaatatattagcattagccgctttgaatgggcagaaagagggagatttccccgcccccgacagcgagtccgtaatgaaggagttgaaattaaatgcaggcaattatcgaagcatgcggcaagcagtacaaggtcgccgagggcgacgtggtcttcatggagaagctgggcgccgaggccgaggagaccgtcacctttgacaaggtgctggcgattctggacggcgacaaggcaaccttcggcgctcccgtggtggagggtgcgaaggtcgaggccaaggtcgtgaagaacggcaagggcaagaagatccggatcttcaagtacaaccccaagaagggttatcgcaagcgtcagggtcatcgtcagccttataccaaggttgagatcggcacgatcaccgtgggctaaaatcccatgacaacggtttcgttccacacggaagagggcggacgtatcgtgtcctttgaagtcaaagggcacagcggttatgccgaggcgggcagcgatattgtctgcgccgccgttaccagcgctgtgcgtctggtggaatgctccctcaacgatgtgctgggcttgggtgctgcagtcaacgttagtgagaaggatgcgaaaatcggtttttatttgccgggcggactttccgcttccgcggacaatacctgccagacggtcctcacgggcctgatggtttacctgacagaactccacgatgagttccctgataacattactgttttggaggtgtaacgtatcatgttaaacattggtcttcagttctttgcccataaaaaaggtatgggctccaccaagaacggccgtgattccgaatccaagcgtctgggcgctaaacgcgccgacgggcagcacgttttggccggcaacatcctggtccgccagcgcggcaccaagatccatccgggtaccaacgtgggcatcggcaaggacgataccctctttgctaccgctaccggcgttgtgcgcttcgagcgcctgggcaaggacagaaaaaaggtttctgtctatcctgcggaagccgctgaataattctttggattcaaaaagccccggaccgctttggttcggggctttttcgaagaagcggagtaaatgagacagcgcatggcccacggctttgcggcggaagacacgcgtatattgtacgg

SEQ ID NO: 4335 - DNA, 32759 bp, Unknown
  16S sequences of unknown bacteria
acttcaaaaaacaactcgccgttcaccttcggaaatacaataactttcccatgcgcccgcttaactggatttcacctaaagccgctctcgataattttttgaagcacaatgtaacatatcattgacaaaccgacaaaaaatccgtcgtgattttgattttttctattgacacggcgcaagacgcatggtataatagaaaaaattcacggaggtgcgaaaatgaaactgtcgttcaccagggctggcgtttacaggaacgggcatttcgttttcaaggatgatttctttcttatcggcaattccgtcgaagtttccgcagataccgatttctcaaatccgaatatatttgtttttcccggtttcgttgatgttcatgtacatcttcgagagccgggtttttcttataaagaaacggtttcggcgggcactctcgcggcgtccgcgggcggattctgcgcggtatgcacaatgccgaacctcgacccggtgccggattgccttgaaaatctgaaagtacagcttgatattatagaacgcgacgctgcggtaaaggtcgttccgttcggcgcgatcacggtcggggaaggcggagagaggctttccgatatggagagcatggctccgtatgtcgcgggattttccgatgacggaagaggagttcagtctgctgcggtaatgagaagcgctatggagaaagcgagatcactcggcaaagtgatctcggcacactgcgaggacaactcccttcttcacgacggatatattcacgacggcgcatacgcgagagcgcacggataccggggcatctcctccgaatcggagtggaggcagatcgaacgcgatgtcgagctgtgtgcacagacgggctgtgcataccatgtctgccatatatcgaccgcgaaaagccttgatatcatcagacaggcgaagaaaagcggtcttgacgtgacctgcgagacggcgccgcactatcttgtgctgagcgaggacgacatacgcgaggacgggcgattcaagatgaatccgccgctcagaacgcctgacgaccgcgacgcacttgttgaagggcttgccgacggcagcatcgacatggtggctacggatcacgcgccgcacagccgcgaggaaaaatcgcgcggacttgaaggaagtctgatgggcgtcgtcggacttgaatgtgcatttcccgtgctgtacacgaagctcgtgaaaacgggaaagcttacccttgagcggctcacggaggctatgagcaccgctcccgcaaggcggttcgggatagataccgacgaagcatacgcggtgttcgatctcggcgaagcctatacggtcgatcctgaaaaattcaggtcgaagggacgcgcgacaccgtttgatgcggatacggtgtacggaaagcatattgcgacgctcccgcacgggcagatgcagccggaatcacgagaagcatgaaatttatcggagccgggcacggcagaacggagattgatatgagaagggattttgacagaaagatcgtccttgaggacggagccgaatattacggatacggattcggcgatacggaggtgcagagcgtctgcgagatagttttcaacacttcgatggtcggatatcaggagataatatccgatccttcatacacaaaccagactgtcgtcatgacatatccgctcatcggaaactacggcatcgcagacgaggatttcgaaagccgcactccgacgatcggcggacttgtcgtgagagaatacaacgacaatccttcaaatttccgctatacgaaaacgctctccgaaatacttgaggaaaaccatattcccggaatctccggagtcgataccagaaagataacgcggagcatacgcgatctcggaagccgccgcgttctcataacctcggcggatactccgacggaggaagcgctgagaataatcgccgcctcgccggtgccgcacgacgcggtaccgaaggtcagctgccgcaaaaaatggtattcgcgcacatcgaatcacaaattcaatgttgtcgccgtcgattgcggaataaagctcaacatcgtgcggagccttaacgcccgcggctgcaatgtcacggtggttccgtggaatacggcatcatcggaaatagagaagatgaagcccgacggtattttcctgtcgaacggaccgggcgatcccgaggacgtaactcccgtgatcgagcttgtgcgcgagctgagaggcaggtacccgatattcgggatctgcctcggacatcagatgataagtcttgcatacggggcacggacgtacaagctgaagttcggacaccgcggaggaaatcacccggtgaaaaatctcgagaccggaaagcttgaaatcacaagccagaatcacagctacgcggtcgatgaggagagccttgccggaaccggacttgaagtcacccacataaaccttctcgacggcaccgttgaaggggttgagtcaaagaaggaccgcgtgttcagcgtgcagtatcaccccgagagcgcaccgggcccgcaggacagcacataccttttcgataaatttataaatatgatgaaggagaacgccgatgcctaagagaagcgatataaagaaagtacttgttataggctcgggacctatcgttatcggacaggcggcggaattcgactacgccggaacgcaggcgtgcattgcgctgcgcgaagagggatacgaggtaatactcgtgaactccaaccccgctactataatgaccgacacgacgatggcggataaggtctacatggagcctctgacgctcgaatatgtggcgaagatcatcagatatgagcgcccggacgcaatccttcccggaatcggcggacagacgggtctgaatctcgcaatgcagcttgagcggaagggaatacttgccgagtgccagacggagttgctcggcacaagccccgaatcgatagatatggcggaggaccgcgaaaaattcaaggagctttgcgagcgcctcggcgagccggtgctcccctccgtcataacccactcgatcgaggaagccgagcgcgcggcgcgcaacatcggatatcccgtcgttctgcgccccgcattcacgctcggcggcaccggaggcggctttgccgacgatgaggacgagctgcgcgaaataatgaagaacgcgctgaagctctcccccgtgcatcaggtgcttgtcgaaaagagcatccgcggatacaaggagatcgaatacgaggtcatgcgcgacgcaaacgacaccgtgatcaccatatgcaatatggaaaacatcgaccccgtcggaatacatacgggagattcggtggtggtctgcccgagccagacacttacgaataaggaataccacctcctgcgtgacagcgcgctcaagatcattcgcgccctgaaggtcgagggcggatgcaatgttcagtttgcgcttgatccgcagtcgttcagctactaccttatagaagtcaacccgcgcgtttcgcgctcgtcggcacttgcttcgaaggcctcgggatacccgatcgcaagggtgtccgcgaagatcgccgtcggaatgacgctcgacgagatacagatcgccaacactcccgccgcattcgaacctgcactcgattatgtggtgacgaagatggcgcggtttccgtttgacaaattcacatccgcgtcaaataagctcagcacgcagatgaaggcgacgggcgaggtcatgtctataggacgaacgatagaggaaagcctgctcaaagcagtacgcagccttgagatcggcgcgtgccacctctatctcccgaaattcgacggcgaatcctccgaggatctcctttcgtatatccgcgacggacgcgacgacagactgttcgcaattgcggagctgatacgccgccatacggacctcggaattatcgcaaacgagactcagattgatatgctcttcctcgataagataaagaatatcgtcgatgaggagagcgtgctgtgccgccgtccgggagacgtgcgcgagcttgctttcgcaaagcgcatgggcttttccgacaaatacatcggaaagctctggaacatgagcgaagaggacgtgtacggactgcgccgccgagagggagtgatccctgcatataagatgatcgacacctgcgcatcggaatttgacagctatatcccgtatttctactcgacatacgaggatgaaaacgaatcggagatcggcagcggaagaaaaataatcgtgctcggctccggaccgataaggatcgggcagggcgttgaattcgactattcgaccgtacatgccgtgaaaacgatcaaggcaaacggatatgaagcgataatcataaacaacaacccggagaccgtctccaccgactatacgataagtgataaactttacttcgagccgctgacggtcgaggatgtcatgaacataatcgatctcgagcagcccgaaggcgtgatagcatctctcggcggtcagacggcgataaaccttgccgataagctgatgaagcgcggcgtgaagataatcggcaccgacagcgaggcgatagaccgcgcagaggacagggatcagtttgaaaaggtcatggagaagctcggaattccgcagccgaagggcagagccgtaacgaatgtcgaggacggagtgcgggcggcgcaggatatcgggtatcccgtgcttgtgcgcccgagcttcgtgctcggcggacgcgcgatgcagatcgtcgcaaacgaaaacagcctgagaagatatctcggcaatgcggttgcgatcgatgcggaccgcccggtactcgttgacaaatacatctccggcaaggagctcgaggtcgatgcggtctgcgacggaaaggatgttttcgtgcccggaatcatggagcacgtcgagcgcaccggcatacattccggagattcgataagcgtttacccgaccttcagcgtgtctgaaaaggcgaaaagaacgatccttgaatacacggaaaagctcggtctcggcataggcatcgtcggactttacaacattcagttcattgtcgatgaaaacgaaaacgtctatgttatagaggtcaatccccgttcgtcgagaacggtgccgttcctctcgaaggcgacggggtattctcttgcggatatagcgacgctcgtcattctcggaaagagcctgcgcgaacagggatatacggaaatatatccgaaggagaaggagcgccgctacgtcaaagcaccggcattctcgttctcaaagcttcgcggacttgacgcatatctctcaccggagatgaaatcgacgggcgaggcgatcggctacgataagacgatgacgcgcgcactgtacaaggcgcttcagtcctccggaatgaacgtggtgaattacggcacgatcctcgttacgatcgccgaccgcgacaaggaagaggcgcttccgctgatacgccgcttttacgagctcggcttcaatatcgaggcgacgcacggcactgcggaatttcttaaaaaacacggtataaggacgcgcgaacgggaaaaaatatccgaggggagcgaggagatactcgactcgatacgccgcggctatgtgaattatgtgataaatacgagagatataaattcggataccgtaatgtccgacggatacgagatccgtcggtgcgcggtagagaacaacgtaacgatgtttaccgcgctcgataccgtgagagtgcttctcgatgtgctcgaggagacgacgctctgcatatcgacggtggatgccgattaaccggaccggaaaggagcagcatatgaaacaaagcatgtacaggattctgtcaaacgaacagatcgcacagagcatttacagaatgaggctcggcggagatgtttcgccgatcgccgctcccggacagtttgtgaatatacggatcgacggactttatctgagacgtccgatctcggtatgcgacgtcagggaagacgaaatgacgcttgtttataagacggtcggacgcggcacggcgaaaatgtcggagatggaggcgggagatgaactcgatatcctctgcggtctcggaaacggattcgatacctcaaggagcgggaaaaatccgcttcttatcggtggcggcgtcggcacacctccgctatacctgctctgccgtcggcttatcgaagaaggcaaaacgccgaatgtcgtgatcgggttcaattcgtcgcgcgacgttattcttgaatcggatttccgctcgttcggcgtaaacctcaccgtcacgaccgcggacggaagcgcgggcatccgcggttttgtgacagacgcgctccccgaaagctatacctatttttacgcctgcggtccggagccgatgttgaaggctgtataccgctcgaccgtgacggacggcgagctttcgttcgaagaaagaatgggctgcggcttcggtgcctgcgtcggctgcacctgtaagacgaagtacggcgcaaagcgcatatgcaaggacggtcccgtccttacgaaagatgaggtgatattcgatgagtgaacttgatatgagcgtaacgctttcggggataaagcttgacaatcccgtgatcccggcatcgggaaccttcggctacggtcatgagtttgccgaactgtacgatctcaatatcctcggctcgatagcttttaagggaacaacgcgcgaagcgagattcggaaatcccactccgaggatcgcggagattccgtcgggaatgataaactcggtcggacttcagaatcccggaatcgaaaaggtcatatcggaggagcttccgagactgcgcgaacatttcgaaaagcccgtgatcgccaatatcagcggattcgaggcggaggatttcgtgtattgcgccgagcgcctcgactcggttgaaaatgtcggaatactcgagatcaatataagctgcccgaacgttcgaagcggaggcgtgagcatcggagcgtgcccgtcggatgcggctgcggtgaccgctgcggtcaaaaaggcggtgaaaaagcccgtctacgttaagcttacgcctaacgtcaccgatataaccgaggtcgcgcgcgcggtcgaaaacgcaggcgccgacggactgtcgatgataaatacgcctctcggaatgaggatcgatccgcgcacgcgccgtccggtggtcgcaaacggagtcggcggaatgtctggaccgtgcgtgcttccgatagccgttcgcatggtgtatcagacgtataaggcggtaaaaataccgataatcggaatcggcggcatatcctgcgccgacgacgtaatagaaatgatgcttgccggcgcggcggcggtcgaggtgggagcggcaaaccttgtcgagccttacgcctgccgcgatattatagccgatctgccgtcggcaatggagaaatacggtataacaaaactcagcgaaataacgggaggggcacactgatggcaaaggacgtaataatcgcacttgattttccgggggaaagcgaggtaatgtcgtttctcgatctgttcgacggcgagaaaccgtatgtgaagatcggaatggagctttactacgcgctcggcccgtcggtcatatccgagataaagaagagagggcataagatattcctcgatttgaagcttcacgacattccgaatacggtcaaatccgcgatggcggtgctgtcgcgtctcgacgttgatatgacgaaccttcatgcgtcgggcggctcgaaaatgatggaggcggcgatcgaaggactgacaagaccggacggaagtcgtcctcttctcatcgcggtcactcagcttacatcgacatcccaaaagatgctcgaagaggatcttctgatccgcgagccgatggaaagcgtagtgtctcactacgcgaagagagccgcagcatgcggactcgacggcgtggtctgctctccgctcgaggcgggagacgtaaaggcagcgtgcggcgcttcattcctcaccgtgacgccgggagttcgcttcgcggacggtcagtctctcgatcaggtgcgggtgactactcccgcgagagcgagggagatcggctcggactacatcgtggtcggacgcccgataacgcgcgcggacgatcccgttgcacagtaccgccgcgcggttgcggaatttttaggataaacggctacacgaaaacaggataaggaaaggcagagtacatatgaaaaaagaaattgcaaacgcacttctttcgataaaggcggtgttccttcgaccggacgagccgttcacatgggcgagcggaataaaaagcccgatctactgcgacaaccgactgacccttacggcacctgaggtcagaacgcttatagaaaactcgatcgccgagaccgtaaaaagggaataccccgatgccgaagtccttatgggaacgagcaccgcgggaatcgcacacgccgccattgccgcacatatactcggaatgccgatgggatatgtgcggggaggcgcgaaggatcacggacgtcagaacaggattgagggaaagcttgaggcgggcgaaaagacagtcgtgatagaagacctcatctcgaccggaggaagcgttatcgacgtcgtggacgcgctccgcgaggcgggcgccgaggttctcggcatcgtcagcatattcacttacggcatgaagaaagggctcgatcgcctcgaagccgcaaatgtgaaaaacgtgagcctcaccgatttcgattccgtgatcgaggctgccgcagagagcggatatataaagccggaggacgcttcaagactccgtgccttccgcgacaatccgtctgacgaatcgtggataaaagcataacggagggaatatgcgtcatcttattgatataatggatcttacggtggatgagatcgattcgctgatcgataccgcgaacgatatcattgccgacccggcgaagtacagaagcgcctgcgtcgggaagaagcttgccacgctcttcttcgagccttctacgagaacgcgcctcagctttgaagccgcaatgctcgatctcggcggcagtacgctcggcttctctgaagcgcagtcaagctcggcatcgaagggcgagagcgtgtcggacaccgtccgcgtagtgagctgctattcggacatcatcgcaatgcgccacccgaaggagggcgctccgctcgtcgcctcaatgcacagcgaggttcccgtgataaatgcgggtgacggcggacataaccacccgacgcagactctcaccgatcttctcacgataaagcgggagctcggcagactcagcgatctcacggtttgcttctgcggcgacctgaaattcggacggaccgttcattctcttatatcagcgctttcgcgttattccggaataaagcttgtgcttgtctcgccggatgagctgaagcttcccggatacataaaaaaggaagtcatcgagaaaaacggaatggagtataccgaaaccgcagatcttgtttcggctatgccggatatcgatgttctgtacatgacacgggtacagaaggaacgtttcttcaacgaagacgattatctccgcctgagagacagctatattctgacaccggacaagcttgaatatgcgaagaaaacgctgaaaatactccatcctctgccgagagtgaacgaaatatcgacgaagattgatgacgacgagcgcgcttgctacttcaagcaggtgaaaaacggcaaattcataaggatggcgcttatccttatgcttctttcggaggcggaaaatgaacattgattcgataaagaacggaatcgtcctcgaccatatccgcgcgggacagagcatggaaatataccgtattctcgaactcggcgagcttgactgcactgtggcgataataaagaacgtaaacagctcgaagatgggcaaaaaggatataatcaagattgacgcggagcttgacctcgatcttgccgtcctcggatatatcgatcctgggattactgtcaatattataaagaacggcgagagggtcgaaaaacgccatcttcgcctgcccgatgaggttcgcggagttataaaatgtaagaatccgcggtgcataacctcggtcgagcaggatatcgaacatgtttttcgcctgcgcgaccgggagaaccgcgtgtacagatgcatatactgcgagtcaaaggcgaaatgataaagctgcgcggcacggaaattccccctctttcgggggaaatgcgccgatgcgcggagagcgtgaaatatcttcgctgtgcggcataaccgaactgaaaccgcgcggctctgactgaatgcagatcggaacaatacggcgggacgccccggagcgtcccgcttcttgttatatatgggcatacgtcggagaaagcagtcagttcgctttttcggcaggacggctggattacgcacagatgacaaatattgttataccgtctttgtatacataaaaataacggatgtgtcttgtattttcggacaacatgtggtaatatagaagtaacactttttatactcgaacacgaacgagaggtgaacactttgaaatacactttcagaggcggagtccgccttgacgagcataaatataccgcagactgcgagacggagataataactcctccggataccgtttcgataccgatgtcgcagcatataggcgcgccgtgcgtgccgcttgtctccgtcggggatcatgttttcctcggacagaagataggcgatgtcgaaggcggtctcggatgtccggtccatgcgagcgtgtcgggaacggtgaccgcgattgacgagaaaagctcgccgagcggcgcgaggatcaagaatatagttatctcaaacgataagaagaatgaactttcaccggatataaagccatttccgaaaagacttaccgagacgaccgatgatgaactcatttccgtgatccgcgaagcgggcgttaccggaatgggaggggcatcgtttccgacctatgcgaagatagcatccgccgccggcaaggttgagcagatgataatcaactgtgcggagtgtgagccgttcataaccgcaaatcacagacttcttgtcgaggatccggcatcagttataaacggaatcaaaatacttctccgtgcggtcggagtgagaagcgcaatcatcgcagttgaagacaacaagctcgacgccgtgaatattttagaggagatgctcagccgaagccgcatgatatccgtcgcggtcatgaaaaccaaatatcctcagggcgacgagcgccagcttgtatacgctcttaccggacgtgagctcagacaggggcagcttcccgcagacgcgggctgcgtgattttcaacgcggagacctgcgcggcggtcttccgcgcattcgcaaagggaatgccgcttgtcagccgtcgcgtcaccgtcagcggcgactgcgttgccgagccgaagaatcttcttgtaccgataggcaccccgttttcgtcgcttgtcgattactgcggaggactgtcaaaaaaacctaaatatatgatctcgggcggaccgatgatggggcaggctcagtgggacaaggacgctcccgtcgtaaagggaacatcggcacttcttgtactttccgaaagctttgcgaagcttccgtcgacacctcccgtctgcatccgctgcggaagatgcgtcgcacattgcccgatgcgccttatgccgaactatatagcgctgttttcgtcaaacggcgaattcgacaaagccgaaaaatacggcgcaatgagctgcgtcgaatgcggaacgtgctcctacggatgtcctgcgggagtgccgatagtgcagcatatcagagtagccaagggtgagatacgcgccgccgccgctcagaaaaaagctgcaatgacgaaatcggaaagcggaaaataagattaccgaagcacaagaaacggataaagaaaggcattatataatggctgaaaacgacattgtaaataacattccggctgagaatgagccggaagagaatgccgccggcatacctgccggagcggaaaaaatacagtatcccgatatcctgaccgtcgagccgtcgccgcatatgaggaccgtgcagacaactccggtcatcatgcgccgcgtaatgatcgcgctcactcctgcggcactgtggggcgtctacgtcttcggactccgcgccgccgcgataataatcatttctataatttcgtccgttttctttgaatgggcgacgcagaagatacttcgacgcagcgtcacggttgcggatttttccgcggcgcttacggggcttcttatcggaatgaatctctcggcttcggtgccgctgtggcttcccgtcgccggggcgtttttcgcaattgttgtcgtaaagcagctcttcggcggcatcggaaaaaatatcgtaaaccccgcgcttgccgcaagagtattcatgtttgcgtggccctccgagatgggcattttcacaaagcccttcgaaagaataaacagccttgccgttacttataatccgcccgatgcggttacgggcgcgactccgctcgcatctctcaagacgggctcgcttccggatactacgtttttcgatatgttcgtcggaaaccaaagcggatgcatcggcgagctgtccgcgctgcttctcacggtcggcggcctgtatcttatattcaccaaggtcatcacatggcatatccccgctgcatatataggcacggtggcgcttatgtgcgtgcttttcccgctgaacagcgaggcgcgggtagattttatgctttgcgagatcgtgtccggcggacttctgctcggcgcgatgtttatggcgacggattatgccacatctcccgttacgtcggcgggacggctgatctacggagtcatatgcggactgctgaccgtctttatacgttatttcggaggctatcccgaaggagtatccttctcgatcctcatagcaaacctgcttgtctggtatatcgacaagctcacgataccgcagaaattcggaggtaagcgcagccgtgctgaagaaaaagaagcatcaaagtaaatcccacgatccgcttcgctcggagaaaccgaagaagaacatcgttttttctcccgccgacgaggagaatgcggacgtgaggtatgacaacacggacgttacccttgacgaacttataaacagcgtccgtgattcgtcggacgcggataccgtggataccgcagcctccgcagaaaatgatgatctcgagacacttcgtgaggaggccgaagagatgatcgaacggctgacggaggaagaagccgaagagccttccggagacatcggcgacacaccggacgaatccgcacacggggaacgtgccgaagcggcttccgtgactgacatggacggcgaggacagcgcgcaaaccgcggaaatcgcggatgaaaaagccttttcgaacagcgattcgcccccggctgcggaaaaatccgatccggaagatacggatgactcgccttcggaggacatgcaggcagaagaagtaccgacggaagaaatgcagaagaacattcccgacggtatgccagagaatgaagaatcgccggaggacgctttgcacgaagaaacggatgataccgctgcgggcgaaaacaacaaaaacaaaaaaacacctgttgcgaagataatcgcaagccttacggtgatctgtgcggttatcgccgccatgcttgcagccgtgaatgcgtttaccgccgatcggattgcgaaaaatacggagcttgaaaaggagaactcgatccgtaagatcttcggttcgtatataaccgcggaggaatacaccgatttcgaatcgccggaggaaatgtacgtctatcttgtgtacaagagcaatatgctttacggctattgcgtgaacgtgtttccttcgggcttcggcggacagataaacatgatggtcggaatcggcgccgactccgacattgcgggcgtgaatatagtttcaatgtccgaaactccgggtctcggaagcaagacgaatacaagagattttctttccggctacgaaggaaagaagggcaagatcacgctcggcgctgatatagatgccgtatccggagctacgataagctcaaaggcggtgactgcgggagtgaactccgcacttgcgcttgatatcgatattgccgcgatcgccgagaaaaagggtgttatgctttacgtctccgagcttgatacggatccgccggagactgacggcgacggaggagacgcgccgatataccagccgaatcagagaccgaatattcagtccggcagagttgaggatacgcttgattatgttgacggcgttgaaaatcccaatgccgcaccttccgccgagcgtccgaagatcgacatccccgttcagagcgataccgaagtctatataacggagacggaaaccgagaccggagacgataccgatctcacccccgcacctcccgagactacaacaagcgcaccggaaaccaccaccaaggcccccgaaacgacgacaaaggcgccggaaaccaccacaaaagcacctgagacaacgaccaaagcgccggagactacaacgacaaaggagcccgagactactacgcagacgccgccggagaccgagtccaagcaggaggagaccaccggcagcgcggacgaaaacgaggagccggcatgaccgaagaaaaagcgtactgaaagggaaatacggtataccaatgaaaacatcattcggaaaacaactcagagaagggcttgttacgaacaatccgatatttgtacagtttctcggtatgtgttcggcacttgccataacgacatcggtaacaaacgccatcggaatggggctttccgttaccgctgtcctgatctgctcaaatctgcttatatctcttctgcggcgcgttataatgccgcaggtgagaatagctgcattcatcgttataatttcgggatttgtaactgccgtcgagcttttgataaaggcgtatcttccctcgctcgataaatcgctcggactgtttatcccgctgattgttgtaaactgcataatccttgcccgtgcggaatcgtttgcgtcgaaaaacggaccgatcgcgtccgtatttgacggctttgcgatggggctcggctatactgcggcgattacggtcaccgcggcggtgcgcgagcttctcggaacgggcaaaattttggcagccgccgacggaagcggcggaattgcgattctcggatcgtggtattctcccgcgaatatattcatattgcctccgggagcctttcttacgcttgcgtttctcgtcgcgctttttcagaagctgatctcggtgtcggcggaaaagaaagagaagaaagcttatttgacggagaactgcgcggaggaaaacgcggaagcggaaacggaggagagcgatgactgacatacttcttatcatgtttgccgcgatactgaccgagaatttcatattttcaaagttttacggaatatgtccgttcctcggcgtatccgagaagccctcgacagcgctcggaatgggaatggcggtcacattcgtcatgacggtgtctggtgcggcgacataccttgtctacacctatgcgcttgtcccgcttcatctcgagtatctgaagacgattgcgttcatccttgtgatcgcatccctcgttcagtttatcgaaatgttcttaaagaagaatgttccctcgctctacggcgcgctcggaatatatcttccgctcatcacgacaaactgcgccgtgctcggcgcggcacttctcaatatcgagaaggagtacgatttcgtaaaaagtcttgtgttcggcttttcagcggcgctcggcttcactcttgcgatcgtgatctttgccggagtccgtgagagaatgcgctattccgatcccccgaaggcttttcgcggatttccgatactgcttcttgcggcggcgcttatcgccatggctttttcgggattctccggaataagctttgcctgatgctgcctgccgattatccttactgaaaggaagcttttgcagacgcaaaagcggagattaaacgatggaacttgcttttcagatattgattcccgtcgccgtgttcgttgttctcggagcactcatgagcaccatgctcgccatagcctcccgcgcgttcgccgtgaaaacggatgaacgggtcgaggcgatcgccgaaattcttccgggcgcaaactgcggcggctgcggatatgccggatgtcatgctcttgccgaggcgatcgtgcgcggagatgcaaagacgtcggcgtgcgccgccggcggcgaagaaacggcgaagaagatcgccgctataatgggaaccgaggacgcgtcgtcggtcagaatgagagcgcaggtcatgtgctcgggaaccgacggatgcgcaaagaaaaagtatatctacgagggcgagcaggactgcatagccgcatccaagctcggcggaggagataagctctgcccgaacggctgcatcgggctcggcacctgcgcgaagaactgcccctttgacgcgatatccgtgagtgacggcgttgcggcggtcgattaccgcaaatgccgcggatgcggtatctgcataaccgcctgtccaaagcatataatccgcctgatcccgttcgacagccggcagtgggtcggctgcatgtcggtcgacgacggcaagaccactagaaaatactgtgatgtcggctgcataagctgccgcatatgtgagaaaaactgtccggaggaggcgataagcgtaagcgattacgtcgcctcgatcgattattccaagtgcagcggctgcggtatctgcgccgacaaatgtccgcgcggaataatacattccgcggataaggaggtatccgaaaaatgaagaaatacgataaaatcctcagcatacttataattatatcgggcgcgtttgcgctggtctgctatgtttcatatttcataaagctgtttgtttatcccgaagggacgctgccgatcattgcgtgcgttacggtgatcctcggagtctgtcttccgatatcgcttgacaaatacatacggaagcttacgaaaaaggcgtatcccgtgctgaagaccgtgtattgcgccgcgctgtgcttttacatggttacctttaccgcgatgtcggtgtttgtttattccggtgtttcttccggacccgcgccggaaaagctgccgcctgatacggtgttcgtcaccttcggcgcgaagatcaagccggattctacgcccggaaaagcgctcatgcgccggctcgacaaaacgatcgagctcatgtcgtactgcccggattcggtatgcatcgtcacgggcggaaaaggcgttgacgagcccgaatctgaagcggaggcaatgcgtaaataccttgttgccaagggcattccggatgagcgtataattgtggaggatcaggcaaaggatacgatacagaacgtggaattttcaaagaagcttataacagagagggggcttgaaggacgcaccgtcgcgtgcgtttccaccgggttccatatcccgaggataatgtaccttacctcaaaggctgacttcggcgaatatttttaccgtgcgccgggaagcaatttctatatagaattcacatcggtcgtcagagaatatatgtcatatgtcaagctcttcgtcagaggatactgacgtcggcgaccgcggaaaggacggaaagatggatataaaggagatactttcgcacgtcgatcatacggagctttcacccgccgcacggctcgacgatataaagctccttatcgacgatgcgataaaatattcgaccgcgaccgtgtgcatcccgcagtcctatgtcgcacaggcatcggagtatgcggcggggcgcatgaaaatatgcaccgtcatcggattcccgaacggatatgacacgaccgcatcaaaggtttttcaggcgtccgattccgtgaagaacggagcggatgagatcgataccgttatcaacatcggctgggtcaaggacggaatttacgaccgcgtgcaggacgagatcgccgcaataaaggatgcctgcggagatcggatactgaaggtcatcgttgaaacctgcctccttacggacagcgaaaaggtgcgcatgtgtgatgtcgtgtaccgcggcggtgccgactatataaagacttcaaccggattttcaaagggcggtgcgacggatcacgacgtgaagctttttgcggagcatgttgctcccggacttaagatcaaggcggcgggcggaatatcctctctcgccgatgccgagaattttctcaggctcggagcagatcggctcggcacaagcaggatcgtaaagcttgtaaagaacgaggattcggcaggatactgatgaggagcgtcggaaagcggatcttttgtgaatatccgcacagcatcggcgtgactgcctgattttgcatttcacatgttttcagccgcaaggcggcggaaaggagaccatgagactttttcttatcgtacttgacagcgtcggagcgggatatctgcccgacgccggacttttcggggatgtcggagcaaatacactcggcactcttgcgtcttcaccggagctttcgatccccaatctcgttaaaatgggaataggaaatattgaggggctgtcctcactcggaacctccgcatctcccgaagcggcagttggaagatgcatcgaacgctcgatgggcaaggatacgataatcgggcattgggagattgcgggacttgtgtccccgaagccgctgccgacgtatccgaacggattccctaaagaaataatcaacgccttttccgaaaagactggaaggggagtaatcgtcaataagccgtattccggaacggaggtcatacgcgattacggcaccgagcacgtaagaaccggcaagtggatcgtctacacctcggcagattccgtttttcagatagctgcgcatgaagaagtgatccctcttgacgagctttatcgcggctgcgagatcgcgcgcggtatcctgaccggggacaatgccgtcggacgggtcatcgcgcgcccgtttgtcggaatcgacggagattacagaagaacgacgaacagacgcgacttttctctcgaaccgttcgcccccacgcttctcgacgcgctgaaggaaaacggcaaaaccgttatcgcagtcggaaagatacacgatatctttgccgggcgcggcataagcgagtcgatccataccgacggaaatacggacggcatgaataaggctctcgatattgcgtcgcgtgatttcgacggtctgtgcttcgttaatcttgtggatttcgatatgctctacggtcaccgccgggatattccgggatacgcacgcgcgctttcggaatttgacgcatttcttccgtcgctcatctcaaagctcggcgacgatgatgttctcatcattacggcggatcacggatgcgatcccggatacagcggaaccgatcatacgagagagtatataccgctcatagtttacggaaagggaacatctccgcagatgctcggcacacgttcaacatatgccgatatcgcggcgacggcggcgacggcgttcggcgttccgctcgacacccccggaacagattttttcgaaaaaatcaagagataattgcgggaataattgcacaaaattcaaacggattttttgtgcattcctccaatgtttaaaaagccggaatcaaatgcacctcaaccccttgaaatgaggtgcattttattttaatataatagggaataaaaatgttctgacgaacattacttggaggtaatcatggcaatttcggcaaatgatacaataagaatcggtattatcggatgcggcggtatcgcaaacggtaagcatatgcccggactcagatcgatcgagaatgtggaaatggttgcattctgcgacatcattgaggagaaggcacagcaggcagcaaaggactacggtaccgatgacgcgaaggtatatacggactataagaagcttctcgaggacaagaccatcgacgttgttcatgtgtgcacgcccaaccgttcgcacagctttatcaccgttgacgctctcgaggcaggcaagcatgtaatgtgcgagaagccgatggcaatcaactctgaggaagcaaagaagatgcttgatgcggctgagcgtaccggcaagaagctctgcatcggttatcagaaccgttacagacccgagatgctttatcttaaaaaggaagcggaagacggtaccttcggagacatttactactccgaggctatcgcaattcgccgccgtgcggttcctacatggggcgtctttatcaatgagtatgagcagggcggcggtccccttatcgatatcggaacgcactctctcgaccttaccctttggattacaaacaactacaagcccaagtactgcgtaggaacctcctaccacaagctcaacggtcttgctcccgagcttcagggcaacacatggggtccttgggattcgagcaagtataccgccgaggacagcgcattcggatttgttgtaatggagaacggcgcaacgattcttgtaaagtcctcatgggcgcttaactacgagccttctctcgaggcatcgactctcatctgcggaacacttgcaggtgcggacttcgctaacggacttcagataaacggtgtacgcaacggtcgtcagtacataatgaagcccaacttcggcgcaggcggcgtagcattcttcgacggtgacaacagcgctgcgcttgattggcagaacgactggatcaactctctcagaaacgataccgaggcgatcgttcatgcagatcaggcatattgcgtaacaagaatccttgaaggaatttatacatctgccgcaaccggcgatgtgtacaagttctgagtttgacacatacggactatgcaatccttagggattgcatagttttgatggcacaataaaaaatcgaaaggaacggtacaaacatatgaaactcagtgtacttgcaaatctttatgcacagtatcctcttgaagagactctcgcaaagctcaaggctctcggcgtagaggctgccgagatcggcgcgggcggataccccggcaaggctcactgcgatccggagaagcttcttgcgtctcccgcggatttcgaaaaattcaaggatgctttcaagaaatacgatatcgagctttgcgctctttcgtgccacggcaaccccgtgcatcccgacgagaccgaggcaaagcgttaccatgacgattttgtcaacaccgttcttctcgccgagaagctcggacttgataccgtgatcacattctccggctgtcccggcggcgctcccggcgataagatgccgaactgggcgacctgcgcatggcccgaggagtatcttgcggttctcgattatcagtggaatgacgtgcttattccttattgggagaaggcaaccaaatttgcgctcgaacacggcgtaagccgcatcgctctcgagcttcaccccggcttctgcgtctacaatcccgagaagcttatgaagctccgcgaggctgtcggtcccgttatcggtgctaacttcgatccttcgcaccttgtatggcagggaatcgatcccgtatccgctatccgttatctcggagattccatctaccacgttcatgccaaggatacgaaggtcgataaactcaacaccgagcgcaccggcgttctcgataccaagcattacagcgacgagatcaaccgttcgtgggtattccgcacggtcggcttcggccacggtgaggagtattggcgtgaccttatttccgcgctccgtctcgtaggctatgaccgcgttctctcgattgagcatgaggacagcctcatgtccattgatgaaggactatctaaggctgttgaatttctcaaacccatgataatacacgatccaaagcccaccaccatggcatgggtatgatgtccgcataaaggcggcgccttcccgatgcggcgagaagccgctcaggatgctttggaatcggatgaccgaaaaaggcggtgtcggcattctgtgccgacaccgcatatttttacggataatgtttcgatactgacaaattgtagaattgttaataaataagtggtacaatggaagtgcagatttttaccgcgacggaggatgaaatgctgacttacgaagaacttcgcaaaaatgaagcaatacgcacatatatatccgcagccgatgattccctcggcgcactcggatacaccgaacacagcttcggtcacgtcacgaaggttgcacagtgcgcgaaatatattctcgaaaccctcggatacggtgaacacgatatcgagatagtgcagatagcggcgtttctccacgacataggaaatatggtgaaccgtgaggagcacgcacagagcggcgcggtcatggcattccgcatactcgataacctcggcttcagcgcgtgtgatattgcaaccgtcgtgtcagcgatcggaaatcacgacgagtcaaacggcgttcccgtgaatccggtttcggcagcgcttatccttgcggataaatccgacgtgcgccgcacgcgcgtgagaaatcacgacgaaacaagctttgatatccacgacagagtaaactattccgttaccgattcacgcctcgagataaatcccgcgcatgatacgataaccctgtccctcgacatagacacgaaatacagctcggttatggattatttcgaaatatttctcgcccgcatgctgctctgcaagaaggcggcggcaaagctcgggcttgaatacaagctcaagatgaacgagcagcagcttatctgaccgtcgcattcaaaaggattgggaaaagagaaaatggattcgtcaaatttcactcccgaggtaataacgctcgatttttattcaaagagcggtgacagcttcggtgttacatggcagacgaaagaggagggaaaaccgatcctcgagtacacggatgaggacgatttaaattttgaacatccggtgcgagtgaagggcgagtgctccgaagggatgaaggcaaaaaagaattgcgccgtgataacgggaattgcgcccggacagcggtgccgctggagagtcggcgacgagtgcggcgtaagatcggcggacgcggtttttacggttcctccgacaggcggcgacaagcttgattttcttgtgttcgccgattcacaggacgaagataacaacggactttggtggaagtgcgcgtgtaaagacgcgatcggacattttcccggtactcgtcttttcgcgcacgcgggcgatatagtccagttttccggcagccatgagatgtggcgcgatatgatcggaaataacgaggagtttgtcagcgcttatccgatgctgccgtccgccgggaatcacgattattggcactgctatctggacggatacagcagtacgctgtattctcatttcaatatcgatcttgccccgcaggatacgtctcacggaatttattattcggtcgatatcggtcccgtgcattttaccgtgctgtcaagcggagaccttatggaaaccaacgataagctgctcccgacacaggttgagtggctcgtgaacgatcttgcggcagccgatcgagcatggaaaatcgtgatgatccacaacccgctttactctcccggaaaatacggcgcacgccgcccggtctgcaatgcggcgctttctctccgtaaacagctaaacggaatttttgctgcctacggggtcgatatggttctctgcggtcacgatcatgtgctcggcaaatcctatcccatacgtgcaaactcgaccgtgcagacagactttgaatatgtgaccgaaaaaatcggcggaactgacgcaaaaatcatgattgaccccgcggggccgatacactttgagccgggctgctgcggaaatcagaaccgcgagatcgaggacctgaccgaggatttcgcaagcgaacttgaggtctccgaaagcatgcacgacagagctgtggcttacgcgcacatctcgatcgacggtgatacgctttgcctgaccttccgcgaagtatcggttgacgacggcgcggacgtgtccgaattctcgttcggtataagaaaaacgaagaaaatgtaatccggtccgactgtttacggatataacgcaaaaaaataaagaaaacgaccgcgcagtatgtgcgtccgatttacctcggtatccgcaggaatttaccgaagatttatcccggaacagtcatgcgcgcggtgaaataataatcataaaccgaaaggaagaaaaaattgatacctcattccgaaacgaaggaaaacgtacttaaatttctcggaaccgatccggcatccggattgaccgcggacgaagctaaaaagcggctttccgaatacggcgaaaaccgccttgccgaaaagaagaaaaaatcgctaattgcgcgattcttcggacagtttgccgacgcgatgatactgatacttcttgccgcggcgggaatttcgttcgtgcttgcctgcatgtcgggcgaggcgtccgagttttttgaaccgtgcctgatactctttatcgtcgtcgtaaacgcgataatcggtacggcgcaggagaaccgcgccgagcacgctctcgaggctctgcaaagcctgagcgcgcctcatgcgcgcgtgatacgcggcggacgcgagatccggatcgatgcgtcggagcttgttcccggagacataatcaggcttgaagcgggagatttcgtgcctgcggattcccgcataatcgaaagcttcagccttaaatccgaggagagcgcgctgacgggtgagagcgttccgtccgagaaaaacgcggtcgatacggttgacgcgagcgcgcctctcggagacagaacgaatatgcttttttcgggatgctccgtgtcgtacggcaccgcaacggcggttgtgtgctcgaccggaatgaataccgagatgggcaaaatagcgaatcttctcgaatcctccgaggaggttcagactccgcttcagaggaagcttgcgtccctcggtaaatacctcggaatcgccgcgctcggcgcgtgtgccgtgatatttgtcgtcggaatactgaacaggatccccgtgatggagatgttcatgaccgcggtttcgctggcggtgtccgcaattcccgaggggcttcccgcgatcgtcacgatagtgctttcgatcggcgttcagcggatggtaaagcgcaatgcgataatccgaagcctgccggcggtggaaacgctcggctccgcgtccgttatctgttccgacaagaccggaactctgacgcagaacagaatgacccttgtttcggcagctgcctccggagaggcggaagaaaagatcacatcatcgtgcagcgagagcgtaaagcggcttcttatgttcggaactctctgttccgagggcagcgtgaccgaggaaaacggcgaggttaagcatatcggcgatccgacggagaccgcgatagtatttgccgcaatgaaaaacggcatgaccaaggaagagttgaacacaaaatacccccgcgccgcgacgcttccgtttgattccgaccgaaaactcatgacgacggtcaaccgaatcgacggaaagcttacggttatcgtcaagggtgcgtttgacgtgcttgcgggaagatgcacggcgggaaatccagagagtgccgccgcgctttgcgagagcatgggcgagcgcgcgctccgcgtgattgccgttgcatataaggaaatcgaaaaattgcctgcggagcttacaagcgaaacactcgagtgcggtctcacatatgcgggtcttgtcggaatgatcgatccgccgcgccccgaggcgcgcgaggcggttgcgctttgccgccgcgcgggcatcaagccggtcatgataaccggagaccatatcgttaccgcttccgcgatcgcacgggatatcgggatacttgaggacggaggagaagcagtaaccggagccgagcttgacgcgatgagcgacgatgagcttgaccgcagggtgagaaatatttcggtgtacgcgagagtttcacccgagaataagatcaggatagtcaaagcatggcagcgcgccggagagatcgtttcgatgacgggcgacggagtcaacgacgcgcccgcgctgaaggcggcggatatcggctgcgcgatgggaataacgggcaccgatgttgcaaagggcgcggctgacatgacactgaccgacgacaattttgcaaccattgtcgacgcggtgcgcgagggacgcggaatctactccaacatccgaaaggtcgtaggatatctgctaggcacgaacatcggcgaagttcttacggtgttctttgcaatgatactatggcgcaaaacgccgcttctttccatgcagcttctttggataaatcttgtgaccgacagctttcccgcagtctccctcggaatggaagcggtcgagaatgatgtcatggatgttccgccgaaaccgaaaaacgaaggtatattcgctcacggactcggactccgcgtggtgcttcagggtgttatgttcgcgcttctcaccttggcgggatttgtcatcggcgagcgctttgccggagaggcgggcggacgtacgatggcgttcacggttctttcgctttcgcagatcgtgcaggcatataatatgcggacggagcattcgcttttcaaggcgggatttttcggaaaccgaaagctgaatctttcgtgcctgctttcgtttgtgcttgttcttctcgtgctgtttacgcccgcaaatacggtgtttgcgctttcttacctgccgtattatctctatctctgcgcactcggactttctttcgttccgcttgttgtaatggagatatcaaaggcggccggacttataaaacatcagaaataaaaaggagatacgatcatgggaatttgcccgactccgcatataaacgcacatccgggggattttgcacataccgtgcttatgcccggagatccgctcagaagccgattcgtcgccgagaactttctcaccgacgcgcatttagtgaataacgtgcgctccgtgtacggctataccggcacatataaggggaaaagcgtatcggtcatggcgagcggtatgggaatgccgtcgatcggaatatattcttatgagctttacaactttttcggcgttgagaatataatccgcatcggctctatgggcgcacttgcggacagcgtccgtgtgcgcgacatagttttcggcgaggcggcatcgacggattccgcatacctttcgcagtttgaactgcccggaagcttcgcaccgtgcgccgatttcggacttctccgaactgcctgcaccgttgcggaggccatgaatgtgagatacaccgtcggaaatatactctcgtccgacagattctataacgatgtcgccggaacgagcgaacggtggatcaaaatgggcatcctcgggatcgagatggaatccgctgcgctttatgcgaacgccgcacgcgcgggaaaacgcgctctcggaatcttcacgatatcggatcacatagtgagaggagagagcctcagcgccgaggagagagaaaaaacattcaccgatatgatggagatcgctctcgaaacggcgtttgtgtacgattgatcatggagtttgtcaggatatgttcgccggatgagccggaatacggcgaagcgatgaagctttacaaagtctcgttcccggagcatgagcaaagaacggatgcagctcagcgcaccgtaatggggaaagaaagctataacttcgacctgatatgcgaagacggttcgttcgtcggagacatattttattgggagagcgaagactttatatatgtcgagcatttctgcattgtgcccgacatgaggggtggcggactcgggaaacgcgctctcgagctgctcggcagatcggggaaaacggtaattctcgagatcgatcctccggaggacagcgtgtcggaacgccgccgcgatttttatctccgtgcgggatacaggatgaattccatcgaacacattcatcctccgtacaggaaggaatatgacggccataggcttaaagtaatgtcgttcccacgcgagctttccgagaccgaatacgaaaatttcgcatcctttctcagaaatacggtcatgaaagatctgccgtgaaaatgaaaaatacccgcgtatcacgcgggtatttttgcgtcatcagccttcgtaattttcggagctttcggggaaggtcatatattcggcggggttgacgctctgctgattgaccgtgagctcatagtgcaggtgcgcttcgtccgcaatttcggtaagcgacgtgtcgccgaccgtggcgatcacatctccgccgaggatcgacattcccggcttcaccgtctcgagagtttcctttgagagattcgagtaagtgctcaccgcgccgcccttgtggatcagcgtgagcgagcatccgttcatcggatcctcccatacggcgccgacggttcccgtggcggcggcgtaaaccttgtctccgatcgaggcggcaagatcaacacccgagtgaacacggtagtcgtccattgtctgagagtaaaccggaaccgaggtcgaataaccctttatcaccgctcccggtaccggcgcgatgaaatcggggagaacatccgccgccgcgtcggccccggcatcggcatcggctgtgtcgcttgactccggagcggcagtggtttcgtctttcttctccgttgtctcgggctttctttcggtcgtgaccggagccttgaccgtggtttcgggtttcttttccggagagggctcggctttgtttctctgggagattaccgatatgctgataaggattgcaagaacggcgagcgaaagtgaaagtaccgtgtaaactatacggttctgcttcttcatatcgtcgttgtttctgaaattcgggttgttcataatgcttcctttcttttgccttagtgggatactgcatatattttttcctcattttcttcgtttatgcgccgcatagaaaaatctgcgttttctccatactgtatattgtctttcgacagcgtctgcatttaaaaatcaaagtccgggaatttgcacagacgtcagttttttacgttgacaaaggggcgtataaatggtagaatattttaacggaatttcacacggaggaatattatgatagagcttgaaagaacatcggttatgaattttgaaaatgcgctgcgcggcgcgaggaatccgctttcaagctgggcgaagagcgacagcttttacggcgagaacggggaatttgtgataggagaaatcgatctgtctcttgcgcaccgccttgcggtgtcaggatccgatcacagaaaatacctccgtcaggtgtttgtgtcggtagatattacggcgccgatctattggtggaaggagtttgatacctacaaggtgggcacaacggcaaattcgacttcaaccatgcaccgcatacattcgaaggacttttcccgcgacgatttcagcaccgatcacatgaccgaaggcgcactcggcgcgctcgataacatgatctccttcctcgaggagtcgagaatcaaattcaccgaaacaaaagataaaaaatattggtacgatataatacagcttctcccctcgtcatataatcagatgaggacggtgaccctcaattacgagaatctcataaatatgtattatgcccggcgcagccataagcttgacgaatggcacaccttctgcgattggatacgttcgctgccgtatgcgtcggagcttattctgattaaggaagaaaactgatttgacgaaatatatagtttcaaaatataaagatcgcggagacgcgggacggcttgccgtcggcagaatcgccgggggtgtcggaatcgcggtcaatgtcgttctttttgcagccaagcttgcactcggtcttataacgggcagtgtttcggtcgtcgccgatgcggtaaataacctgtcggacgcgggatcgtccgcttttgttcttgtcggatacgtcctcgccggaaagcccgccgaccgtgagcatccgttcggacatgcgagaatggagtacctttgcggactctttatctccgtgatcataaccgtgctcggacttgagctttttaagagttctgcggaaaagctgttctcgggagagggcgaaagtacgctgagcgctgcggcgatcatcataatggtgattacgatggcaatcaaagtgcttctggcactcttttaccgcgggctcggcaacggaataaattccatggcgctcaaagcctccgcaaccgacagcatcggagacgttatcgcaaccgcagcggtaatcgccggaatgcttctttcgaccgtgttcggatcggcggctgacgctttgttcggctgcgcgatcgccgtgtatataataatcctcgggctcaagcttgtccgtgaatcctccgacacccttctcggcgaagctccggatggcgcactcgtctccgatatagcttcttcgataagttcgtatgaaggcgttctcggcgtgcatgatcttgtcgttcacagctacggaacgggcgcactttacgcgaccgtccatgtcgaggtggactcggacgaggatgtgcttctgacgcatgacagaatagacaatatcgaggctgatttccttgaaaatcgcgggatacacctcgtcattcatatggatcccgtatgcctttccgatgcgcagacgaacgaaatgcgcattaccgcgggcaaaatcgtggctgagcttgcgaaaaagtcgggatcggagattactatgcacgattttcgtatggtgcagggaccgacacattccaatctgatattcgatgttgccgtcggacttgactgtaagctttccgatcgggagatttcgcagtatcttgattcggaaataaaaaagcgccgttctaacgcaaattgcgtcataacggtggacagggaatacgattctttccgtttcggcagggaagaggattgacaccgaacggcggttgtgatataatatatgttgtgtcggaacggcttgcaaaagccatgactgccccacacaggacggacagagcagggatatcgcaccgccgccggagattttttgaaatcgcgccgaaaggacgaaaggtcgggacttgcgaaaaagctttgcctaaacggaatttcgtccgaaagcttttgaatccgcggaaccttccgcggtctgaaaccgaatatccgcttcgtacgtttccgtagctcagctggatagagcgaccgcctcctaagcggtaggtcgggtgttcgaatcacctcgggaacgccaaaaactccgccggaaaacccagtaaaatcaagggttttcgctcaaagggacaaaaattgaccaatgggtgaaagccggtacggggtaagcaaaaatccgatcatcgaatgagatggtcggatttttgttgtgaaacgaatactaccggcagtgccggtagttccaaaattttatccctaattcaaaagagttaatgcgttactacacaagcggtaccgccagggttatttatgcagtcagcatcggtgtatccactgttgatagaccataatacaaggcaccgtttcggcggtgccttgttcattaggggtagaaaatttcacatttatatgctataatatcaatattgagaacatttccggtgcggttataggagcatcagcccacccgagaactgaacacggacgatgatgaaagcctgtaacttgcaaaaaagttatgggcttttgcgttttgtaataaggaactgggcaccgctcagtcgtataataagtgaaggggtcagacgtgatcccggaatcaggaggaacttacatggataacggcgcaagtagctaccgccgtttcctcgatggtgatgaaagtgcctttaacgaaataatggaggagctgttccgtagtcttgttttcttcattaacggttatgtgcatgacatccacgcagccgaagatattgctatcgacgccttttcggatctggtagtacatcgtcatcggtacaatttcaaagtcacactcaaaacctatgtttttatgcttggtcggagccgtgctctcgattacataaagcaccgcaaggtattgagttttgtcgaactgtccgaagcagaaggcatagagaatgaaaagactttggaagggatagtcctggcagacgagcgcaagcaagcgagcagtacatagtgcgattgcgaaactgtcggaggataagcgtgttgttatacatctaatctattttgaggaaatgacctacgatgaagcagccaaggttatgaagaagaaccgaaagcaagtggataatctgctatatcgtgcaaagaaggaacttcgcatcattcttggagaggatggtgagctgttattatgagagaaataaatgaatgtacggcggaagtgttccgtcgaagcgaaaagcgcatcaaagagcgcaagcgtaaccgtaacagaatactaatgtgctgcatcccactattgatttgcattacggtgttctccacggcaatcctgccggctatgatgcctgcaaagaaaggtgaaaatttaagcgataattgttcagatatggcgggcaatgctgatggtactaatgttgcctatgttagcgtggaggttataaacgtcggtacagccacacagtctagcatactgaaggatgatgctgatgaggtagcacaaatctgctataccttgcaatcgtcctttgtgaactccggcggagacaataaagaatcggtcaatgacatggaagatgatgggttaatggaagacaacaaggacttt

SEQ ID NO: 4336 - DNA, 5538 bp, Unknown
  16S sequences of unknown bacteria
acctatgaccctctgcttgtaaggcagatgctctcccagctgagctatgctcccgtactccgtcgctctcggcgacgataattattatatcataagccgatttctttgtcaacactttttttcactttttcggaaattttatttttcggtgtcggacacggtattttgaaggaaaaatccgtgctcggatggcggatgtgctgcgggaaatctccgaggaatctcccgaaaaatcacatcggcgaaaaccgttccgattcgatactaatatgggtatctgcgcagtcggggcaattccgtgtccgaaaagccggacggcggtattattccgtgaacaagcttcggtagatatccgcagccgcgaacagactcgccctttccggcgcgcatgccgatcccgcatccgaaacgatccgcccccgaaagcacggtaagcgtatatgccgccggttgatcgccgcggcgtattttctccgcataatggaaaggtcatggaacaccgcacggcggcaatgcctcctcaacaatgtccgcttccgctttcgattccgtgaaaatgcgccgccgtccggaaagcgcgtacttgcctgagcttacccgttttttcttcctttaataaggctgaggaaagctattgactttttttttatgctgtgatataatttcatctataataatgaagcaaaggctgtgaaggaaagagtagcatatattgctgcctcaaagcgatccggagacggtgtgagtccggaaggcttatatatgtgaagatcattcccgagccgcagaatgaaagccgcggctgcgatgcgttttccgcgccgcaagtctgcgaagcataccgttccggagagtctcacgctctgccgcgaccgtgcttcggcaagtagttcccgccggtgccgcaccgttacaggcggcgcatatagattccgtatgcaggcggcgttttccttcgtcctttttacggatgaaggattttttatttgcaaataaaaaccgaaaggattcaggtaatatatcatgtacagaaaggtatcgacaagtctcgatcccactgaacgcgaacgcgcggttctcgatttctggaaagaaaaaaagattttcgagcgttccatggaaatgcgcgacggcgcaccgaaatacaccttctatgacggtcccccgaccgcgaacggcaagccccatatcgggcacgttctcacccgtgccataaaggacatgatcccgcgctaccatgcgatgaagggcgcatatgttccccgcaaggcaggatgggacacgcacggactccccgtcgagatcgaggttgaaaagcttctcggacttgacggaaaggaacagatagagaagtacggtctcgagccgttcatcgagaagtgcaaagagagcgtctggaaatacaaggggatgtgggaggatttctccgacaccgtcggcttttgggcagacatggacaacccctatgtaacgtaccacaacgactacatcgaatcggtgtggtggtcgctcaaggagatctactcaaagggactcctttacaagggcttcaagatcgtaccttactgtccgagatgcggaactcccctctcctcccacgaggtagctcagggatacaaggatgtccgcgaacgttcggcaatcgccaaattcaagatcaagggcgagaccgcttactttctcgcatggacgacgaccccgtggactctcccctcaaacgttgcgctctgcgtgaatcccgtcgagaaatacgtccgcgtaaagcacggcgacgaggtattcatccttgcagccgcgctctgcgaccgcgttctcggcgaaggtcagtacgaagtcatcgccgaatatgtcggaaaagacctcgaatatatcgagtacgagccgctcttcaattttgtttcgccctccgaaaagtgctggtatgtcaccgtcgcggactatgtaacgatggatgacggtaccggcatagtccacattgctcccgccttcggtgaggacgatgcggttgtcggacggcgctacgggctcccgctcgttcagcttgtcgatcagaagggtgagatgaccgccgaaacggattggccgggtgtattctgcaaggatgccgacaagcttgtgctccgcaacctcaaggatcgcggactgctgtttgccgctcccgaattcactcacagctatccgcactgctggagatgctcgactcctcttatctactacgcaagaaacagctggtttatcaagatgaccgccgtgcgcgaccgtctgataaagaacaacgagaccgtcaattggattcccgagtcgatcggcaagggacgcttcggcgactggctcgagaatgtacaggattggggtatttcccgcaaccgctattggggaactcctctcaacatatgggagtgctcatgcggaaatatccattccgtcggctcgatagaagagcttcgcactctcgcgcccgactgccccgcggatattgagcttcaccgccccttcatagattccgtgaccttcaagtgtgacaagtgcggcggcgagatgcaccgtgtacccgaggttatcgactgctggtacgactcgggctcgatgccgtttgctcagtaccactacccctttgaaaacaaggagctgttcgaatcccaattccccgccgatttcatatccgaagcggtcgatcagacgcgcggatggttctactcgcttcttgcgatctccacgcttctctttgactgcgcaccctataaaaatgtaatcgttctcggtctcgtccaggatgaggacggtcagaaaatgtcgaaatcaaagggcaacgccgtcgatccgttcgacgctctgaagcgtcacggtgccgatgccatacgctggtacttctacacgaattctgcaccttggctgccctccagattcagcgaccgcgccgttacagagggtcagcgcaaattcctcggaactctcctcaacacatatgcgttctgggtgctctacgccgatatagacagcttcgaccccacgaagtattcgctctccgactgtgcgctcaccgtcatggacaaattcattctttcgcgcatgaattccatggtcaaggacgttgacaccgagctgtcaaactactgcatccccgaagccgcgaaagcactctactcctttgtggatgagctttcaaattggtatgtacgccgcagccgcgaacgcttctgggtatccggaatgcccgacgacaaggtcgccgcatatatgacgctttacacctcgcttgtaacgcttgcgaaggcggcagctcccatggtgccgtttatctccgaggatatctatcagaatcttgtccgcaccgtggacaagaatactcccgagagcgtacatctgtgcgacttccccgccgtatgcgaatccatgatcgacaaaaagcttgaggacgatatggaattcatcctcaacgtcgtcgtgctcggcagaagcgcgcgcaacggcgcaaacatcaagaaccgtcagccgctttccgaaatctacgtcaagaccgaccgcgaagtaagcgattattaccgcgacatcgtagaggatgagctcaacgtaaagaaagccgtattcgtatccgacgtttcggcattctcctcatacagcttcaagcctcagctcaagaccgtcggtccgaagtacggcaagcatctcggagagatcaagaagactctctccgagcttgacggaaacgccgcaatggctgagcttgaagaaaaaggcgcgctgaaattcagcttcggcggtgatgatgtagttctcacgaaggacgatcttctcattgaagtcatgcagaaggaaggctactattcggtcgcggatcacggaattaccgttgcgctcaacatcactttgaccgatgcgctcatcgaggaaggatacgtccgcgagctcatctcgaagatccagatgatgcgcaaggacgcgggatttgacgtgaccgaccacatcatgctttccgtggacggaaacgaaaagctcgccggtgttctcgagagaaatcttgccgccatttcaaagagcgttcttgccgacggttccgacaccgacggcggaatctcgaaggaatgggatataaacggcgaaaacgtgacgatcaccgtaaagaaaatctgacgcttcggcgtatttccggcagatcatgccgaacaggtaatatcatgggctgccgcaaagcaagtcgcgctttacggcagccctttcccgtataaatttgacagaacggaggaaactcatgacatacgaagaaatcatgcaggcggcacgcgaggcgacggaaggaaaatgctccgtctgccgcgaatgtgacgggcgcgtctgcgccgaccgtatccccggtcccggctcgatcggcgacgtagcggcacgcaacttttcaacgtggcgcgagatcaggctcaacatggacaccctgaccgatgtaaaaagcgtcgatacttcggtacggcttttcggaaggacattttcacttcccgtgttcgcaggtcccgtcggcgccgtagctttacactacggcaagaaatacgacgacgcacactacaacgatattcttgtacgttcgtgcgccgaatcggggatatgcgcgttcaccggggacggcgttgatcccgaggtgatgcgttccgcatgcagcgcgatcgccgagtgcggcggatgcgccgtgccgactgtcaagccgtgggacagcgaaaccattgcagaaaaaacggcacttgtcgaaaattccggtgcatttgccgtcgcaatggacgtagatgccgcggggcttccgtttctgcggggtaaaacgcctcccgcggggacaaagaccgaagatgaactgcgcaagataatagacaattgcaaaaatctgtttatcgtaaagggaatcatgaccgtgcgcggcgccgaaaaggcaattcgcgcgggggcggcggcgatcgtcgtttcaaatcacggaggacgtgttcttgcgcaatgcccgtcaacggcagaggtgctgccggaaatcgcgaaagcggtcgcgggacgcgcaaaggttctcgttgacggaggcatacgttccggagcggacatattcaaggcgatcgccctcggcgcggacggcgttctcattgcccgcccgttcgtcacggcggtttacggcggaggggacgaaggcgtaaagatgtacattgcccgtctgcgccgcgggcttgaggatgccatgaccatgtgcggcgccgccgatatcgcgtcgatatcgcgtgatatgatacggatatgaaaaaacttcacaacattgacccggtgttcgacgaaaattccgagatactcatactcggatcgttcccctcgccgaaatcgcgcagtgccggattctactacgcccatccgcagaatcggttttggcgcgtgatctcctcggtatacgggtgcgacgagccgcacactaccgaggaaaagaaggattttcttctcgggcacaaaatcgcgctgtgggacgccgtcgcttcatgtgagatcgagggggctgcggattcgagcatacgcggcgcggtgccg

SEQ ID NO: 4337 - DNA, 2275 bp, Unknown
  16S sequences of unknown bacteria
cttatagaagcggagaaaacggcagaacagagccttctgcaagcttttttattatttcgtcctgctgcttactgcttctgaaacgcgaaagcacctccaccgtaaacggaaatctttcaaagcgctctttgagcgtatagtaatgctgattggcaagaagcgtcgtcggcacgagcacagctccctgcttgccgtccgccaggcacttaaacagcgctcgcgccgctacttctgtcttgccgaaaccgacatctcctaaaagcagcctatccatagcgacaggcctttccatatccatttttatctcatttatgcagcgcagctgatcttctgtttcctcatactgaaagctttcttcaaactcgctttgccatacactgtcctttgaaaacgcatatcccggctctgcctgtcttgccgccgaaagctcaataagttcgtatgccatttctgctatcgcagccttagcttttgcttttgtcgctttccattcgcttcccgaaagcttgttgatcttcggagcaccggaatcgtctcctatatatttttggactatgtccatctgatccacaggcacatagagcatatcctgccccgcgtactttattttgagataatccttttttacaccctgtacatcgagctgttctatacctatgaattttcctatgccgtgattttcgtgcaccacatagtcgccgttttttagatccgaaaaatgcgtaagcttttgcccgacgctcgaactttcactctttctcgtctttttcttcttttgtccgccgaatatatcctcatctctcacatagcagactttatgttcgggaaattctatgccggatgtgagctcgccgcgcacgagctttatcttgccgtcaagccctattctttccgtgaattcgctcaggttttcaagtctctcgtccgtactgcatacaactgtcacctcatagccgtgctttacatatgatttgagctctgactcaaagatgtccattctgccgttaaatacaggcgtctgtttagaaagcacgctgtgaatctgactgtactcgtctattccttttatctgttttttaaaaggtgtaaatatgtagacgctatcctgattatatatgctaaaatactcgccacgcgtcaaatgaattttaaaatcctcgggtgcggcgtagcccttttccataaggacggcaaaatcctccctgatttccgcatttctaaaatccattgcttcgtgtacgcggtcaggatcatctatcataataacagaatctttaccgagatattgccaaatgtactccgcatcatcgtaaaaataatgaatatagttttccataagcagcatagatatgccctcgctcatatattccataagctcgtttttgcgctcgcttaaccttgctgccgctgcacgcgcttcatctgtaccgttcctgtcaagtcttcttgccgcttcagtatattctttctctattttggctgccgccttggcataaagctctctatcgtttattatttccgatgcgggaaaaatcgtcacttcctttaaattctctacggagcgctgggtgtctatgtcaaaacttcttatcgagtccacttcatcgtcgaaaaactcaatccggtaaggataatcggcatccggtgtaaatatatcgacaatgctgccgcgcatgctaaactgcccgcgcccatctacaagcgtcatattttcatatcccatcgccgacagtctttcgcgaagttctaaaagctcaagcgtatcgccgactgctgcttttatctttctttcagtaagcgttctatgcggcgctacttttttaagcacagccgataccggtgctatcactacgcagtcctcgcctgaagagagagccttaagcgctttcatacgttcaaacagattctctctgctgccggcgtcatagcgcacaagcgcctcatcctgctcaggtatcacatatatactgccgtcataaaaaaaagaaaggtctgtctttagtctcttcgcttttgcatatgaagaaactattatgagaccctgaccgcctttttctttttttatataagccgctacgggagccaccctgctttccgatatgccggaaatattaaccggactttttttcatacgcttatccccttttttcccttacattatattcgttcatcgctttatcaataccgtcgctcacaatagcaagcgccgcctttgcggctcgcatcaccgcgtcctcgagcagcggtacttcttccttcgcaaatccgcccgtta

SEQ ID NO: 4338 - DNA, 32759 bp, Unknown
  16S sequences of unknown bacteria
cccgccgcccgtgctctgcacggataatgcggctatgatagcctgcgctgcgtattatgcatatagtgcaggggcagaagatgatctgtcgcttgacgcgtatgcaagcctgcctctatgaatgcaaaaataaaagcagtaacgaagtctgtttttaaatgcttttatcatttttataaatatataaggccttaaagctttatgccgggtattatacgggcaatgccgaagaccggcgcggttatggcctgctttttagcatttttacagctaatatcagaccagaccaagcggcagtggataaaaaatataatgtataaaacaggaaacgaaaatgatagtattaagtgcaactgatataaaaaaagaatatggtacggatataattttaaatgatgtatcatttcatataaacgatggcgacaaagtagggctcatcggtgcaaacggcgcgggcaagactacgcttatgaaaattttggcgggtgaaatgccgtatgaaggcggcaattttttcgtatcaagtgagcttacggtcggttatttgcgtcaaaacgacgattttaaatctgacaaaaccgtaattaaagaggtgtacagtatttttgcacctttagaaaaagctgaagaagatatgcatacgctttcagacgaaattgcagagagggcagcaaacggcgaagatgtgacaaagcttcttatgcgctatgacagtatgcatatgaagtttgaacaagatggcgggtacagctacaaaagcgagataaacggcattctgacgagtatggcttttacagaggatttttatgacaagaagatatcgacactctcgggcggcgagcgaacgaggctggcacttgcatgtatgctgctcaaaaagccggacatcctgttgctcgatgagccgaccaatcatctcgatatcggtacgctcaaatggctggagcagtatctcaaagcctacaaaggcactgtgctcataatctcacatgacagatattttctcgaccagctcgtgaataaaatatttgaagtggaaaatcataagctttatatgtacgatggcaattacagtacctttgcgcaaaaaaaagcggaaaggcgtgctgccgaaatgaaaaaatatgaaaagcagcagaccgaaatagcaagacaagaggaaatcatcaggcgctttaagcagcacaacacggagcatctcacaaaacgggcaaaatccagagaaaaaatgctcgaacatatggaaatagttgaaaggccggaaaatcttccggacaaagtaaaaatcagctttaaacagaactttaagagcggaaacgatgtgctgatcggcgaaaatttatcaatgggttttggctttggagagaaaaggcgtgagctcttcagaggtgtaagctttgatataaagcgcggagaacgtatctgtatagtaggccctaacggcataggcaagaccacgctgctcaagattatgatgcagcagattcttcccgacagcgggcgcgtaaaaatcgggcacaatgtgacgtttggatattacgaccaggggcagcggcttttaaatgatgcaaatacagtgctcggcgagctcaaagagtcatacaggctttatagtgatacggaaatgagaaatattcttgggcgctttttatttcgcggcgaagacgttttccttgagatcggagcgctttcgggaggtgaaaaagcgcggctttcacttctgaaaatgatgctttcgggtgcaaatacactcgtgctcgatgagccgactaaccatcttgacatagattccaaggaaatatttgaggatgcgcttctcgattttccaggtacggttatagtcgtatcgcatgaccgatatttcctgaataagataccgacgagaatatttgagattgcgccggacggaataacggaatatctcggtacatacgattactatgtggaaaagaagcagtcggttgactccgggaaaaaatatcttgcagagctctcaggcaggggagcgggaggaaacagcagttatgagccggcatatagatttaatggcgcagaaagcaaggaagcacacgtatgcggcgaaggaaagagcgtaaacgaaggggtgaaagcagaaagtgcagcagcgccgggcgaaaatgtcgcaggaaaaacggtattgccggaaaacagcgctgaagcgcggcgcctgcaaaaggagcgtgaacgcgaggagcgaaagcttacgcgtttgatagagcagcttgaaagcgaaatagagcagcttgaaagtgatattacagctatgacagaagaaatggcgctgccagaaaacctcacaaatcatgagcttttggcggtattgtctgtcgggcttgatgaaaaaaatgcacttctttcgcaaaaatatgaggaatgggagcagcttgcagcagaaaaatcaaaaaaagagtaaaaatttgttgcatatatgggaactcatatatataataaagaatgtgttagaaaagtgatataacggtacggaggtttatcatggtttttgaaaaaataagagaaattattatggagcaactcaatgttgaccaggatgatgtaacaatggatacacatcttatgaaagatcttgaagcggattcgcttgacgctgtggaaataattatggcgatagaggatgagtttgaaatcgaaattcccgatgatgatgcggaaaaatttcaaaacgtttcagatatcgtaagatttgtggaagaaaaaacaaattagagagaattttatatgaaggaaaaagcaaaaatttcaaatgcggtcatcaaaaggctgccgcgttacagaagatatcttaaagaactcagtaaaaagggagtagataagatatcgtcaaatgagttttcgagtcttatcggctatacagcatcgcagataagacaggatctcaacaacttcggtggctttggacagcaaggatacggatataatgttgaagggctttataatgagataagcgccatactcggtcttgataagcagtacaaaatggtggttgtgggagccggtaatctcggacaggcgattgtaaattacatatattccaagtcgggatttaatgtagaaggtatatttgaagtcaatccgagattgataggaatttccataaacgatattaagataatggactatgaggggcttgttgagtttgtagaggagcacaacacggatattggtattatctgcgttacgagggacaatgcgcaggaagttgccgataagctttgctttgctggaataaggggcatttggaactttgcgccggtagatatagaagtgccggatcacgtatcgcttgagaatgttcatttgtcggattcgcttcattcgctcgcatatcatatgaacagggcgaataagttaaaagaagaaaaagctgagaaggccaagaagaagagtgaaagtaaaactaaatagcaaaaaataaaataaccgtttctttaattggaaacggttattacttattctctcgtataattaagcctgtggagcgtcaaccgggcaagcgtttgcacatgaaccgcagtcaatgcacttatcaggatcgatctgatactgagtgtctccctgagaaatagcttctaccgggcattcagcagcgcaagcgccacagcttatacaagcatcactgattttgtaagccataataatatcctccttaaaaattaaattgtcaatcttacgatatagagatattataacagaattgagtggagaagtaaagatgaaagtttacgcgttggtaggaaaaagcggtacaggtaaaagttttcaggctacatatttgtgcggacaaatgaacatagagtacatcatagatgacggtcttctaataggtcgggcagctgtgcttgcgggtatttcggcgaagagacaaaaaacaaagataggagcggtgaagacggcgctttttacagatgatactcatatgcgcgaggtcagagataagctttctgaaatatcgcccgcacgtattcttgtaataggaacgagccgtgatatggtttttaagatttgcaggcggcttgggcttgaggagccggagattattataaatatagaagatattacaacggaggaagaacggaatgcggcgcaccgccaaagatatgagcagggcaagcatgtaatacctgtgccgacatttgagcttaaaaaagaattttccggatactttatgaatccgcttaagtggtttatggggcgcggggcgagaaacagctcccgcggtgagcgcacagttgtacggccgacatacagctatctcgggaattataatatcagcgacagagtcataaccgatatcataaatcatatatgtataaaatcgggatttgtgtttaaagttaacaagataagcgtatataaaacgaaagcgggtataaaagtaaaggtgtttctcattatgtacgatgggagaaatattattgaagctgccgaaaagatacagcgtgaaatagtaaaagagatagaaatgatgacagcttttaatgtagaaaatacggatatagaaataagaggtttaaaatgcagttaataaaggaagtaaaagattttaatttgaagcatatatttgactgcgggcagtgtttccgctgggaagaggaagctgacggcagctatacgggcacggcgtttggaaagactgtaaatatgcggcttgagcgggaggctgacggcgcttgctgtgcgggaagcggcggcaatcacggcgggggttttgaaagctgcagcggctttctcataattgacggcgcatctgaagaggattttgaaaatatctggcgcgcttatctcgaccttgacagggactatggcgagattaaaaaaacgcttgcggcgggggatcttgtcgttgccaacgctataaagtcaggtgagggcataaggctgctcaatcaggataactgggaaacacttatttcttttataatttctcaaaataataacattccgaggataaaaaggtgcattgaaaatctttcggcggcattcggagaaccgctcccggagtacaggggcagaaaaagatacgcgtttccgacttttgagaggctatctgagcttgagccggaagatctttccgaaatccgccttggctacagagcgcgctacataacagaaacggcaaaggccgtagcatctgacagcggagaaatgctttattcgctcagcgaggtgccgacaaaggaggcgtatgaatatttgacgagcctgtgcggagtcggacccaaagttgcaaactgcatactgcttttttcgatggagaaatacgaaagttttccaattgatgtatgggttaggcgtgttatgaacagactttataatatagatgaaaatgatgtcaaaagtatgtcggcgtttgcaggtgaaaaatttggagcgtacggcggttttgcacagcagtatcttttttactatatgcgcgagtttaaagaagaggcggtggcagcagaaaaagcgactgtaaatgagaaaaagtaaaatgcattaaaattttttggataaacttgttgacattacctaaaaaaagatgtacagtatagttagcactcaaaagagatgagtgctaacaaaacaaaaagggtttaaaatataaacttaaatatatgatagtcagaaaggagaatttggtatgagttttggtatcaaacctctcggaacgagagtagtaatgaaaagatttgaagcggaggaaaagacacagggaggaattattctttccggtcaggcaaaggagcagccgcagatggctgaaatagttgcggcaggtccgggaactaaggacgaaaagatggagctggcagcgggagacaaggttgttttctcaaagtatgcaggcactgaaatcaaatatcagggtgaggaatatatcataatgaagcaggaagatatccttgcaaaagttgactgatatggtgcattaggctaaaatttacaaataatataatcgcaagattaaattttcatataggagagagggaattaaaatggcaaaagaattatattacggcgaggaagccagaagaaagctgcaggcaggagttgaccagcttgcaaatacagtaaaaattacacttggacctaagggcagaaatgtgcttcttgaaaagaagttcggatcgccgctgatcacaaacgacggtgtgacaatcgcaagggaaattgagcttgaagatcctattgaaaatatgggagctcagctggtaaaagaagttgcgacaaagacgaatgatgttgcgggagacggtacaacgacggcgacacttcttgcacagataatcataagagagggctttaaaaatgttgctgccggagcaaacccgatggtaataagaagaggaattcagagcgctgtagatgttgcgtgtgaagaaatcaagaagctttcgcagactgttgactctaaggatgctatcgctcaggtggcgtcggtttcagcggctgatgaagccattggccagcttatcgccgaggctatggaaaaggttggaaaagacggcgttattactgtggaagagtcaaagtctatggggactacgctcgaggttgttgaaggtatgcagtttgacagaggatatctttcggcatatatggcaacagacacagacaagatggaatcaaatctcgaaaatccgtacatcttacttacagacaagaagatttcaaatattcaggatttgcttccgctgcttgagcagattgtgcagcaaggcagaaagctccttatcatagctgatgatgtagagggcgaagcgctcgcaactcttgtgctcaacaagctcagaggaacatttgactgcgtagctgttaaggctccgggttttggcgacagaagaaaggctatgatggaagatatcgctattctcacgggcggtacggttatttctgaggaaatcggctatgacctcaaggaagctactattgacctgctcggtacggcttcatccgttaaggttactaaggaaaatactgtaattgtaggcggcgccggaaatgcagctgatatcagtgctagagtaaatcagatcaaaatgcagatagaagagacgacttcggacttcgacagagaaaagcttcaggaaagacttgcaaagctttcgggcggcgtagctgtaattcaggtaggagctgcgactgagacagagcttaaagaaagaaagctcagaattgaggacgctctcaacgctacaaaggcggctgttgaagagggtattgtagccggcggcggtgttgcacttgcaaacgctattccggcagttgcaaagtatgtgaagactcttgcgggtgatgaaaagacaggggctgctatcattatgagagcgcttgaagagccggtaagacagattgcagaaaatgctggatttgaaggcagcgtggttgtggcaaaggttaagtcgagcaagagcggtgtaggcttcaacgcggcaacagagcagtatatggatatgataggtgctggtatcgtagacccggcaaaggtaacgagatcggcgctccagaatgcggcttcggcttcggcaatgctcctcacaacagagagctgtgtagcggatattccgaaggatgagccggcaatgccgatgggcggcggtatgggaggcggaatgggtatgatgtagtatccgttctgtgactctgacaaaaagtaaaatataagatcatttcgtaatgagcgcctttcgcgggcgctcattttttgtactgtgatgcgatttggccaaaagccatatgacagagatatcttttacagtaatttcaaaaatttgaatattgagatgctaaaagctgcgggaatgtttttaaaggacgcacttttttattttttgcattttacctgggttaatggtaaaattataatatatacatagacgttttttgataagcattttttggcaaaaatcgtctgagtatatattttggggagggattataattgcataaggcaaaaaagggggacgaattgatacttgttatcaattccggctcgacgtcgacgaagctggcgctttttcgcggtgaaactgaggtgagctcaatttcggcagaacatacggcggaggagctttcacggtatgacagcgtacttgcgcagaaggattttagaaaaaacgcggtaaaggcatatctgcaaagcgagggcatagagcttaccgagcttgcggctattgctgcacggtgcggcgcgattgccgagatggagagcggcgcgtatatagtggacaagaagcttgcgcgcggtgcggcggcaagcgaatcgccgcatcctgcaaatctggcgccgattatagcttatgaactttgcgaggaagcaggaaacgggctgaaagcgtttatttatgacggagtttcatgctgcggcgttgcggatgatatttacaaggtatcggggattgaggattttgacaagccattttatacgcatgtgctgaacagcagggcggtgagcatagagcaggcaaagcgcgatggcgcggagatttctgatgtgacatatatagcggcgcatctcggcggcggtattacggtaaaccttattaaggacggtagagtgcttgattttgtcggcgatgatgaaggggcattttcaccggagcgttcgggcggattgcctgtacgcagactcacagatctctgctattcgggaaagtatacgagagaagagatgcagatgcgattaaagggtaaaggcggactgatgtcatatctcggtaccaacgatacgcgcgaggtggaaaaacgcatagaggatggcgacggtaaagcacggctcgtttacgatgcaatggcgcttcaggtcgcaaaagatatagcgtcgcttgcggctgttgtatccggcgatgtggataaaattattcttacgggaggaattgcgcattccgcggcttttacgggaatggtgaaagagcgtgttgagtttatagccccggtggagattattccgggcacatttgaaatgcaggcgcttgcaggcggggccttaagagcgcttatcggtgaggaaaagtatcacagactgtagtttgatataaattgtttaggtgaagtttgaagaaagtataagaaggaatggttatgaataaaaacgcggcaattaaggcaggaacgatcgttattacgactatgctgacagtatgttctgctattgaatgttatttcgacctcgacggtacagttgaggttagggatgcatctgtgcctatgctgaggatggaagatgtgcttggggcgcatagcggcggcaacaggtgggaatgggataatataagcggatttaacggagtatatgatgccggaaatgttttcgggctcagtgaaaatgaaagcggtgcaggcggtgaagatacgttgccgcagggtgacgaaaattatacgagtgcggaaaacgggagcggcgatggcaatgagctttccggagaaaacgatgaggatcttccccaatgggagccttcgggcgaatatgatccgtcgataaatttactcgtgcttgtaaacaaggaatatccggtggatgaaaattacgtgcctgcggaccttgtaaaattaaattactgcgcagctgacagaagcgccgaatggcaggtgatgacgcgcgaggcggctgatgcgttcaataaaatggcaggagatgcgcttgcagaaggttacgaaattgtggcgacgacggcataccgttcgtataattttcagaactatctctataacagttatgttgaaagagagggacaagctgcagcggatacattcagcgcaaggccgggaaaaagtgagcaccagacgggacttgcggccgatgtaacgtccgcttccgtgaattacagactgacaagcgatttcggtgatacggaagagggtaagtggctggcggaaaactgctataaatatggatttattatgcgctatcagaagggcaaggaggacataacggggtatatttatgaaccttggcatgtgagatatgtggggcagaaagcagcgaaagagatttgggagagggatctgacgcttgaagaatatctcggaaaaatgccgtcgtggcttgaaaacagcgatattgatgctgagaaaagcgagtagtgggcatcgggaagtttgtacacagctttatgaatgcactttattaaaaaagtgccgccgaaagcttgtcaagtgtgtcctaatgttataaaatatatgttcaataataataagaagtttttatataaagaattgttttgcaggaggagaaaatggcggagttttacaaagaaccttcaagaacattcagcgaatatttgctgataccggggtattcttcaaaggaatgcagagtagaaaatgtcagtcttaagacgccagttacaaaatttaaaaagggtgaagagcctgagctcagtatgaatataccgctcacatcggctgtgatgcagtcggtttcgggagataatcttgcgatagcgcttgcaaaggaaggcggtatatcgtttattttcgtatcgcagccgattgaaagtcaagcggctatggtaaggcgtgtgaaaagccataaggcgggttttgtaaggagtgattccaatataagacctgaccagacgcttgccgatatactcgctctcaaggagcgttccggtcattcgacggtggctgttacggatgacggtacgccggagggaaggatggtaggtcttgtgacatcgagagactatcgtgtgagcagaatggcgcccgatacaaaagtaagagagtttatgactccgtttgacaagcttatcgtggcccaggagggggtaacactctccgaggctaacgatatactctgggatcataaactgaacgcgcttcctattatagatgagaatcaaagacttacatcgtttgtgttccgcaaggactacgattcgcataaggaaaatccaaatgagcttctcgatgcgcacaagcgctatgtggtgggtgctggcgttaacacgcgcgattataaagagagaattccggcgcttgtagaagccggtgcggacattctttgtatagattcctctgagggtttttccgaatggcagaaagaaacgatagattttgtcagagataagtacggtgacagtgtaaaaataggagcgggcaatgtcgttgataaagcgggctttaattttctcgcggaagcgggtgcggattttgttaaggtcggcattggcggtggatctatttgtatcactagagagacaaaaggcattggcagaggacaggctaccgcgattattgatgttgctaatgcgagaaatgaatattttgaaaaaacgggaatttatattccgatttgcagcgatggtggtctcgtttatgactaccatatgacgctggctctggcaatgggtgcagactttttaatgctcggcaggtattttgcgaggtttgatgaatcgccgacgaacaggctcaatcttaacggcacgtatgttaaagagtactggggtgagggcagcaatcgtgcgagaaactggcagcgctacgatatgggcggcgacagtaagctgagctttgaagagggtgtagattcgtatgttccttatgcaggtgcgctcaaggataatgtgcagatgtcgttgaataaggtgaaatcgacaatgtgcaattgtggagtactgacaattccggaactgcagaagaatgcgaaaattacactcgtttcggcgacaagtattgttgagggcggcgcgcacgatgtaatacttaaagatacgtcaaacaatgtgagataaaatgatggctgcggactgcgatttttacgttgcggtccgcgctttgtaagcaaacagtatttaaaataaaggacaggagctattatggaaagagaaatgattatcgtgcttgatttcggcggacagtataaccagcttattgcaagacgcgtgagggaatgcaatgtgtactgcgaggtgcatccgtatacaattccgcttgaggaattaaaagcgaaaaacccaaagggaataatattcacaggaggtccgaacagtgtgtacggagagaattcaccgcagtgtaatcctgaggtgtacaagcttgggattccgattctcggactgtgctatggtgcgcagcttttggcgcatcagctcggaggcaaagttgaaactgctcccgtttcggagtacggcagtactgaagtagagcttgcagcagggacgtcggtgttgtttaaggattgtgccggggagcagacggcttccggaaatgtgaaatctatattctggatgagtcatacggattacatatcggaagtacctgaaggttttgttgtaactggatttacgccggtatgtccggttgcggcaatggaaaatgctgaaaagaaattttacgcctgccagtttcatccggaagtggtgcattcaagagaaggaataaaagtgcttgcggcgtttgttaaagatgtctgcggatgcagaggagactggaagatggatgcttttgtggagactaaaatcaaggaaatccgcgaaaaggttggaagcggcagggtgctctgtgcgctttcgggaggtgtggattcatcggtagcggctgtgctcctgtccaaggctgtcgggaagcagcttacatgcgtgtttgtagatcacgggcttttgagaaaggacgagggcgatgaagtggaagctgtgtttggtcctgacggaccgtacgatctcaattttataagagtgaacgcgcagcagcgcttttatgataagctcgaaggggtggaagatcctgagcgtaagcgcaagataataggtgaggaatttatccgcgtgtttgaggaggaagcaaagaaaatcggtgcggttgattttctcgtacagggaacaatatatccggatgtcatcgagagcgggctcggcacatcggcagtaataaaatcgcatcacaatgtgggtgggctgcctgaccacgtggattttaaagaaataattgagcctcttcgcatgctatttaaggatgaagtaagaaaggcgggtctggagcttagtatacctgagcatctcgtatttcgtcagccgtttccgggaccgggactcggcatcagaatcatcggggctgtaactccggaaaaagtgaaaattgtgcaggaagcggatgctatttatcgagaggaggtcaagaacttcggactcgaccgcgagataaatcaatacttcgcggcgctctccaatatgcgttctgtgggcgtgatgggtgatttccgtacatatgattatgcaattgtgctccgcgctgtattgacgagtgactttatgacggccgaagctgcgcatctgccgtgggagctgctcgataaagttacaacgcgtatcgtgaatgaagtaaagggtgtgagcagggtgctttatgactgtacgcagaaaccaccggcaacggtggagtttgaatagtactggagtgtacggattattttatatggaaggtagtctatgagattaccggatttactagaattattttagttgtataagttttgcaattttatgttgccaataaaattgatgattacatggataatggatagaggaggagaaaaatgtcattaccaacaagttatatgacagggagtttctcgaaaataccacagtattttgacacaatgttgactgcgaaggcaccggataagtttacgactaaatttatggctgatttaggttttacaagttctaatgacaggcaatttgtgaatgttcttaaggctatcggttttttagatgatgctggaacacctacagaaagatattttaagtttcttgaccaaagtttttcaaaacaaatggtagcagaagggattaaagaggcatatgcggatttatttgcattgaatacttctgctaataaaatgacaaaaagtgaggtagaggggaaatttaaaacattaaccaatggctcaaaagaaaacgcaacaattagttatatggctagtacctttattaatctttgtgggtatgctgattggtctgaagctcaagtattggagaaaaaatcaaatgaaaatagtaataatataagtcaggaatcatttgttgatgacactgaagaacctaaacagtataatcagcaggtaaggggatttgatttaaattatgatatacatattcacttaccagcaactcgggataaagctgtttatgatgcattatttgcgagtttagcaaagcatattccacttaagtaaggtgatactgatgaaaacggatttgtattcattcgcatttagggggctactagcggaagaagcattagataaagcggggcataaaagatatatagctgaagaagcatttttctccgaagaattagcgaagaaacttcattttgatgagatagatgcaaaatatgttgaacagtcaaagaccatgattactgtatttgcgacaataactgcttttgaaaatgcctctagagaatttgtatatacgacattattgggggcatatggagatgaatggtggagcaaaggtgtgcaaaatggaatacgagagaaagcataatctcgtagagaatctgagacaaaagtaaaatggcatgtgaatcgtggtgatatgatgatgtcgtatttggaatttggagatttgcctaaaattatttgctcccaaggaaattggcaacattttgaaccttattttggattctctaatgcacaagagtggataaaaactacgtttgatgctgtagaaaagtctcgtaatgtaataatgcatagcggggtgttagatgagctagatattgcacgtgtcggtatgaacataattgattggctacatcaaataaatgcataaatagctattatctgtggcaacattttgacaacagaaaaccagcaagcaagaataaatgttgtaattgaagtaaaaagcggtgtgtatttgtacaaaacttaaacaaatgaagttaagggcaacaaagaacacgctgaatttgaatagtacgagagtatattatttattttatatgacaggtgggttataggattgcctgatatttttttatagcataattttgcagatattttgttgcatgatcgtatttgataaaggagtagtttgcaatatgaatgaaaaagaaacatttactggagaaatagcgaagcaattaccagttaaggatatatataatgatttggcgcatccggctttaagtacagtaggacaaggactacaaggggtaacaaaactggctctagcaccaatatcggcattagtatggggatatgataaaattgcagactatttagatgttgcaatacctgaatattttgaaaaaagaaaaatagcaaaagaaaaggttgtttcaccagatcctgcaattgcggttccagcggttgaggcaatgagatatacttcgcataaggaagaattaagagagatgtttaccaacttattgggtgcatctatgaatgctgattcaattgacgaacatccggcctttgttaatataatcaagcaattatcctcagacgaaagtaaaatgattaagtacttatatcaaaacaataagcagccgatgataaagattagaattaaattaggtgagggtgctggtgagaacgatttgctaccatactttagtgatataggttatattactaattgccaatatccgcaaaaatttccggaatatttagataatttacataggttagggattgttgaggtatattatgaccgatttttagtggacgaaaagtactatgaaaaattgaaactccatccacaatttcctcatgtagaagggaacggaaatggcaatattgtggaaaagaaaagcatatatgagttaagtgaatttggaaaaaaattttgtaaagtttgtttgtcgtgaaagctgggttttgataacgaaaagatggcaacattttggcaacagaaaatcagcaagccagaataaatgatgtaattgaggtaaaaaacggtgtgtatttgcatgaaacctaaacaaatatagttaataacaacaaaggacacgccgagtgggaataatcacagaaagtctaaaaacccagtaatatcaaggttttttgaactttgcccaccccttttgataacgatttgataacatcatttgaagtgactattattctataccccaagtggcttgtaggttatcagaataattttcaaatggctgttaccaagaaataatctgtattagacgataaaaagcccttaactgtggatttgtaccgcagttaagggctttttgtcgtcttttttcttagtcgggtttcaggcgatctttgaaggtgtctaacattacatcgttcagttcccccgaaggaacctttacccagccgcccgtcgtgtcgaacttaggatagtggtaacgccattggtcgtaggtatctttatcaatctcacctgcatcgagtttggctttttgctctttccaagcggtaagcatacgaataatctctgtggcatccttgccattctcagagttgactttaagacagacttccccatctgcttcgctgacggtaataccgtaaatgtcctcaagggcaaacagcgtgtgcatcagacctatgtaactgtcaatatcgggcacattcaacgcttccgatgctacatccaaaacttgtgccaacgctgcggtaatatctgcttttggagtacgggaccctgtttcatactgtgccatacgaacatcagcagatttatcgggaaaaccgagttgtaaaccgagatatttctgtgtcattccacgcagattgcggaaaaagtgaattctttcgctaatagccatagcaattacgctccttgcttatatactgtgcaatcagtataagaacctgtcaagcatcgggttgtattttctgcgaaaatctctaccctaacttgcttgacagaaccttgtattgggtgcaatttcattgtacacccagtatagcataaatgtttagtgctgtcaagaagattccaaacaaaaaagtttagtattttctcgcgagccacttgacaaaagcaaatatgtttagtataatgatatagaactaagcatttgcgcttagtaaaattgaatgaccgtccaagtgggatatgattttgccaagacctccgagtggcgacggagcgagcgaaacaacgccgctgaaaaagcaggggcaggaacggcacttgggtaaagcggcaccccattatactaaccgaaaaaaggagggaacttatgggacaacagtttatgcgtgtggaagaagtcgctaagattctcgatgtttcaacctcgtatgcctataaagtcatacgagagctgaatgaggaactgaagcgtaaaggctttattaccatctcaggaagagtcaacagagagtattttaatgaaaggctgtaccaagccagaaaggagaacaaaaatgcctgtttataaaaatgaagataacggcacttggtatgttttaacacgatatgtagattggaaaggcgagcgcaaacagaaatgcaagcgaggctttgaaaccaaacgagaagcgcaggagtgggagcgagtatttaagcagcaaagtgctgccaatatggatatgaacttctctgcctttgttgagctttatataaaggacataaaaccccgcttaaaagaaaacacttggctgaccaaaaagcatatcattgaaaccaagattttaccctattttgaaaagaaaaatgtcagcgagatcaccacgaaggatgtaatcgcttggcagaatgaattgctcgcttttcgtgatgaaaagaagaagccgtattcacagacctatctcaaaaccgtccacaatcaactcagtgcgatttttagccacgctgtcaggcactatgatcttcgttccaatcccgccgcaaaagccggtaatatgggcacagaggaacgaaaggaaatgaagttttggacgaaagaagagtacaagaagtttgccgatgaaatgatggacaagcccgtatcctactacgcatttgaaatgctttactggtgcggcatccgtgagggcgagttactcgctctgactgcgggggacttcgactttgaaaaaagtactgttacgatcagcaaatcctatcagcgtttgcacggcgaggatgtcattaccacaccgaaaacaaggaaaagtaaccgtacaattaaaatgccgcagtttctctgtgaggaaatgcaggattatatcggtatgctatacggatacaaaaagaaagatcgtatattccccatttcaaagaattatctgcaccgagaaatggatcgtggctcaagagccgcaggggtaaaacgtattcgcattcacaacttgcgccacagccatatttcattgcttatagatatgggcttttctgcggtggcgattgccgaccgtgttggtcacgaaagcattgagatcacttaccgctatgcacacctattcccgtcaaagcagacggaaatggcaaagaaacttgaatatgaaaggatggatattgaaaatgtccgctaaaaatcttgaccgtcacaaccgttggcgaagcaaaacaattgctttccgtatgtcaccacaggaggctgatgtttgggacagtaatgtcagaatatcaggactgataaagcaggattatctttgtgctcgtgccctgcagcagcaaataacggtggtcggcaatccgagagtctataaggccctgcgaaacgagcttgccgccgtcctcgatgaacttaaacgcatcgaagccggcgcaggtgttcacgatgatctgctcgaccgtattgagcagattaacaccacgctatatggaatgaaggagcaaaaggatggcatataaaaaccgaaaagactgttcccattgtatctgttggcgcagatacggaacagtcttctcaaaaatgtactgcaaatattataacctatgactcctccaatttcaatagttttgagaaaaattgaaaggaggcaacgcctattgcggaattaaaaatcatcagtatggatgaagtgcttgtcgaagaagtggaatggctgtggtatccctatatcccatacggtaagttgacaatcattcacggcgacggcggtgaaggaaaaacaacacggatattgagattagcggctctgttgtcaaggggagaaaaactaccctgcgacgacaccgagcgcgagccaatcaaggtaatatatcaaaccgcagaggatgggcttggggataccatcaagccccgtcttcttgccggtaatgcagactgctcacaaatcaaggtaatcgacgaatcggaaactgcgctgacaatgctcgatgagcgtgtggaaaaggccattgcagaaacgggcgcaagggtaatgattttagatccaatgcaagcctatatcggggcaaaggtagatatgaaccgagcaaatgaagtccgtgccattctctcttagcttggcagggtcgccgagaaataccgttgtgcgattatacttgtggggcacttaaacaaggcacagggtaacaaatccaattatagaggtcttggctctatagactttcaagcaacagcaagaagcgtgcttgtagtcggcagagtaaaggacaagccggagatacgagtggcggcacatcaaaaatcttccctcgtaccggaaggcaagcctatcgcctttgaactgagtgaagccagcggcttcaaatggctcggtcattatgatatttccattgacgatcttctcagcggcatcagccgtgagaagaaatccgatatggctgaaaatttaataaccgattgtctgtcaaagggtaaatatcctcaacagataattttgaaaaaagcacaaaacataggtatctcaaaaagggtgcttgatgaagcgaaaaagtctttaggagctatctcaattaaagaaggttgtcaatggtattggcaactacccgaagaaaaagagagcggcgaccagaaagattgcaacattgcaaaggtgcgggactttcgcaatcttgcaatgttctttttcggcaggtatgacaatacgaagtttcggcggggtgcagggaggccttttcaaaggcctgccctgctggggagttgtccgcagacaacggggcaacgctccgcaccccctcggagagcgcaatagcaccttttgatggcagtaggctgtcaaaagtgcctttgcgttactcttgacaagagtaacagaacccccggctacgccggataaggaaaggatgtgagatttaatgaaaagaacgataagtgcaatggtcggtaaaggctcggttaatcacaacagccgcaagttcaaagcggaaaatgttgacggcagccgaacacatcttaatattgactactgcaatgaaaacatcaaaaaggtttatcatgatttgtttgacgaagctctcaaaagatataattccaagcagacaagagccgaccgcaagatagaaaactattatgaaaaaatccgtaattcaaagcaagaaaagccgttccacgaactcattttgcagataggcgataaggaaaatatgagcgcagaaagcgaaaacggagagattgcccgacagattttagatgaatactatcgtgggtttcaggagcgtaatccgcagctaaaagtgttctctgctcatcttcatatggacgaagcaacaccacatttgcatattgattttgttccgttcaccaccggtagcaagcgtggacttgatacaagagtatctctaaaacaggctcttgccgcacaaggctttaagggcggaacccgtggagataccgagtggaatcaatgggtaagcgcagaaaaatctgcacttgcgtttgttatggaaggccacggaattgaatgggaacacaagggtactcacgaaaaacacctatctgttttggattacaaaaaacaggagcgagaaaaggaaattttcgttcttgaagataaacttgccgagaaaaaagacgagttccgtgttatggctgaccgcattgaaaactttgataacggagaaaaagccttgcaaaaacttgatgaaagcataatgaatgatcctgaatatcagctgcccgaaccgcctgcaatgatgtcggcgagaagttataaggcaaagtttgttgagccgcttatagcccgatttaagtccttaatcagtaccttattcgcacgatatttcaaagcgatagatagctataataggttaaatattacgaatgcaaatctgtaccgtgctaacgaaaagcttgaaaaggtaaacgataaattatcacaagaaaatgaaaatctgcgtatggaaaacagggattacaaacttctccgcaaagtatttggtcataaacaaattgatgacttgcttgatagagcaaagtcggaaaagcagtctaaacagtgtgaaaaacgctttataaattataaagatgaaaggtaggacaacacaatgaagcagcattttacagacgaaaaaacggggatccgctacaccttgcagggagattattatctgcccgaccttgcgttacccgctgaagaacaacagccaatcggcatatggggacaacgacatttgcgacacatcaagcaaaatcgaagggtactatacaccaatttgctgacaagcggcaagttaaacagttaccttgctgatattgacaaacaggcagaagaaatgttttgtcggctggtaaaacagatggcggagcgtgagggtgtgaccgaacaactcaaagcggataatcagatggattgggtgcataaaatgaacagtattcgtaatcgagttacggaagctgtgaatgcagatttaatctacacataaaactatgccgagtgtgactctgaaagcaagctgctctcggcgttctttttgtcaaaacggcaactcatcgtcgtctgccgtatcaccatctcccattattcctaatacatttttagcgcgaaataaaagatgatcgtatgtaagaatcgatatttgattgtatgcagcgttgagtattctgtaagcttcccgctgctcattgttccaatcattggaacgcccaaaaatcaaaatacagcgtggttttattactttactttttgtcctttcgatgaatttaatactatttgcttcacgctcaatagcataaatatagctaaggcattgagtaatagatttaactaaatcagtggaagggacatagttattatgatcttttgttgcagaccaaaactgcaaaccatttggcttttttatttctaccaaatccacaaatccatcaaatgcacgcattatatagtctgcaatattctcagtatctatatttcgctcatcaataatttgtgcaaaatccgaaccgagaacccacttgttttcggaaaaccaattctgccaaaaagattcaggtaatgcttctccaagatttctttcaaaatcaataagagcatctttcttttttatggatgttgcagcaacaaatacattatcagacaatattcctttttcaatcagcaagcctgccgtatcactattatggtcaactaactctttgaatttacttataagctcttcattatcatcagatacacttatatattttccagaaccaagatttacaggaacataattttcagaaatatagtaaataagagcgtttaattcttcgttgtctaatgtaagttcactttttggtttttcgttttcaactttgccaaaaggaaacagatatcttcctatttttaatgatatatctggttcatcgtgatgcttatgggggattttcattaacattgcttgagagtacactctttttttcgttttaagtgtatgaggagaggcataatccacacctcttgaagacgttttaatctcactcatataaagcctcctttgtagtgtttcttagcttgtttgttgcgcttctttctatatcagcagttttatttaccgagcatttatatggcttgcaatgcttcaagagtatgcgaactttgcttttttattttgctaatatatgccgtcatataatcatagtcgggcgctccatcggtgtttgcaggcaattttattacaaaatccctcttgatatgagcattcaattctttaataaatgctcgataattgttttgactctctttaaatattgcagtggcaataaattgcttcacttcaaaggtgatattttcttttggaattaaaactgcaacattttggcttgtataaaaaggttcttcttggataaaacaggagcccaaatatgcaccacctaatgctaaggttaaacagcctgaatcatagggatttaatccctgtatttcgttgactttttgggttataccattgttaaaattggagcgacctacaaagtttattttaggtgtggtggtgtccatttttgctttatctaattttgtgccggaatcaatctcaaaaatgtcatataaatgaaaggttcgccactcttttgtatttattttttttaaaacagcggattgcttcgctgactgcaatttagtcagcgaagcgctgactgcaatttccatttttttcatatattcttccatatatgaaaaattggggttgccgtctttatcagctggcaacattattatgtccttttgaattgatttcgaagatatagaatctccccaattataagtatgccctatgcttgcctttaatgccgtaatcaaaaacaactgtactttctctgtcctataatcggtgtcattaagatatagagcaaggttatgactatcatttgaatagaaatcttctttttgatatgtgatagtcaaagttttaccgccaatcataatgcagttccctgtttcttttaattcctcattataggtgatatatgtataaacaccattgttttcattgcttgcagtaacatacggagtttcgccactatcttcttcaatttcatttttcaatatactgtgcgtattttttacttcaaacaaatcaataaccttaaactgtttccaatcggctgtttcaatcttgctcacaatctatcacctccttgctatccaaagaaatgcatacttttttgtcagcagatgtaatctcgctactatacataactttttttatcaaggcatcactaaactctttcacatcaatgccctgtttaaacatcaaatagtccatcattgttttggtaaaatcttcctcactaatttcaaactctttttcgggaacctgatagcttaaatgttcagaaggctttatccattttattgtatcatcgcccgattgttttcgaattatttcaatccatctgtcctcaatgctctgccatctatctttaatgtcttgtctgccttgatttttgaccgtttccaaaccgtcatcctctatgtagcaggtaaaaatctctttattgttttgtggaacacctgactcaaaaataaagatggaagtcgttacaccctcagaaaatatcttttcaggtaacttaataattttctctaaggtgctatgcttgagcagtttagcaccgttatccttttcaagttttttatcaggaagaataaaggcgcattttgtatgcgggggtacattcaaaagaacattgtttacgattgttaaacaaccatatttgcgctcaaagggtggattcatcaaaacctttgttatgtagttatttgtaagaatgaggttgccgttcttgtccttttgaaattctccttttttgttagttttatagctttttgattttatccaatcgcaagcctcttgtgtgcgtgtgtccaactgttccaaattggttttgccgtctttatgtatgagcatatttgcacaggcaagagcaaatatttccctgtcaaactcaatgccaaacaactgtgtttctttgatttcaggtgttttcttggcatttatgccgcccgcttctttaatcatattgcacatagactttacaagaaatgcaccggagccgcaagcagcatccagtactctgtcgttttgatctatatcaataagacgatacataaacgaggtaatgtggtcaggggtgaacacttgcccgctttcagatttctttttataacggttaaattcattgaagaatatacccattacatcttcgccattccaataatccgaattaacgcaatcggaaatttcagaaacccatttaatgaagttgtcaattgcttcttgattagaagcgttattcattttgatttcagaataaacttcaatcaataaatctagctttaagttttgtttcttactttcttctaatgattttgataaagtgcttaaaattgaatttttcataagcgaaaaatccatacctttaattaatattgcgtcatatcttttggcaaccaaagcacaagcggtaaaaatcattctgtgatacaaattcttaataccaaactctgtatgcaggcaatcgttgattttctttgtaagattataaatacgttgtttatctatggcattcttggtaaaaagggcgatatagtatgtcttattttggagagttgctgaaacctcggtatcttcaatattattcttaaaaacacgagtatctattccgttatatagaataccaaccacttgcttatatttagtagcggcaatatcgcaatttttaataagttcgtctgcccacttttgaagagatatatcttcggattcggactttgtttcaagaattatggctggcatattatgatcgtcaggtagataccaaccgtcaggtttgtcgtttatacctttgaatcctaattgattaaaggttgtaatttgtccagtaccttgttgtatttttgcgtctacggcatcaaaacccaatataattttagcactatctctaacttgatcttccgtgcgataagtagctttatttatcatttgatcttcctcctattacatccactcgccattttgggcagtccaattatctgtaaatgtcttgccttctaccgctgctacaaacggttctgtaagaaacactttaattgttttcagtacggtgccgtaatcatccgtttttgtatcaattttgcgaacaaaggctttccattttttctgcattgagccgtctctattaaagcccattacctgctcaaactgttcaacagtaaaagcgtgtccacggttttcaaaggtctttttcagtgcttccgtcagcgtggctccgtcaaaatcaaatttattggcaagatagtaaatgtcgtagtaatctttcattctgctagaaaattccattagactgagaatagcgtctatcttctcggcaatggttgtttcaagagagtatgtatttactgtcggggcgtcaaagtcggaaagctgtgtcgggatttttcgcttttcctgtttcggcacgatgacatcccccacaccgaaatcaatactgaacggtgttttggtgtttttaatgcgagcgaccaccgatgcaccgattcctgcatactttttagcaacagcaataggagcaacatctttaatctcaaaagtgataaagtcgtttacggtaggtgttgcaataatttcttccaacacggtttttaactgctccggcgtatttggcatttggcggagcaaaaagtccacatcaactgttactcggctgtcaaagtcggtaagggaataaataaacaagccgcctttcaacacaagattttctgcatatttggatttttccaaatgtcgcagaaattcctcttggcaaaagagttgcagacaaagctgataacttcttccgcttatctgagccttatttttcagtcgtgcaagcacagatgcagcaatatcagccattaatcagtacctccatcagttcagtaacctttttgtacacgcgcagtttttttgcatatgcagaaaggttgctcagattcttctttgtatcgttagcgtaagcattaagcgctttattaaaaatctcgttgtcgagttttgaacggtatttgaaacaatcgcagatggtgcgttcacggtcatatacaggtagggttacaccatcgaaatcatcagtagttttacccaaatcgtacagttccgcctgaacatagtaaggttgcagagcgagaacatccacattcagctttgttctcgacatagaacgagggattgcgattgaccacttgcgtggagcaaagtcactatatccgtaatgaaaaagagcggattcaacgcaaacaattcctttcggaacgagggttgcaagaagctgttcatcggaaaccacacttttttcagcaagttcataataaccgtgacgcacacgatcaagaaagccggcgttgcacagatttacaacatcgaccgctctgattccggcagcgacaaaatcagcagattttgcaatgccgcctttattgataatgacttcttttacctgctctcggatgttcaatcgctcaccttctttcaattataaaatttacgcacacaaaagcagtatatgtgtttggaattattgtagcacgaaaagaaaaagattgcaataaaaattacgcacaaaattctaaaatctgtgtgcaaaattaaaatatgctattgcaaaaagaacgattatacgctataatatcagcataccacttccatattatccacggtgagattattcttgttatcaaccacgataacaaaatgataacaagggcattttagcacaggataatacagatacatcgtaaaatcaaaatagagagactaacgaaaagcaaaattatataaacagaattgtttagtcctcgtcgagtttgagtaattgaaaattttacacagattattttatatggcaggtagtcgataggattgcctgctgtatttgaattattggtatttatttctggaaatcatcgattgtgttgccaattactataagaaataatgggataactcaacaataattagaaagaaggaaattaaatgaagataaaatcaataaatatacaaaataataagattttaggaaatttatatttagattttactaatgattctggtgaaattattaattctattataattgctggagaaaacggaactggaaaatctacaatattaaatattatatatgagtttagccaattgaatttggttagcacggcttcatcagaaaaaagagagtttgttgtacagtttttagaagaagaaataactcaattaaagcaaaataatgagattaagagatatattggaagtgatataaaagatagggaatttatttttaaatttgatttttccattgtcaataattggaaccaaataaaaattgtttatcattcatcagatgactcggaacatcaaacaacaggaaatgtattttcaaattcaaatgctaaaaaagtaataagagcaatatattctgatgttgaaatcaattttaattctcggtcaattaattcagttacttcaaaaaatattgatgaggattttattcagagtaaacgatcacaaaatgatttagctacggaagttagtcaattattggtagatatacaggctctagatgcagaagattttatgcaatggggcattagtaatacacaagctcaagttgatgaaagaatgcttaacatcagaatgaaaagattcaaatcagcatttgagtatatttttgaaaataagaagtatgttggagtggttacggaaaatggtaagaaaaatgttatgtttgaagaatatggtaaaaaattccattagaaaaattaagttctggcgagaaacaaattatttttcgtggtggttttttattgaaagataaaaaaagtagtgaaggcgcaattgcgctgattgatgagcctgaaataagtctccatccaacatggcaattgaagatattagattattacaaaagattgttttataatgataaaaacgtacaaacatctcagattttttttgttacacattcgccctttataatacataatagaaataggattgatgataaggtctttatactaaaaaaagataacagtggaaacacaatttctttagaagatgggaaattttatacttggaatgaggaaaaaatagttgagaaagcatttgatttaacacaatatagaaaatatttcaaccaggaatctacaaaagcgcttgttattactgaaggcagtacggattggaaacatatgaaagctgcctatattaatttaaaagaaaaaaagaatatagtgatatttttgacaatcttgaatttgaattttttgaatatgaacctttaaatagtcctcaaaacgcgaaatataagttagaaatgggatggtttaatttatgctctatgtgtgaaaatttttctaaaatgcaacaaaatagaaaatttatttttatatctgatagagatgaagaaaaggctaataagaaacttgaagtagctggtcaaaaatataaggattggggaaacaatgtcttttcatttgttttaccggtaccagagactagaaaacatacaccgaatatttgtattgaacacttgtactctgatagtgaaattaagacagtgtatactgatgattgtggcatagaaagacgattatatatgggaaatgaatttgatgcgcgaggaatatcagtaacactaaacagatactgtataaaaaaggatatatgtggttctgaaaaaatatcgattattgaaggatcttctaaggatagagttacggggctgacttctgatgaggataaaaattttgccttgtcaaagatgacttttgctaataaaatattgaataatgaagaacctttcaatcaatttgatttttctaattttataagtgtttttcgtatcataaaagaggttgtggaattgtaaaatattatacaaaattgctaaaataaatttcggtaacattttggcaacagaaaatcagcaagccagaataattgatgtaattgaagtaaaaagcggcgtgtattcgcataaaacttaaacaaatatagttaaggatagcaaaggacacgccgagtttgagtgataaaacaataacggatagcagtcgggcagaaatgggctgcagggaggaagcataagcgggagggtcgctgacaggcgtggcgctgcttacggctttctcagctatgaaacgattccccgccagttagtcaagagcggtgcagccgcttaatttactcttgactggcttgcggggatttgctgtttatttttaaaattatatggaagattaagtgcgaatatctgataaaatggtattgcaatacaagaaaatttaaatagacaattgtgtctaattgttaaaataggatatttctcgctttatgtcgtgttttgctgttgacatttatggtaatgtgcaagtggaaggagggaaaaggatggatacgaaaaagataggagaatttctaaagatacttcgtaaggaaaaaggactgacacaagaacaacttgcagaaattcttcttgtgtcgggaagaacagtctcgcggtgggaaacaggaacaaatatgccagatttaagtatcattatccaaatggcagaattctatgctgtagacgtgaaagaaattttggacggagaaaggaaaagcgagaattcggataaagaattaaaagaaacattatctaaaatggcagatgataacaagctgaaaaaagaaaaggtaaaaaaggctgcaagtgccgcagctagtctgacatttgctgtttgtgcggcaatgatattcattcagtcgcttatagcgggagaattagatattattgcaggagaagttgttgttttatttattggtggggcggtttaattaaagtgatgagctgaacttgatacacgccgtggtattttctgtggtattaactatttgttatatcagattaggtgcagcaacgtctaaagcagttcatagcgcacttatattttttgctgacattgccatagcaggttttaataatatatgtcgatatatattccgttttttagtatcgcatgatttaggcatcaatggacaaattatttaatcttatacgactatggctattttacaaaagataaaactattgggaggtattattttgtataatggaggtattaagtatggcaattattgaaatagagcagttagattttattattgcaaaagaactgggaacggataaatcagatgttgattgaaaaaaatgttgtcaatctgcgaggatttgctataataaaaacaaggcaacattttggcagcagaaaatcaataagctaaattaaattttgaataagaatgacacttccttgccgccgggtaaggagttaggcgtcaggctttctatcgttaggcctttgaagatagaaagctctggcgctattttttatggctttaggaggaagatatgaagaaacagtcttgtatgagtgattttatccgctatacgattttaagtgtattaggaacactgggtgtatcctgttatattttggctgatactttttttgtctcaaaaggcttagggactaatggacttgcagctttaaaccttgccattcccgtttataattttattcatggcacagggcttatgctgggtatgggaggtgcaacaaagttttcagtctacaaaagtcagggcaaatatgaagaagtaaatagaatttatactaatactttatatcttgccgtattgttttcaggcgcattttttctgcttggtctgctcttttcgggcaagttggcaatcattttaggagcggatgcaagtatatttaaaatgacagatatttatttgaaatggctgctgctttttgcacctgcctttattttaaatgatgtgatgctctgctttgtcaggaatgatgaaagcccgcagctttcgatgattgctatgttaatcggcagtttttccaatattgtgcttgactatgtctttatttttccgatgcagatgggcattttcggggctatttttgccacgggattatcgccgattatcagtatcattatgatgctgccgcattggcttagaaagaaaaacacttttcatattgtaaagacgaagatggaagcaaatattgtaaaacagagtttatcattgggcttcccttctttgattacacagctttcttccggaattgtaatgattgtttttaatgtgctcatactgaaattagaagggaatacgggaattgctgcgtacggtgtaattgccaatatatctcttgtagtcgttgccgtatacacgggaattgcacaaggtgttcagccgctgattagtaccttttacggtgctgggaactgcaaacaggcaagaacggtattgcggtatgcgatgacaacaatgctgactgtatcttgtgtggtttatcttctgcttttcgtttttgcacagccgattaccgctttattcaacagtgagaacaatatggagctaaagcagattgcagaaacaggactaaaactttattttatatctattccgtttgttggatataatattattttagctaattattttacttcaatagaaaaggctttgcctgctcatattctttcgcttttaagaggtctggttttgattattccgatggcgtttttattgtctgccttgtggaaaatgaccggtgtgtggcttacttatccgataacagaatttatcgttgcgctgctcggagttgtaatatataagcgcattgcctgcaattgatgttcaaggaggcgatatagtaggcgcttggaaggcacggctgtttctttgaaacggatttagaaattctgtaatacgattgtcgctttaaagtagttacggatgcctgcagaggttccggtttagaaacgcataattatgcatcaagaataatacagtatttgcagcgagaggccttgctcactgctgaagatgtggagtctgcattataagcaaagaaaggg

SEQ ID NO: 4339 - DNA, 23507 bp, Unknown
  16S sequences of unknown bacteria
gcaggggcggtgtgctttgccctaagcaaaaccgccaagccccttttaaccgctgccaaaagtgccggcagcggtttggcacggctgttgcttgtaaaccttacaagcggctacaccggctgttacatagtgctgaattttgcaactgtctttattgccacggtgctttcggtgccgggagttgtgggaatgctgtttatgaaacttttatttaattattgagtaagccgccgtaaaggcggttttacttttgccgtcttgaattaagcccggtaatattgtataatcagtttataaacaatgtaaaggcaggcttgcaaatggaatttaaggaatacaccgcaaaagatgctgctgtggccgacggctacacaataaggtatcttgtattttgccaggaggacggttttacacaagacgaagaatttgacgatcgggacgccacggcaattcacattgtgggctatgtggggaataaaccggtttccaatgtgcgacttgtgcaggagagtttgggcctttggcacttgggcaggctttgcgttttaaaggaagaacgcggcaagggcttcggccgggctactttgacatttgcaacggaaaaatgccgaaaacttatggggcaaagaattattctcggagcaaaaacagagaaaaaatctttttacgaaaaacacggttttgtcacctatggggaggaattttccgagggaggtattccccacataatgatgaaaaaagatattgaggattgattcggaggttagaattatgatcaaacaggaaataagggataaatttgacatacctcagcacgccgttttgtttgctcttatataccgtgcggcggttgaactgtacggtcggcaaggtgcccagcgggcggataacggcacaaaggtttacggctatcaacgtggtatgcgtatggctcaaagggcggtaaaggacaaacagcccttgaatatgagaaactatttattgtacggcgagtggaaagacaaaagcggactttccaaaacagaagttaaaagcctttcccctgtctacgccacaaactgcacccactgcggttggtgccaagcatggcgggacgcaggcttgcttgaatacggcaaaaattactgcacctatgtggataaaagccttgtaaagggctttaacagagaattaagcataaatataaacagcgttttatcccaagggggagatgtgtgccggtttgagtggctgggttcttcttttgaaaattccgaagaagcgcaaaagttttttgcacaaaagccacggatagaatcttacacaataaaagactttttgtaccacaccgcccatttgctcaatgctatgttcatcggtattcaggacaaagccggccttgacaaagccaccaaaataagagataaagccatggcggattttcgccaaatgtacggcgacgaaatggcagatgccgtgagagctgagtcaatggtaacgaatttttcaaaaatataaatacataaaaacaaggagaatatatgaactttttttacaaggcctattcgattatatatttgattgttggctgggctatgtgcagatttatgcttttgcctgcccacagtatgaaagatgtgccggatatgttggcacttataggtgcggttataattattttttcaataattaaaaaccacaactccactgcaaggatggcgtcattgggctatgttgtcagctttttgattgctttgctgttgcagaaaaaaggcaccgacccgggcggcggagcaacaaatacaatgtggatagtttggatagtaagctacgcattgcttatcgcatatggtatatttattgatattaaaatatcaaagcaaaaaaagaataaataaagacatataacataaaaatatagccggcattactgccggcttatttttatcacgcctttttatcttctctataccaattttctccgtctataactctgcttaccatcatagaggcaacggtgtcaccgcagacattcaggcaggttgccggcgggtccaccaaaaagcctattgtggctatgagagggaaagcctccggcggaaaatccatcaaacttacaatcaacatttccccaaccaaaccgccgcctggcacgccggacagcaccactccgcttaatattgcaatgaccaccgacattatataaacccctgcgccggtaaaatctttgccgaaaattccgtataaaaatgcaattttcaaaaccgccgccaacacgctgccgtccatgtgcatggtggctccaataggcagaactatgccacttatatccttttttaccccgattttatcacagctttcaaagttcaccggcagagaggctatgctgctttgggttgcaagtgatgttatggcaacgggcaaaatattgccgaaaaacgcctttaccccatgccgaccggccgcaaaataagaataaccgtaaaaggcaataaaaaagtatgcaacacaaagggggtagtacaaaatcatggctctgccataagcccctataagctgtgggccgaactgccccaccaagccggcaaaataggcgcaaagccccaccggggcatacaacataatcaggttaaccatcttcatcataacagtgtttaaggcggccaatccccttgaaattatgttgttttcccccaatgtacccacacaaaatccaaacatcaccgcaaaaataatcagcggcagcatattttttcgggataaaagaagattaaaatccgacacggttaatgcgtttactatccgccgggacagggtggttgaactctccccttcccatgactgcaaagcaatttccactccctttgccggcggaaaaattttaaccgcaataataattacaactgccgctattaaaccggttatgaaaaatacccggagcataacccctaaaatttttcccaggcgtttcatattcgtcatgtttcccactgccgaggcaatggtcacaaataccagtggcacaacggcacagaacataagatttaaaaacacatccccgaaaggccgcaaaaaggcggatttttccccgagagccagcccaagcagagtgccaagcagtatcgaggcaaaaagaattaagggaaatttgtaattcttaaaaaactcacttttcgtcacagcggttctcctctccgaataaaatttctccgttttttagggcaaatcccacaaaccctttttcgcacagctttgatatttcttttgtgtctgcaattttagcgtgatatttttcgacatatgacttttcctctgttgaaaactcaccgtaaaatatataatgagccacaagattatcaaggccacgcaggccttttaaaacaaaaccgttttcaaacagggttttaaaatcagccccaaaagaaaccggagtgtaaaacacaacattgcttttgctttttgccccggccagtttaaccccttgcaatattgccgcaaaagacgaagaacttacccctgtgttgccgcccacataacccataacaagccgattttcaaactcgtcacctattaaatcgtgaatttcccaataggccaaggagtttttaaatgacggtatcatcggcggaaaaacacaaaatacccgattttcttctccacggacaagccaaaaatccccgaatataaaaatttcatcggtcatatcccctgtaaatgggtaaaaaaacagctttcgatagtctttataggcctcgttcaaaatttctttttcattttcttttaatctcgtcaccttataaatctttttgcttttctctgtcaatatatcaccccgtttactggtttaatatattcccacgcaaaaaaatttgtgcataaaaaatcccggatatttctccgggatttctgtattatcggtttttgggtattataaaattaaatccgccgggcacaattttacattgtatctcggtaagtttttcgctctccccgtcatttacaaccgaaaacggctttttacctgttattttaacggttttacatctggaaaaatgaatgtacggctgtacttttgggctttcaaactgcacgcctgcggtaaaatacttgataaaaccgggcagttgcaacctgggcggcggagttactgcgcttacatcaataagcccatcgtcggttttggcctttgccgtaaccaaaaacccgccgccgcagcttatgccgttgcctattgcacacattaaaacatcgcctttgtacaaaagtttgtcatcggtgtaaatttcaagctctctgcccaacttttttgtaaagttataaaacaatgacagcttataagccatgtcgtttgttataaaacttgcccctttaaacttcggcatatctgtggcaacatcggcatcaaagccgatattcaccatatttacgctgtatttgccgttgtatgtaagcaaatcgcaggggtgtacatcgccgtttatttgcgcctctatgtcaaaaaatttttcccgtggcaaatttacggtttttataaagtcgttgccggtacccaggggaataacccccacagccacattccgccaacccacccggccgtttacaacccggtttaaggttccgtcgccgcctatggcgtaaaaacgaatttcttcgcctttttcgcagcattttcccacatagtcggtaattccctcgccgctttttgatatgtatatttcacactctgccccggcttttttacataccttttgtatttccggaataagtgataaagcctttttatccttgcctgccgcaggatttacaacaaaaatatatcgcataaaacaaaatcctttcaattctcttattttatcgcaaaatgtacggttattcaatgtttaactgcactaaaaaaatcgtaatttattagttattttttcaatagaataaaataagcgcaaatgttatactgaaatcaaagatatttttataaacctgcgctccttgcaggcttgacagagaaaggaagaaaaatatgtcagttgaaaatttgaaaaaagtcagcttaggccactacccgacacccattgaaaaaatggaaaatatgacaaagctcctgggtaagggcaacttgtacatcaagcgtgacgataccaccggcccggctttcggcggcaacaaaaccagaaagcttgaatacctgatgcaagaggccttggacggcggctatacagcggttatgacctttggcggcacccagacaaaccacggcagaacaacggtaggtgcggcagtaaagctgggattaaaaccgattttggttttatccggcggcgacacaggctatctttccggaaacttaaaccttgatgccatgatgggcgcagacatctattttgtaaaagacccggcaaaaaccgccgatgtagcggcagatgtgattaaaaaatacgaagctcagggtgataaggtatatgttgtcccggtgggcggttcaaaccttttgggtgctgtgggatacataatgagcgtaaaagagattttggagcagatgaaagagcaaaatcttaaaatcgaccatgtgttctgcacggtaggttcaatgggaacatttgccggtatgattttaggcgccaaatatttcaatgcgccttttgatattatcgccgtgccggtttcccctgcagaaaaaggcgtaaaggaaaaagatgttgtaaaatacgccaacgaagtaagccggtaccacaatatgggcattacaattagtgaaaaagatgtaaagattgcctacggcccggatgatttaccatactccggcgaggcatacaacaagcccgataagacaacaagagagtacattataatgcttgcaaaaaatgagggcattatgcttgacccaacctacaccggtaagaccttccgtggatttgtggactgcattaaacacggcgaatttgtaaaagacggcgaaagcgcaatgtttatacacacaggcggtgccatggctctttggacaaaagaacaccttgacgatatgcaaggtcagctccgtgaaaattgccacacacaggaagtttaatatttaatttacactttaaaataaattttataaaacataagccccggcttttgccggggcttatgtttgttttatctgcaaatttatgctattaaattagccgttttaacctgtaccgcaaaataatatatcatctcgccgcttgtaaagtgggcgtctattttgtaaatgtaaacgccttcttccgccggagttttccatgtgtactgaacatcaaatttgttttccgacaaggcctcccgctgaggtgccatgtacaaatccacaaattcgtatggggcggaaaatgttatcacaatcgtctcttccggccggcagtcggtaatcatcataggcacatctcccgcacttaaatagggtgaccttattgttttaaagccgaaattccatgcgtaaccggcacgaaccacataaggcggcgtgtaccctgttgaaaccgaaataatcggcagtgatttttccgggtttttggcatctatgctgtcttttataaatattgcaccgtaggccgccaaaatcatacacagcagggatatgatatattttttcagttttcttttaaactgcataagtttacccctcgctttccgattgattttcttcccttgggtttatggtgtaattttcataatcggcaactatgtctttttcttcaagctttttctttgtgttgcaggaaacaaggttgtaaataaccgcaaatgtaggcacgccgataaccatacccaaaaatcccattgcgccgttgccgactataatacctacaagtatccacagaggcgacaagccgagagaggagcctaaaactttcgggccgattatgttaccgtctatctgctgcaaaacaattataaagataaggaacacaaaagccgcaaaagggcttaatatcaacagtataaatactgacggaatggcaccgataaacggaccgaagaaaggtatcatattcgtgacgccgattataattgctataagcacggcataatccgggtaaataaacagcatacctataaatgctataattccgataatggtactgtctatcattttaccgattatgaaatcggaaaatattgtgtttgacattctgccaagttcaaaagtttcttccgcaaaatttttcgagaaatatgcgtagaaaaattttttaatttgaaatttaagcctgtccttgctggcaagcatatatatggcgataattgttgacataattgactttataacggcgttgcctatgccgattgaaacatttacaacccccggcaaaacggacacggtaaagttcataatcccggtgcctatgttgttccacatctcttgagcctgccgtgaaagccgtgaattaaggtgtatctgctccataacttccacagctgtttgagatacgctttgtataaagcccggcattgcctccaccaaataggcaatactgagacctatctgcggcaaaaccaaaaccataagcacgctgataagcgatatggctatcgtaaaagtcaacgccacggaaaaaatacgctttttctttttgtctttaaacagcgttctctcaaaccacatcataggcctatttaagataaatgcaatggcaaaagcatatataaagggcgatataattgaaacagcattggaaaacacggtttttattgtgggaatgttgtttaatgccaaataaaaccgcaccgccgcacacagagttattgtgttttttacggcgctgtcggtaaaatagcttttaatctttttaatcataaaatacctcactgcaaaataagattgcatatcacagtagaatatattataatatattttaatcacaaatacaacaaattatctgtgtaaaatttattataatttatttaattttaaggagaaaaaatgggcgattacataccctctgtgttatttttaataatattattgtgcctttcggcacttttttccgcctcggaaacggctcttaccgcagcaaacaggataaggcttaaaactcgggcggaggacggagacaaaaaagccaaaaacgcaataaatttaatagcaaagtacgacaacacactgtctgccttgcttattgcaaacaatgttgtaaacctgctttccgcttcctacaccacggtgttctttacaaaattgtttaactccaacgctgtgggtatggccaccggcgtgataacggttttggtaataattttcggcgaggtaatccctaaaagctacgccaacgccaatgcggacagtttgattaaagctgtggcaaagcccttgcaaattttatctgttgttctgtttccggcaataaaaattttggaaataatcaaaaagcctataaaaaagcggaccgccggtgaagaaaccccatccgttaccgaagaagaacttatcaacataatagacgaaattgaagacgagggagttttagaggaagaccaggcggacttggtgcaaagcgccatagaatttgcagatatcaccgccgacgaaattctcaccccaagggttgatatatgcgcaatcgacgaaaagcggacaaatcgggaaattttaaacaagtttaccgaaaacaatttcagccgcatgccggtttactcggaaaatattgataatataatcggttttatcactcaaaaagactttttcgcgatgattataaacggcgagaaaaacaatataaaatcaatgcttaaaccctgcctttatgttccgccaaagaaaaagatcatagacataatgcacatatttcaaaatgacaaagtccaaatggccgttgttaccgacgagtacggcggcacccacggtattctcacattggaggatattttggaagagcttgtaggcgaaatttgggacgaatacgacgaagaaaagaaaatgataaaccaactggacgaaaccacttgggatgttttgggggatatgcccgttgacgacctttggcaggaaattttaggcaaagacaacgaggaaaccgacgagtatgtgacgatttccggctatcttatggccaagatgaataaaataccggctttaaacgaaagctacaccgacgactgctttaaatacaccgtaaaaagtgtcaaaggcaacaggataaataaggtgagagttaaaaaactgtctaatccccgggaataaacataatttaataatgcctgatataacgcagaacgcccgcccttaaagcgggcgttttgctctgttgtaaaataatgatgtgtaatcttaaaattgaaaatatgaacaaattattaaatcatatcaaaaatcattgaagataatcttctgtaatgatattatataataaacagcaaaggataattaaaatcttagtcctttgtaaaagaatggatggtttatatttagatgaaaaaacttttttcggcatttttatgcctcacctgccttgcgctggttctttcttcctgcgtaaagggcagtgacaatcaaacttcgggagatgacgacggacagaacaacacgccgggaatcgtagagccggcttacaccccggagtttttcaccggttatgaaaaaaccgacaagtccaaccctcgtgcggtagctgttatgataaacaacattgttcagtcaagacctcagagaggtatctctcaggcggatattttggtggagagcaaggttgagggcggcattacaagatttatggcaattttcagcgattatgaaaatgtaaccggcgacataggccctgtgcgcagcggcagagaccagtttttgcagcttgcaatgccttggcacgctttgtatattcacgttggcagaagcggcgttacacagactatgatagacacctatgaatacaatgacagcgacgccgacggttacgtcaaaaatcttacataccgtgaccaaaaccgtataaatcagggttacaaaacagaacacaccgcatttacaacggcggaattacttaattccttgtttacaaagtatgattacgaaacaacatataaatacggcagcccatgttttgactttgttcactatgacgaaaacaacggtataagacggcttacaggagacagcgcaacaagcgtttctatcactcattcacagagctacgcaacttattttgattataatgaaagcaccggcaaatatgatatgagccagtggaattcacttacaagatcagttcagaatacaaaagacgaaaacgacggcacacagctcagttttgaaaatgtgtttgttctttttgcggacattgagccatacccgtacccgggcggaaaccttgatgccaacggcaatgacaaaggcgacccggattatcagaaagttgattattcatacggcggtgtaggctactatttcagcaatggcaatgtggaaaaaatccgctggtttaaaggcggccctaccgatatgttaaaatttacggacatggacgaaaattcattgaaggtaaactgcggcacatcatatataggcattgttgacctggacgaatatgaaaagttcgaatacgcaggtgtaggcggcagtgttgaccagacagcagagggcagcgacggcgccgaagaagaaatcggcgactgatatttcacccacaaaaaatcaaggcgacctttttacaggtcgccttttgttattaaattttttcgtaggtgcaaaaggaaaaatccatgccctcccactgtttggtttcgctttgctctgtcagctgccaccgtgggttttcgtccaaattcgggaaaaaactgtctgcctcgcccaaatttttatatatttttgtaacgtaggctttttcgcaataaggcaacatggcgtgataaatactgtcgccgcctatgcaaaacacttttttgtccgggtattttttcagttcatcaaaaagccggtcaaaatcccctaccgtaacaaccccctccggattgtaggcgctgtttttggtcaaaacaatatttactcggtttttaaggggttttccgccggggaagctctccaaggtttttctgcccattaccacaacagagtcctttgtcatggttctgaaaaacttcatatcttcgggaatacttgtaagcataccgccgtttatacctatccgccaattttcatcaacggcaacaatcatatccatggctttacccccttatatggcaatcggaatattctttatctgcgggcctgtttcgtagtcgtcaaggcgtatatcgtccttggtaaacttgtagaaatcctttatttccgggttcagccagaatttcggtgcgggatgctcctctctggaaataagttcttcgataagaggaatatgcctgtcgtaaatatggcaatcggctataacatgcacaagctcgcccacctgcatatcgcaaacctgtgcaatcatgtgcataagtaccgcatactggcaaacattccagttgttagccgccagtgtgtcctgtgagcgctggtttaatattccgtttaaaacaagtttgtcacaaccgggctttttggttacattgaatgtcatgctgtatgcacaggggtaaaggtgcatatcgtgcaaatccttatgaacataaatattcgtcataattctgcggctgtatggattattcttcaaatcataaataaccccgtccacctggtcaagataaacatcggccttgttgccgtcaatcttaacttcggcacttggataagaagaaaggtcttcaattccgccggaaatatctttgattgtgtgatgaatgtacttctgtgccatttggtagccgtaagccttgccgatgctgcctgtttcgtcagcccattcgtcccaaacagagctgtttaaatccttgatattatttgattttctctgccatatccacagcatttcctcggtgcatgacttaattgccgtgcggcgcaaagtcaaagccgggaactccttgcttaaatcgtatctgtttacaacgccgaactttttaacggtgtatgctttttcgccggtgtctgcccatgtggggcgcactttttcgccctttgtgtcaacgccgttgtcgattatgtcacggcacatatctttaaatattttatctgctaagctcattcaaatctccgttccacgccgtgggtgccacggccgttaacaattttatgatgtaaatatattaacatttaaccgccgtctttgcaactaaataaataattacttaatatcgtaaaaattcggcagtgttcggttttgccagtactccgccatggtaaagcccttcatatatgtcaactctctgcctaaaaattcaaggggctgccagttttccgcctgagaaatgtctttaaattccacctcccgatagctgaaaaccccgtcatccacaacggaacattccaaaataaggccgccgtcaatttcgtaagtgtagtaatcctttttgattaagggtttatccaaaagagcctccaattcacaaaattgttcggctgttaaaacggtttccacctctgttcttgccagagttccgccgcttttaacacataggatatatttattttcgccggtggcaaagtctgtggtctttcttatcctcaaagcgatcggagctgtgtacaaataaccctggtaaacggttttatggctcaaaaccggcaaatccggcagtttatcaattaaaaattttctctctatttccataatttcctcaaacaaaaacaccgcacaacaaaattatgtgcggtgtttggcattttatttcatggctgcaattttaagcagatattccttgaatttttccccgctgatttttgtaacaagggttacattgtggggcagtttactgtcatagtcatagacaatttgaccgtaacccaattcggattttgtctcgcatcttgcatggcatgatttggtctccaaaacaacgccgtcgcaaagagtgctggcaacagcagacgggtcaggctggctgattatatccttgccataggagtttatattaaactgcaacaattttgagtttgcctttacgataaactcgccgcagtaagtgccgcaggcaagaagtttttcacggtcatttctgtctatttccgccacgccgtagcaggcgtcaagtggaacaaatgtaacgggtattccgctttgtaaaactatatccgtgctttctgcgtctatccaaatattgtactcggcgttaggtgtaaccgggttaggcatacggtactggccgcccatggctataattccctttacttttttcattgcggcggaatttaacataatagccattgctatatttgtcattgagccgagggtgataatctccaagtcatcgtacttctccgccaactcaattattctgtcaactgcatggccttctcccaaaggcaggcttgtttttgcaaggcctatgtcggaaaggccgtccttgccgtgggcggattcacctgttatgtgtttgcgccaaagaggctttgtcataccgccgtaaaccggtggtttgtcgccgtcggccacttcaacagccactcttgcgtttataaccccctgttccaccggcaaagcaccggcaacaacggttatagcttcaactttgcagctttcgtcacgcaaggccataatcattgccacaacatcatcggatgcggcgtctgtgtctataataaatcttctcatgctaatatcctcatttcagtgccgtaacaacggtgatttgtttccgtgggtttggttccattgtaataaggttatagcccacaacatctataaccgtttgccctctcgtggtgccgatgcttgtgtcgattgaaaccctggcttccatggtttccgccggttcaccggccgccacctcaaaagccgcctttgaagcgtcttcggcaatgtgagcaggtatgagggtgataggaattgtggatttaaacaccgtatccgccgcctctgcatctgccaaaatattgtgatgagccgtaggcgttgtggtggtgtaaccaagcaatgcgccgcctgccacatagatgcgctttacctttgccatggtttcttcgtcctttaaaatcgcaagggcgatatttgaaagggtgccaaggcaaataatttccaaatcgtcatattcatttgtccgatttaagataaagtttactgcgttttcttttgcaaactcatgccgggtttccattttaacgcactttttgccgcttacatattcattgttcaaaagcggtctttgcgctcccttgtaaaccggcactccgcttacggcacgaacaacctccaaattaaaagccgccaagtcctcataattggcaacatccggagaaaccgtaacccctaaaatgttgaatttatcgctcgtcaatgctcttgtaagggcgatttgacccagagatgcaatatcgacaataagatttttcatattgtcctcctttttgcgtatgtattttatattattgtaacatctaattgtgaaaaatgttgtttttttattcaatcttgctgacaaattttttgaggattttatgtgcaatatgccataacagctccccaataaattcctactgcacgaaaaaaagcggaataccttccgctttttataatttaatttttatctgtttttactgtgactgaatatcaatatatattgtttctccgggataagcatagcccagtttttccctggcgatacgctctatgtataaggcgtcgtctgcgttgtctataaggctttgtgtgtcggcaatttttaattgtaaccgccgttgctgctgttccaaatcccaatattcctgttttttggtcataagttcaaactgggcggaaataaggttaatcgtcaaataaaccaccgcccccacaataagcacagggcgccatttaatttttttaaacaagcctattacctccctctgccgtaaaacgttctgaatttcttttaattatacaacactttatcttcttctggcaagtgggagtttttgctattttgggcggtttttcttatgtttttttgttttgcaaaaaaattaatccgcatttttcttatttttccgcaaattctctttaaaaaatcaagcgtaaaaaactttaaagtagcgccaaacagcccagcccgagtgtggcaaatggcggtaaagctcttgccgaacagccaaaaacctaaaattgccccggccaaattataccaccttaaaaccccgtaatttgcaaatgacacagagtagctgaaaagcagcccagcaaaatttatgccgttaagcacatcttttataaaaaggcgaattttacccctgtataaaaataccgacagcaaccgatttataaacccaagcacaaagcccaccgggattgaatatacaatatcccaaaatatgaatttgtagttctgtacttcaaaaatcatctcatcatttttgcaaaaatgctctcgcctttattctttttgcttttgtacacaaggctttctatgttgcctgtaagttttaaggtgttgttccggctgctgatttccccggctattaaatccctgccctgtattataagccggccgtagtcggtgtttaacacaatgtggtattcgtcataagccacaacctgtaaaaccccggtgacggtcatactcttacgatcttcacagtagacggtatggggcattaaaattttatcggacatacaatccctcctttaaggaattatatgcccgaaaggccggtttatatgtatcaaccctcaataacggtgtacatttcccttgcgccgtctttgcttactatattgtcaacggaaagcacctttacctttactggttttgtgccgaacataatttctatttcgtcgcctatcttaacctgataagaagcttttacctctctgccgtttacgacaattctgcctgcgtcggcaacttcgtttgcaacggtgcgccttttgataaggcgagagacctttaaaaatttatcaattctcatattttacctcaatgcgaaaaaatgccgatgcaaaggcatcggcacaatcacaaaaattatttgtttacaacggctttcaatgcggaacctgccttgaatacgggagctttgctccgtgcgattgtcattgtttcgcctgttcttgggttgtgaccctgtctttcttttctttcctttacttcaaaagtgccaaagcctgaaaaacttaccttgtcgcccttttcaagtgcttctgtgatagcttcgattacagctgcaaccgctttgtcagcatctttttttgtgagttccgatttttcgcttaccaaagcgatcaattctgtttttgtcattatatctacctccgtttattatatatggtttaagacctctcaaaaaaattattttgattcgtccttggcagaccgatttttactctgccataagccctttaatgtagcaaaatccattgtatcaaaatttatgtgattttgcaatgaaaacttttcaatattgttaaataatgccacaaaatccttattatataatgacaaagcctcctcccggtctactttttcctgtcttgcaaggcttgcggcggaaaaaagcaaagccccaacggtatctttatcaatactttctccgctgtcaattttatcttccgcttcgtccaagattttgcggatagccgcaatctccgcctttgagtttggaagttgcactccgcctgcggcaactcttttctgtactttttgggcatacataagggccgggaatgttataggcacccgatttaccctccggctgattgtagtatggccgtggctttcgtttttaatctcttcccagcctttaaaactgccgtctgcatttttgaacttatcatttttgaatatatgggggtggcgcataacaagtttttggcttacgccgtcaaccacatcataaaaatcaaagtttccctgttgctgttcaaagtagcagtgataaaccacctgcaaaagaacatcgccaagttcctctttcataagttccttatcgtctttgtcaatggcgtcaacagcctcatatgtttcctctataaaattctgtctgattgacttgtggttttgcaccctgtcccactcacagcctatgtctttgtcgcagagtatctccatgatttttaaaagatcctccggggcgtatttgtctttaaattgaaaatccataaacctgttcctccggctataattgtatcatcaccgggataatttttcaataaagaacagccaaaacagggcagttacaccgtacaaaagccgaaacagcccgccgaaaataagtgtaaagggcaaaggcgcaaggccgcatttaatctgtaaaaattttataaaagttataaatatataagataccgcaaaaggcactgccatccgtgataaaatttttatctttatggacttttccgccgcaaaatatgccaaaacaaaggtgacaagggcaaaacaggcgcttgaatacaaacacccctttatgtttacttccggcctttggcagaaaataaagcccaccggcagctttaccgccaaggcaataagcatatttttaaacactgcctttgagcgaccgaaagagttaagcacggcatttaaagaaaataccatagaattgaatattgccgtcacagaggctatttttaaaaattcgccccgtatcattgtccgggaatttgttttgccgtaaacggcgcttatcaccgccccaccgaaagagtataaaaacattccggccggcaaagccacataggcgcacagttttatcattttatccacctgtttttccgcccgtgatatattgccggttgccgcatatttcgacaaaatcggcaagccggaagtccccactccgccgcaaattgaggggattatcccccgcaccgtcatacacatgccccggtatatgccgtaaagccaaaccgccttgtcctgccgtgcggtaaatgaggcataggggtatgcggccgataacaatccatcgggaattttttcaatcataggcagacacactgccgcgtcaaaaaaatttgcccgggaaaccgccaatgccgacatggcaataggtaccgaggtttttgaatattcatgggggtttgcctttctttcaggctctatggctttgtaatatctgtcataaccccttttcatatacaaaacacaaatcagtccgccgattaaaattgcgattaaaagggcaaaaaattgcagattttccctgttttctccgccgtactttgccgccaaatacaccaaagaaatacctaaaagacatttggaaaggctttccgtcatattcgcctttgccgtcagcgccatatttcccgagccttggcttacgcctttgtaaatcgcctctttgcctgccaaaaacaaattgagagacagcaaggccataccgtaaaggataaaatccttgccggtgtaatttgaatacgcaaaggcaaagcacaggcttaaaacataaaagataaaaattctctttaaaaaataaccgtcggctccgttttttacccggactatttctccccgggtttcccgaccggcgcaaagcctggacaccgccggggttataccccgaacacccagagagaaaaaaggcataaacacattgaaaaccgccgtgtacctgcccattacttccgccccaaccatggcggttatgggtatgcggtaaattgccgacaagccctttacaaccataccggaaaaggccagcaatgccgcaccttttacaaaggatttttcgctgtccaaaatttcaccctccctttttaaccgcttgcaaaacaagcactgttactttaaagtatattgagagtaaaaacaaaatatcccacaggcaaagcccatgggatacatatttggtgcgggcgacaggagttgaacctgcacatcggaagataccagatcctaagtctggcgcgtctgccaattccgccacgcccgcaaagcaaaataagtataacaaaaaaacaagtccttgtcaacccgaccggccgccggcggaaatttcgataatttcgataaagaattttaagaaaatcgcttgtaataattaacaaaacgacagatgttagagcggatatgtttgtttacttaaccaaaagcgtattttgtgtttgtatgattaagtataaagtgttataatccggctgtaatactttttggagggtatattttaataaaaatgaaaaacaaaaaattacattacggatggattattgttatcgcttgcggccttgttatggcggcggcaatgggcattatatccaactgtgccagcttatttataaaacctataagcgacgatttgggagtttccagacgggctgtcagctcaacaatttcggttctttcaatcggtgccatgattacatcgctttttgcaggcagattattcaatgaccacaacatagtttccattatgcgtgtagccataatagtgatgacgatttgctttttctgcaacagtttgttcactgatattcaggcattctacataactgccgccattaacggcatttgtcaggtaatgcttacaacaatgcctatcacatttattttaaacaactggtttaaaaccgatgttggtacggctttgggctttgcgtcaatgggttcgggcttagggggcgctttctttaacgctgttgccggcaagcggattgagctttacggctggcgtatgacatacagaattttatccgttgtcatttttgttttggctgtgccttgcattttctttttgatcaaacggaaaccggaagaaaaaggctgttccccttatgaaaaaggcggcaagaataccggcaaagaagaaattcccgtttcattaaatgccggcgtaacatttgaagaagcaacaaagacaaaatttttctggattttgtgtgcttgtgccgttgcattgggtgtttccatgaatgtgacgtacagcagtatttcttcaagacttcaagatttgggctattccatttctttctccgcaaactttttgtcaataggtatgttccttatggcaggtggcaaaattctcttgggtaaaatatttgacggcaagggggtcagggttgcctttacccttgcaaatttcagcttgcttgcctctcaaatcggccttttgattgccggcaaaacccggctgggttttattcttgtattttttggcatgctgtttggccttgtttacggcgcagtttgttttccccttgcaataccgcacatctttggcaaaaaggattataaggccattatgggggctataacggcggcggtttccttcggcggtgccataggaccgattttggcaggtgccatatatgaccgctgcggcagttacaaccctgcatacataatctgcggaataattatggcagttgtaattttgcggacggtaaaagagctgccggataaatcccatcaagcttgttgataaatctgtaaaaaatccccttaatcggggatttttcatattaacccccatgtaggcgaaaagcacatttcattcttatttgttcacagattatacaaatttactgttaaaataaataaatcccctcagttttaagatattaaatttattaactaaaccgaaattgcattttacatttgtaatactaaaaattaagtgatataatcccctaagcggcacgccttatttaaaaaagaatatccgcatttttgaaaggaaaatttaataaatgaaagataaaaaaatacattacggatggattatcgtaattgcctgcaacattctcttggctgctacgataggaattatctccaacagttcaagcctgtttatcaagcctataagtgacgatttaggagtttcccgacgggctgtaagttccacgatatcccttcttgcggtaggcggcatgataacctcactttttgccggcagaattttcaacgaccacaatatcatcgcaattatgaaagtttcggttgtaatattgactgtctctttttttgcaaacagttttttcaactccatataccccttttacattacctctgccataaacggagtttgccttatactggttacaagtatgcctatcacctttattttaaacaactggtttaaaaccgatgtaggcaccgcactggggcttgcctcaatgggttcgggcatcggcggagcattgtttaacgcccttgccggcatatggatcgaggcatacggctggcgtgttacatacagaattttaacagcgattattttggttttggctattccctgcatttattttgtaataaagcggagccctgaggaaaaaggctgcaccccctatgaaaagaagaacaaagacaacaatacgaaaaccgaaaaagaataccgggatgagcttcaccgtgatatgacctccggcgtcacctttgaacaggcaagaagaacaaagtttttccggattttctgcggatgcgccatcggcctcggaatgtgcatgaacggtatgtattacagtatctctccgagattgcaggatttgggctattcaatatcattttcggctaactttttggctattggtatgtttgtaatggcagccggtcagattttactgggtaagatttttgacaaacaaggtgtaaggtcagcatttacactggctaacctctgcttgctggcatctcaaatcggtcttttaatcgcaggcaaaaccccatttggctttattcttgtatttgccggtttgcttttcggcgttgtttacggcacggtgtgcattccccttgcaataccacttatctttggcaaaagggattacaaggccatcatgggctttttggcggcaatggtttcattcggcggtgcccttggccctattttcgcaggggcaatttacgactcctgcggcagctataacccggcttatgtgattttctccgtaattatggcggtaataatattgcggacctacgcacagttgccggataaggcacatcaaataggttaatatattttccaaaagctcccttcggggggctttttgtttaaaaacgatgttgaagaatacatcttataatgttataatttaaaaaactgcttggaggtaggtttatggaaaagttcgttgttattggcaccggttttatcggcaaatatatgggcaagggaatgagaaaagtgcttggtaccgaggatttacagggacacgcattcggcattaaagcccacgataccggcgttaaggaaaaagaagcggagcttggttttgcggtaagcgtaaaggataccggcgcagttttggaaagagagaagccgtcaatcatcatattttccgcaccgccggaattcgccccggatatagttacaggcacccttttgccttattatgaacaatgccgcagggaaaaccgtccattgcccgatttatacagttttattccgtcgccctctgccgattggatctgcacacagcttggcggtgatgtaaatgtggtaaaaattttaccgaatattcttgatgtggtttgcggatatgacctttcccctgtgggtataaattatatttcttatgccgcacatttgtggccggaagaaaggaaagatattttaattaaatgtatgtccgcctatggctacaccgtggaaaccgacgacactgactccttggttttgcttgccggcaaaataacaagccatgtttgctatgaaattgcctataccataagcgaagtttgttatttttgcggcagatatgtaacggtaaacgccataggtaacgccatgcgcaaggctcaatacgaaattttacctgaactgcctaaaataggcacctgcaccgacagagacataccggcggaattaaagtcatttttcccggggtttatgaatgcttggttcaccgggttgaaccgctttaccattgaacacaagagcaaaattaccgaccgtgacgcagtttatgtggatatgtgctcctttgccttgaatgttttccccattcggtacgaaacaagagaggaacttgaacaggacacaaaaaatgccgccacaaagggcggtatattggaaagaggcaacgaatattactacgaaaccgttgaagatggcataaaatcggaaataaaggccattttacagcttggcaagcacagcgatgattttctcccttgggttgaaaaagaggcctacaacaccagtgtagaggcttacaagcgcagccttgatttgacgaggaaataaaaataaaacacccgacttttcagtcgagtgtttttgactgcaaaaaccacattttgaaaaatacatgaacagagctttttatggcagatattatttactgccgttttaaatattaaaattgttaaattgacatttccgataagcaaaagtgcaatacttttccctgttattttgttgccgataaaataaattacagtcggcccgtagcggcggtcattgaccgccatttgcagcccgataaaacggttatttacttacccaattagtaaacctaaccaaacgacaaaaccggctctctttggtaaagagagctgtcagcgttagctgactgagagattgaaaa

SEQ ID NO: 4340 - DNA, 32759 bp, Unknown
  16S sequences of unknown bacteria
aaacgaggaagcccggcgggcgggcttccgggatatggaagaaagaaaacggaaagccggggcggctttctcggtgttggaacttatcggcgggagaacggccgccacggtgaagctgcccgggaaagcggataaataacgaatcccccgcccgtgcgctctggattaaaagggtgatttataaagaaaagcccgcccaagtaggcggaaaaggggtttttgatttggggaaaattggggaaaatagttaaatgtaaaacaaaagacaataaaaaacggtcaaaaaccgcgtttttaaccgtttttttggtgcaccttcagggactcgaaccctgggcccaatgattaagagtcatttgctctaccaactgagctaaaggtgcatatggtggtccatccgagtctcgaactcgggacaccttgattaaaaatcaagtgctctaccaactgagctaatgggccaactattgaaaagagcaaaactctaatagtttaagtggctggggtggcaagatttgaacttacgaatgccggaatcaaaatccggtgccttaaccacttggcgacaccccaataaataaatggggcgggcgacaagaatcgaacttgcgacctccagggccacaatctggcgctctaaccaactgagctacacccgccatttatttggtgcgcctgaagagattcgaacccctgacacacggcttagaaggccgttgctctatccaactgagctacaggcgcatacttgatgctttgccgatatcggcagatgatctgcgcccggcactcaaaaagtttagtggagcgggtgatgggaatcggacccacgcaaccagcttggaaggctggaattctaccattgaactacacccgcattttttaagtttcggtgccatatcaacaacgcctgtatataatagcactattaagaaaaattgtcaaatcttttttcgcgcttttttgcaaattttcggaaaaaatttttaatcgaaaaagatgtgataaaattctcaaaaaatgttaaaaacgaactcaaaaaaaacacttcggataatgcaaaacatttgttgtctaaaccgctccatgtatgttataatagtaatataaagaaatacggtctgtttcgaggtgattatgaaaatactttatgtatccgacttagacggcaccttgattacccgcagagaacgcatttccgagtatagtttgaaactgctcggttcgctagtatcagagggactgctctttacttacgcgacggcgcgttcgctggcttcggccgaagccgcggtcgcgggattgaatcattctttgcccgttattgtgtataacggcgctttgattatcaatccgattacgaaagagccgttattttccttaaccttttcccaagagaagaaagagaaactcatcgaagaactcaatactttcggagtgtctcctgttgttcatgcacgggaaggcggggaagacaaaattttttgggttcgcggtcgggaatccgagggacagctccgttatctttcccgcagagtcggagataaacgtttaaatcccgtgggaaacgatagggaacttggccgcggagatgtttacttttttgcgtgtaacggtgcctatgacaaaatgaagcagattcatgacgctttggaagagaaaggagtatatagtctgatttaccccgaagtttatcgaaaggattattggctggaaattttaccgaaaggtgcgacgaaggccaatgcggttgtgcgcttaaaagagctgctcggttgcgataaagtaatttgcttcggcgattccgccaacgattcggaaatgttcgacgtctgcgacgaaaagtacgcggtaaaaaacgcagatgaatggctgaaaaagaaggcgacgggcgtcgtcggctactgtgaggaggacggtgtagccaagtggctggcggaatatgcctttatcgggcgttaaacgcttcttcacacgacgaagaatgtggcgccggagcggaaagcgataacccaaagatagacgttcagaacgcccaaaatgggcattaaaatcataaggaaaagacttttcaatcggtatttatagataaacatacagatataaatcgtaattgcaccgccgaggaaggctgtcaggacaagccttccatccgaggacttgttcgggtgttcttcgtcgtaatcgtccttcaatcccttgatgagtaaaaaggaataaaagttgactgcgaggatatacgcgatgaaaaagagatacagaatcagcatactttcagtatgttccgtttttgcaaaaaataaaagaggtatatataaattatgacaatgaagaaaagagctttggtaagtgtttcggataagacgggcgtagtggatttttgccgcgggctcaaaaaatgcggttatgaaatcatttctacgggcggaacggcaaaggcactgacggaagcaggaatttccgttatcggtatcagcgacattacgggttttcccgaatgtctcgacgggagggtaaagacgttgcatcctgcagttcatgcgggacttttggccatgcgctccaatcccgaacatatggctcagctcgaaaagttggggattaatacaatcgatgtggtcgtcgtcaacctttatccctttaaggcgacaatttccaaaccgggcgtttcgtttgcggaagccgtggagaatatcgacatcggcggcccgaccatgattcgcgccgcggcgaaaaattatcaggacgtcgcagtcgtcgtagaccctaaggattacgaaaaagtactttccgagttagagtcgggcggcgtttctttggaaacgaagaaataccttcaatataaagtgtttgcgcatacggcggtatacgacagcatgatttccaattatctcgccggacagctggggattcgtttccccgacagcattacgttcgcctatgaaaaggcgcaggatatgcgctacggcgaaaaccctcatcagggcgcttcctattataacgaagaatttattcgtgcgggatctttgtccaaggcaaaacagctttggggcaaggagctttcctataataacatcaacgacgcgaacggcgctttggagctcgtgaaagaattcgacgagccgtgcgtggttgccagcaagcacgcaaatccctgcggagtaggcatcggagagacgatttacgacgcttatataaaagcgtatgaatccgaccccgtttccgtgttcggcggaatcctcgccatcaacggcactgtggacgaaaaaaccgcggcggaaatcaataaaattttcatagaaatcgtcattgcggaacattttacgcccgaagcgctggcgattttgcaaaccaaaaagaatatccgccttttggagctgcccgatatccgcgtgcgccgcgaaaagagcgcttacgatatgaagaaagtatacggggggctgctgattcaggattatgacgagacactgtataacgaagaagatgtgaaagtcgtcacgaaacgggcgcccacgaaagaggagatgaaggcgcttctgttcaattggaaagtcgtaaaatatacgaaatccaatgccatcgtcatcggcaaggaagatagaacgacggggatcggcatgggacagacgaaccgcatctgggcggctcagcaagcgattgaacatgcagggaaagaagctaagggatcggttatggcttccgatgcgtttttcccgttccccgattgcgtggaagagtgcgtcaaagcgggaattaccgcgattattcagccgggcgggagtatccgcgatcagttgtctgtcgacgcttgcgacaaagcggggattgcgatgattttcgtgggacagcgccatttcaaacattgaggtgaggagaaaataagagatggaatttttccttacgctgacttttttgtttgcggtcggcgcgctgtgcggctgggtaatagaattgtttttccgccgtctgaacagcaaaaagtggattaatcccggttttttacacggaccatatctccccttatatggtttcggactcgtttttctgtttttgattgcccgtataccgctcgacggaatttctcctgtatggcttcgctatgcggtgacattggcggtcatctgtgtggtaatgacgctcatcgaatacctggcgggcttgatttttatcaaaggcatggggattaaactttgggattattccggacggcccggaaatattcaagggattatctgtccgttattttccttgatttggacaattatcggcggcggatatgtgtttttcctcgatccgttgattacccgaatggtggggtggttcacgaataatatttactattccttctttgtcggaatatttttcggcctgtttttttgggatttggcgtctacgttaaaattatccgcaaaaatcagaaaatttgcgaaagagaatcgcatcgccgtgcgatacgaagaattgaaactgacgattaagagctatctcgatacagaaaaattgaagagcagtttccttaatcctttcaaggcctccaaagaagcaattaagaaatcttttgaaaagtatatggaaaacttccgcaacggtatttatagtccgaaacgaaaaaagaaaaataagtcagaggacgaagacgaggaaaagaaaaattaaaattaaaaaaccggcagggctatgagcctgccggttttcacataatcacaacaatgataaaataagcaaaaggaaaccgtccttccctaaaatcggctttggccgtttttacgaatagaccgggaagcgacgaaaaaatagcagaaaaaggaacggactttatttttccgcagccgccgcggttgcggccgccgccctttccgccttatattcggcaatcgccttggacagttggtcgggacaggacgtgccgtttctgcaacgaatccccgcgagcaggttttcgatttcgtcaatttttttcccctcgacaaggcgggcgatcccttgaagattgccgccgcagccgccgataaagcgcacattatgaagtttgtcttcggcgtcgacgtcgaagaggatttgtctcgaacaggttcctttcgtggaataagtaaacatagtttggtcacctcgatgataagttgagctcaatctaccaatgtttcataaatggcggaatagagttcagatgctttgctttcccaatttttatagatattctgcgcggtttttttgtcgggtacgacaaatttcaattccagcataggctgaacgggtgcgataattttgagaaataccgtataagttccgtctttgttttgataataatccgccttgcactcctggcggtttctgagttttccgctgtttttctttacgaaagcggaaatttcttcgcggatacttttgggaatattgatatagaagttattgaggctttcccgcccgtcggtagtaatggtatagagcggttcctcgtcggaagagagacggcagataaaaccgtcctctaaaagtttgggaagcagttccatgcagtccatataatttagccaattattgctggtcgtgcacatttcgacgatcgtgcgctcggaaagggcactttccatcttatcgaaaacgaaaagaacgattaatttgtttacggatgtctcgccctgtatctgcattggtaaaagctcctcaaacggtcggaaaaaagaccgaaaatattttcggtcgaacgaaaccgccctttggcggtcgtcatttttgaatatgccggattatgcggcaaattttttcagcttctctaaaagatccgcgcaatcgtcggaataaatttctaccgtgagaggctgggacagatcgagcgagaagataccgaggatagactttgcatctacgacatattttccgcttttcaaaagaatttcataagaacagtcttgggtaatagaaacgaactctttgactttttgggccatttcgagagaaatttttacggatttcatttggatttttacctccgataattttgattgtctatattatacataaaattgcaagtaaaatcaagatattttcggaaaatttctttaatattttttgtttttgtgctataatgacaatataggcaacaaaacctataaactttaactaaatgctagggaggtaaaaaaatggagcttacagaaaaaactgtgaaaaaaaattatgtctatcgcgggaaaattatttccgtccgtgccgacgacgctctccgtccggacgggaaaccctgtaaaagagagatagtggaacactccggcggggcctgtgtgctctattcggaggacggaaaaattttattggtcaaacaatatcgatacgcttacggagagacgatttatgagattcccgcgggcaagctcaatgcgggagaggaaccggcccttgcagcagccagggagctggaagaggaggcgggaatccgtgcggattgtttgacgcttctgtttacgatgtatcccactcccggatatacgaacgaaaagatttatatttatcgtgccgaaagcggaacgcatacctccgcccacctcgacgagggagaatttctgacggcggagtttctgcccgaagaaacggttaagcgtatgttggaaagcggagaaattaatgacggaaagacgattatcgctttacaggcttactttctgtccttgaaaaattgaaaatacagaaaacgcgctttatcagagagaattcaaaacccaatttcagacagccaagcccccgacgaatacttgcgtcgggggcttgttatattttggcgtacggatatatattgtctgttattcctcttgattttcgagcgcccgtttttccgtccgagagctttgagtcgtctgttacgttgtccgcatattttttcggtaatccgtaggcgaaatatcgtttaggtctttgaatttttttgcgaaaaaagaaggagaagcaaatcctaccgcgtttgcgacggaagtcacattgagatctgtggtacgcaataatacttttgcttcctgtatacgcttttgattgagatagcgtatgggggaaactccgtaggcctgggtgaagaaatgaattaaatgaaatttattgataaaagccttttgcgccaattcgtccaatgtcaaatcgaaagcgaaatgccgatcgatatactgctttacaaagacgatttctttggttgcgtttcggttgtctaccgtttcagagaacgaaagatcgttcgtccgaagtatgggaatcaacagacagcaaagccgatgatataccatcaattcatagtaaggcgccttttgctcgaattcatccgctattttttgtacatatccgagcgttctttcgctgtattcgggattgtgaaatacgggacaaaagccaccgttctccgcgagcgtatcgtgtcgggggggggtgatttttggcgagcagataaagagatattatcgattccgaaaatataatatttgagcggatttttcggggaagaagtttccgtatgtatggtgtacggattgatgatgacaaaatcgccgcgcgtcaaagaaaacgcctgcgtatcgatgataaattctcccttaccgtcaaagacgtataaaagttccaaaaagggatgataatgcggggtggaatgccaatcgtccccgtattccgactgagtcagatataaaagcttcggcttgaaattgttgagttcctcatcggaaaattcatagcgtatactgctcatattggaattcgccccttactctgttacagatattataacataaaaaaaacttttcgtcaagatgaaaatagaaattatatattgatacattttatcgtttgattggtatataattgttcgtttttcagaaaaatatctgtatgtaaccgcaattttttgatagaacggcgcaactttgttattgaaagagggaattttttcctttaaaatatagacaagataacgcggaaaaagcgaatatctgaggaggaaagttatgaataaaaaatttgtagcgttaatcagttcggttgtgatgttgggaagctcgatagctcttgcggcgtgcggcgatgataacaagaatcagtttaccgtcgcctatctttcgggcggccgcggcgaaacctatgtcgagaggttgtacgaggaattccagaagacagacgtctataaagactacctcaaagaaaagggactcgaagatcttaaactcaacgtcatcaagggcggtgcggataacgtaacgggagacgtacggaatgctctgaatacgggaacgaaagtcgacgtactgtttctgaacttcggaatgacgggcgtggatttgacggaaagcctcgtccgcagcaaacagttgacggatttgacctcgctgctcgacgaaaaggtctacggagaggaaacgacgctgggagacaagctcgttccggggcttttggaaaactatacgactaagccgtacggcgacggaaaagtttatacgcttcccgcattctactccccgacggggctttggtacgatgcgtcgagattcaacgaaaacggcacggacggcaaatataagctcccgacgacctgggaggaattctgggcgctcggcgacgagttgaacgacgcgattgaagcgaacggaaataaagtcgacggagaacatcccgcactgttcacctatcccaccgcaggttatttcgacgggtttatttatgctgcggtcgcaggaattgcaggagaggaaaagttcctcaatatgctcggttatacggacgggatttgggaagacgccgatataaaaaatgctttgagcgtcgtcgtcaagctccgtaattatctcgaaccgaatacggtcgctcaggcgaacaccgatttcaaaaagaatcaacaggcagtcataggcactcaggacggaaaatcgaaaggtaccgctctgtttattcccaacggcgactggctgccctccgaaatgtcggcaagcaccccgaaagactacaaatggggattcatggctctgcccaagaaagatgcaagttccaagagctacgtgaatactttccttgaaaacgtctatctgcataaagatggggcacatggcgaacttgcgaaagagttcctgctctattatttcagcgatacgggcgcgaagatcgtcgcagaggaatccaaagcgattattcccacgcaggatgctttgaagaatgctaaggaaaacaagattcccgattccacgatagaactttacaatgcatataacggcaacggcgcggtatcgggcagctttgtggcgaccgacgaagttccgggacttaaatggagcgacgtattgttcaacgacctcaacgataaagtattcaattccagcaacgcgagcaaaacggacgaaacccttctgaacgaatggatcgccaggttggaagaagccagcgataagttgcgggcaaaaatcattaagtaatgattgaatggaaccgagcagggaggaaggaggctcttcctcccttgattttcaaaaaggaggcagatgatggaaaatttgtctacggaagtacccgccgagaagaccgcgggcgaaaaagtattcaaaaaaattgacagagaaaagcgaagagcggacaaagctcgtacggggtttattattgcgacggtcgttccttcgcttgttttgttcctgttgttcgtcatacttcccgtattcaatatgctgtatacgtcctttttcagctgggacggcataggggataaagtatttattaaaaccgaaaactacgaagtattgtttcataacgaagatttttggtcggcgttcaagaatacgctttttcttattttcttcgtaacgatctttacgataggctttgcgttgttttttgcggcggtgctttctaaggggaaaacaaaaggaaaaacttttttccgtatcgtattctatatcccgaatattttgtccattgtcgtcatttccgctattttttctgcggtattcgctccctcttacggcgtgatcggcgcgatagcgaaacttttcgataaggcgtatacgggttggctgggggacatggacgcggttatgtggtgtattactttcgccatggtctggcaggccgtagggtattatatggtcatgtatatcgcggggatggacggcgtccccgaccacctttacgaagccgcggatctcgaaggatgcagtaaaattcgtcagttcttcatgattacggtgcctttgacttgggacgtaatccgtaccacgctcacgttctttattatcagtacgatcaatatgagcttcctgttcgtggacgcgatgacgcaggggcaggcgaattctcacgtgttgctttcgtatatgtatagtttcttcggttctcaatacggttatgccatggcaatcggaatggttgtgttcgtgttcgcgtacggggtttccctgattgttcaatttttgacccgccgtgaaacggtacaatattgacgggaggaaaatatgatgaaaaatcagataaaaaatcaatcgggtttctcctgggagcaagtagggcgttatgctgcgaaaattttcaaatatgctttgcttattgtattcgcgctccttattctgctgccgcttttctgggtggttatgtcctccttaaaaacgacgcaggaaatcaattccaacgcattctctttcccgaaacaattttattttcagaactatgtcaatgcatggaacagagcgagcatgggtacgtatttcggaaattcgatttttctgacagccgcgagtcttgcgttgctcgtccttcttgcggtgccttgttcctatacgcttgcacgtttcaaattccgaggttcaaaagccataagcctcatttttatggcggggttatttatcaatatcaattatattgtcctgccccttcatatcatgttgttcaatttcggcaaggcgataggaatcggggcaaatatgacgaataactattttaccgttatcgtcctgtacgcttccacgagtctttcgttcagcatatatctcatgaacagttatttcaaagcgctttcgcccagtttcgaggaggctgcgaaaattgacggatgcggatatttcaaaacttttttatatgtttgtgctccgcttgcaatgccgagtattctgacggttatcctcttcaatttcctgtcctattggaacgagtatattttggcgaatactttcttggataaggcaaaagcgacgcttcccgtcgggttgctcagaatcatgcgggaatcgaaagtcgccgacgacctcggaagaatgtatgcggggcttatgattgtcattatcccggtactcatcgtatattctttcgtacagggacagctgacgaagggaatcacggtcgggggcgtaaagggataatacctttgaaagagcgatttttataaaagaatatttgcataagggcaaagttttgcccgatttatcggagacagaaatatgaaaaagaaaacttttggaggaggtctcacgattcccaccgaaacggggttcgtagacgagacattgaaacttttggaacgttggggcgcagatgcggtgcgcgattgcgacggaaccgccatgcccgatgaaatcaagcgagcgggatataaaatttattcgacctatttcgttgctcgcggcgataacgaatttgcaaagaccgtgcccgatgagaggacacatttcttcgtatgcagcgaatatatcgccgcatcggagaaaacactgatcgtggatattttacgcggatatttcaagcaacagattcaaccggaatacgattgcgacatgagcaagtattgggaggttatcgaccgcacgacgggagaggtagttcccgtgtccgattggtcggcggataaggaaagcaatttggtgacgattcaaaattgtaaaaagttccaccagtattccgtttcgtttcttgcccgcgccatttgggacagtacgcagatgtataattacatcacgaatcattggacgaaagacaaggatttgccgtttgacgcgcgttgtaaaaagacgggagaatacatcgtaaagcgcatggaaaaatggctggacgaacatcccgatacggacgtggtacgctttacgacgtttttctatcacttcacgttgttattcaatcatatcgggaaagaaaaatttgtcgattggttcggttatagcggttctgtcagtgtggaagcgctggaagcgtttgaaaaagaatacggttatgcgcttcgtccggaggatattattgacgaagggtattacaattcccccttccgtgtaccgagcaaggccttctccgattatatggactttaccatgcgctttgtttcttccacggctaaaaagctggtggaaaaggttcacgaaaagggcagggaagcgatgatgttcctcggcgataattggataggcaccgagccttacgggaagtatttccaaagtatcggactcgatgcagtggtcggcagtgtgggcggcggagttacggtgcgcatgctgacggatattccgggacttaaatatgtagaaggaagattcttgccatatttcttccccgatacgttttatgagggcggagaaccgaccaaggaattaaaaaagaattggcgcacggcacgtagggctatgctgaaaaagccgctcgacagaatcggttacggagggtatttgagtttggccgcgaaatttcccgattttgtggaggaagtcgagcatattgcagatgaattcagagaaatttatcgtaaggtaaagggaaataatccctattccaatttgaaagtggccgttatcaacgcatggggtaaaattcgttcatggcagtgcttcatggtcgctcatgagttgtggtatcaaaaagtatattcttatcaaggcattttggaggcgctcagcggaatgccggcagacgtagagttcctgagctttgacgacgtattaaacggcgcattggagggatttgatatcgcaatcaatgccggagacgcaggaacggcttattcgggcggaaagtgctggaataatcccgacttggaagcaaaggtcagggaatgggtgtataacggaggcggactcatcggcgtaggggaaccctctgcctatctcaaaaacggcagatattttgtcctttccgatgtattcggagtcgataaagaacttggatttacgctttccacggataaatataacctcgaaaaagtaagcgggcatttcattttggaggatgcgaaagctcctctcgattacggcgagggaatgaagagtatttatgcgaaacccgatacttcggttttggatatatgcggacaggacgtattcatggcggtgaacgattacggcaagggcagagccttttatatggcagggcttccttataatatccagaacgagcgcattttgtaccgtgcctgtcattatgtggcccataaggaaaaattgcttaaacgctggtattgtgacgatacggccgtgacggtgcaatattatccgcagatcggagaatgtgccctcgtcaataacggagatgcggcggtcgatacgacattctatgacggaaacggaaaagctgaaaaaatctccctttcgtccggagaacttctctggcgcaaagtataatcggacatgataaaaaaccggacgaatttttttcgtccggttttagtctgataaaaatactctttctccgattgactttgttccggtttttttgtataatgacgttaggaaagcgagtatgaaaagctcggcttccgctgcaatatccacggaggtaaagctatgaaacttctgatcatacgacacggagaccccgattacgtacacgataccttgacggaaaaaggaaagagagaagctgaattgctctcccgaatgttagtaaaggaaaagatcgattttatttattgttctcccttgagacgggccaaggaaacttgtgcctgtacggcggaaaaattaaaaatgacgcccgtagtatgtccttggctgcaagaatttgactatcgcgttgaattgcccgacggggaaaagaatcatttgatttgggatatgcttcccgaattttggacagggcgaaaggaaatgtacgataacgactgctggctggatcaaccctttatggaaacggggcatatccgagaacattatcgtgacgtgatacaggggtttgatgaactgcttgcaaaacatggctatatgcgggaagggaaaatttatcgcgcggaaaatcccaatcgagataccgtggcgctcttttgccatttcggtttagaaaccgtattgttgtcgcgcctgttcaatattcctcctaccgtcctcgctcatgtattcgtagctctgcccacctccgtaacgactttatatacggaagaacgccgcaagggaaaagttatattccgctgctgcgccttcggagaaacgacacatctctatatcggaaaagaagcgccttccttttccgcacgcttttgcgaaactttcgattccgatgaaagacatgactaactaaaagttagatattagtatatttcattccttgaagtataacgaaaaagatttttctttcatatgggcagggtagagatgagcgctttttcaaaaaagtagaaaagaaaaattttgagataaaatattatatttattcacacaatcaaataaaataacatgttttacaaataaaataaatgaggaagacttcaaaaaaagtaaataaaataaagaaaaatattcaataaccattgacaaagtgaaaaatgtgtgatatgattatatacaataaaatatgcggaaagaaattcggtaagtaattgttaaggtcttttgacctgattaaatatccgatagaaaaagttgtggggagaagcatgactttggaagaatccagcgaagagaaagaggagctgtttcaaagagctccttttgagagatacaaaagacaaaacaacggacgcgaattcagcatcgacggataaagccgatgcggtttttacgttcgttgttttcttttttagggaaaaagggaaaaaagcagaaagatttgcggaaaatatttataggggttctatgatagattgacgcttttcggcggataataaatataatatatcagataaaaacggaggaatgtgcatgcttacgacagcggaactgtatgatttcggccatacccttgcgggagagtatctttcgagatatacttatccttgggaggctttgaaagggattaaagactttattctcgctttgggcgaaacattagacaagggagaatatacggaaatctccccgagtgtatgggtgcataaaacggtgaaaatcgctccgaccgcgtacttgggagctccttgtattatcggagcggggacggaggtgagacactgtgcgtttatccgcggttctgcgttggtgggggaaaactgtgtggtgggaaattcggtagagctgaaaaatgtcatactgttcgacaatgtacaaactccgcattataattatgtcggagacagtatattgggttataaatcgcacatgggagcgggttcgatcacttccaacgtaaaatccgacaaaacgccggtaaccgtaaaaaacgggacggaaatcatagagacgggactgaaaaaaatgggggcgatgttgggcgattttgtagaagtcggctgcaacagcgttctcaatccgggaaccatcatagggcggaacacgaacatttatccgctgtcctgtgtccgcggggtcgtgcctgcggattcaatctggaaaacaggaggtgtaacggtaaagaaaaaataagattaatatagaacgaaaagagaaacttgcacgcgtatattttaagggaaagaaatcgggcgaggccgaaaagcgctgaaaaaatggcgcgaaattttcgaggacagggttgaatggataaggtcggcactgaaaagtccgacatttgcacggagcgcctcgcattgcggatacttaatttccgcatgtggaaagaatgattcggatttgagagttttaagaggaaataaattttttataagaggaaatgtctatgggtaaatatttcggtacggacggttttcgcggcgaagccaatgaaaacctgacggcggaccacgcctataaggtgggccgctttctcggctggtacttcaacgaatgtaaaaagcgttcgggactgagcgagcgggcgcgcatcgtcatcggaaaggatacgcggcgctcggggtatatgtttgagtacgccttagtcggagggctcgtttcgtcgggtgcggacgcatacctgcttcacgttacgacgacgccttcggtcgcttacgtggtgcgcacggaaggtttcgattgcggcatcatgatttcggccagccacaatccttactacgacaacggaatcaaactgttcaacggtcagggggaaaagatggacgaagggacggtggagctcgtcgaaaattatctcgacggaaagctgagcgctttcggggagaagtgggaggagattccctttgcgcgtcgggaggaaatcggccgcacggtagattacgttgcgggcagaaaccgctatgtcggatatcttatttctctcggaatatacagtttcaagggttataaggtagggcttgactgtgcgaacggcagttcttggaatatcgcgaagagcgtattcgatgctctcggcgcgaagacgtatgtcatcaatgcggagccggacgggacgaatatcaataaaaacgcaggttccacgcatatcgaagggctgcaaaagttcgtagtggaaaacggactcgacgtcggttttgcctacgacggagacgcggacaggtgtctttgcgtagacgaaaagggcaacgtcgtagacggggatctcattctttatatttatgcccgctatatgaaagagcggggagtattgctcaacaacacggtcgttacgacggtaatgtctaacttcggtctgtataaggctttcgacgaaatcggaatcgaatatgccaagacggcggtaggggacaaatacgtctacgaatatatggcggagcacggcgattgcatcggcggcgaacaatcggggcacatcattttttccaaatacgcctccacgggcgacggaattttgaccagtttgaaagtcatgcaggcgatgattgccaagaaatcgacgctcggcaagctcgcggaacccgtgacgatttatccgcaggttctcaaaaacgtgcgggtgaaagataaagcggcggcgaaaaacgacgccgacgtacaggccgcggtggcggcggtggcggcaaagctcggtgacacggggcggattctgcttcgcgaatcggggacggagcccgttatccgcgtcatggtggaagcggagaacaaagaaatttgtcagtcctgcgtggacgaagtcgtgtccgtgctcaaaaagaaaggacacggggcggattgaggagaaggtatgtgcggaattgtcggatatatcggtaaaaaacaagcggcgcccattcttctcgacgggctggcgaaattggaatatcgcggttacgattcggcggggatcgccgtgcgcgacggcagcgcggaagcggtggtcgtcaaagccaaggggcgcttgaaagtccttgcggaaaagacgaacagcggactttccgtaaagggctgctgcggaatcgggcatacgcgctgggcgacacacggcgaaccttctgccgaaaacgctcatcctcattacagcgacgataaaaacgtcatcgtcgtgcataacggaatcatcgagaattatcaggaactcaaagaaaaactgtcaaagagcggctatgtgttttactctcagacggataccgaggttcttgcgaaactcgtcgattattattataaaaaatacggcgacgggccgatagacgcgctggcaaggtgtatgatgcgcgtgcgcggctcgtacgcgctggcggtcatgtataaggattatcccgaagaactctatgtcgcaagaaaggacagtcccatgatcatcggcgcggaaaaaggcgaaactttcctcgcgtccgatgttcccgcgattctcaattatacgagaaacgtctattacatcgggaatctggaaatcgccaaattggaaaaagggaaggtctctttcttcaatatcgatcgggaagagatcgccaaagagattacggaaatcaagtgggacgcaaaggccgcggagaaagcgggctttgaacatttcatgatgaaggagatccacgaacagcccaaggccgtacaggatactctgagttccgtaatcaaaaacggcacaatcgatctgtccgaatgcggactttcgaaggagcggattcaatccgtcgggcatatttatatcgtcgcctgcggttccgcctatcatgcgggcatggtggcgcaatacgtcatcgagagcctcgcgaaaattcccgttcgggtagacctcgcgtcggaattccgttaccgtaagccgctcctcgaaaaagacggcctggtgattatcatcagtcagtcgggcgagacggcagacagcctcgcggcgttgcgggaagcgaaggggcggggaataaagaccttggcgatcgtcaacgtagtgggctcttccatcgcgcgggaagcggacgacgtgttctatacgctcgcggggcccgaaatcgcggtcgcgacgacgaaagcctattcgacgcagctcatcgcgggttaccttttggcggtgcagttcgcaaaggttcgcgggcagatagacgagaagagatattcctcgctcgtcaaagacctgctggctttgcccgataaaatgaaacgggtattggaggataaagaacgaattcaatggtttgccgcgaagttcgcaaacgcaaaggatattttctttatcggccgcggaatcgattatgccgtcagtatggaaggcagtctcaaaatgaaggaaatcagctatatccattcggaggcgtatgcggcgggcgagctcaaacacggcacaatcagcttgatcgaggacgggacgctggtcgtcagcgtactcacgcagcaggaattgtatgaaaagatgatcggcaatatggcggaggtcaagagccgcggcgcttatttgatgggcttgacggcttacggaaactataatgtcgaggacacggcggactttactacatatatcccgcgcacggattcgctgtttacggcgagtttggcggtcattcctctgcaactgatgggatattacgtcagcgtagcgaagggattggacgtggataaaccgagaaatctcgccaagagcgtcacggtggaataacgtcggaaagggatatagagcgagaattttcgccgaatatatcgggagtggaactatgaaaggtacaaaaacaaaagcgtggcatatcgcgtttctgatgctggcggacgtggtgtccgtcctactcgcaatgttgattgcctatctgatgacggtcggggataaaagtttttccctttggctcgtgtggtgggcgctcggaaatatcgcatgtacgttgttatttttcgggctgttcggcatgtacggaattgtgttttctacggtcggaattatcgacgctctgaaacaaacgcttgcgatcgtcggcgtcgcttcggcaaatgtcatttttgccgtccttacaggtcgggcttatgtcggtataagtacggcccttgtatacagtatattcctcttctatttttccgttatgacgagatttttcaaaaggatcctcatcgtcgtcagatattacctttcgcggacaaaagttaatcggaaacgcgtcatgatcgtgggcggcggagccgccggttccgccctcattaaggaaatgctcacctcggataagatttcctataagcccgtatgtatcgcggacgatgaccctttcaaaatcgggaaatcggtcagcggcgtaaaaatcgcgggcactacctttgagcttccgcggttggtcagggaatatcatgtggaagagattttcgtcactatgcccgctgtcaagaaaaagacgcagagcgaaattatcgcccgctgtcgggatttagggtgtcccgtcaaggttctgccgggaatttatcagctcgcggacggtcaggtgaccgtgtccaaacttcgcaaagtcgatattcaggatttgctcggccgagagcaggtaagtgtcaacctcgacgaaatcatgggatatatcgaaaataaagtcgtgctcgtgacggggggcggcggctctatcggcagcgagctctgccgtcagatagcgacgcatcgtcccgaaaagctgattattttcgatatctatgaaaacaatgcctacgatatcgaacaggaattgaaacgaaaagacccttctctgaatttgttgactttaatcggcagcgtgcgggatcaaggaaaggtgcgggatttgtttgaaagatatcgcccgcaaatcgtgtttcacgcggcggcgcataaacatgtccccttgatggaaaccagccccaacgaagctgtaaaaaataacgtgttcgggacgttgaacgtagctcgctgtgcggacgaattcggcacggagacgttcgttcagatttccaccgataaggcggtgaatccgacgaatatcatgggggcgaccaagcgtatctgcgaaatgattattcagacaatcggccgccacagcaagaatacgaaattcgtggcggtgcggttcggaaacgtgttgggctccaatggttcggtcattccgcttttcagaaaacagatagccgagggcggtcccgtgacggttacgcataaggatattataagatatttcatgacgattcccgaagcggtgtcgctcgtcttgcaggcgggcgcctatgcgaaaggggggcaaatttttgtgctggacatgggcgagcccgtcaagatatatgacctcgcgtataaccttatcaaactttcgggactcgaacccaatgtcgatatcaatattgtatgcacgggattgcgtccgggagaaaaattgtacgaagaacggctcatgaaagaagaggggctgcaaaagactgcgaacggactcatcaatattgcccgcccgattcagttggacgaagaatttttatgggatactttggacaagctgtatggggaagcctacgatgagacgggcaatatgaaggagctggtggcaaggctcgttccgacctataaaatcgataatcgggtatgtaacggataaacgtaacggtttgtcgtttccatagcatacgaatagtaagtaaggaatttgcagtcaaggggagagaaacaataatggcagaaatagatgaaaagcacattgaaaaaatatgtcgtatttttcagattcggggagaatatcgctcgtgcgaagttttgacgctcggacatatcaatacgacatataaggtatacttctaccgcgacggggaaatcaaggactatattttgcagagagtaaacacctatgtgttcaaagatcccgttcgggtaatggaaaacattacttccgtcaccgagtatgtccgtgcaaaaatcaaacggacgggtatcagcgcaaaaaggggagtcctgcattaccaaaaaaccgcggaggggaaatactatacatgggaagaggacggaggcttctggcgctgttgcaggtttatcgacgattccgcgtccttccttctgacggataatttgaaagtgatagaggagtcgggaaaggcgttcggggagttccagctgcaccttgccgattaccccgtggaaaaactgcatatcgccattccgcattttcataatacggtcatgcggtacgacacctttcgcgaagcgattgaaaacaacctcagcggccgaaaagaaaacgctttgagggagatagaggagtatctcggcctcgaagcgcgggcgacggaaatgtataaaatgcagcgccgcggcgagcttccgctccgagtgacgcataacgatacgaaatgcagtaacgtgcttttcgataaagacagtttcgagcatctttccgtcatcgatttggatacggtcatgccgggactagtggggttcgatttcggagacgcgattcgcgccacggcgaatacggcggaagaggacgaaaaggacataaaaaaagtcgctctcgacttaaaaaagtacgaggcgtttgcaaaagggttcctcggcaaagtgaaaggcgaactcaccgaaaacgaaaagaatacgatggctttgggcgcgctgacaatgacgatagagtgcggaatgagatttctcaccgattatctcgacggagataaatacttccatacggactatcctgagcacaatctcgtgcgcagtcgttgtcagctcgcgcttgccaaggatatgatagagcattttgaagaaatgaaggcggtcgtcaaaaagtattgcgattaatttttccgtcccttaaaaagagccatacagataacgcccatatttccgcccacgacgaggccgacgacaaatcctatccaaaacatgctgaaaactcctccttttgccgtttatttaccgagtatgaacgttttctcagatttttattcccattatatgcatcttcccgaaaaattgttattgcgtatccgaaaatactttttgaaaaagcgccgactttccgaaagggattgcggcgtttttttctttgaaaagaaaatttttgattgcaaaacagagtgttttctgatataatagagaaaagtcttcttagaggtacttttatggtcttgaaaaccgagcgcctgattttgagggaattacgggaggctgatttttcagctctcgcggaaatattaatggatagagaagtgatgtacgcttacggacactgcttttcggagaaagaaacaatggagtggctggaaagacaacgggaacgttaccgacgtttcggtttcggattatggggagccgtattaaaggctacgggggaggtcataggacaggcgggactgacgatacagccgtgcgaaggaagagaagttttagaaatcagatatttgttcaagaaaaagcattggcatttcggctatgcgcgcgaagctgcggaaggctgtaaaagatatgctttcgatattctgaacagagaaaaggtgtattcaattataaagacggataactatccctctatccgcgtcgccgaaagtatcggcatgaaaagagaaaaagagtttataacccgttattatgggggaatatgaggcattatctcttttccgtgcggaaggaagaaaaggaatatgtatgattatttgattgtcgggagcgggcttttcggtgccgtgtgcgcctgcgagctgaaaaaaagaggaaaaaggtgcctcgtcatagaacgccgcccgcatatcggcggaaacgtctatacggaaacaatcgaagggattcaggtacataaatacggcgcgcatatctttcatacttcggataaggagatatgggaatatatcaaccgtttcgcggaatttaataatttcgtcaatcaaccgattgcccgatataaagacgaatgttataatcttccctttaacatgaatacgttcgtaaaactttggccggatgtttttacgcccgcggaggcggaatcgcgcatcgagtcggagcggaggaactctttttccaaagagccgaaaaacctcgaagaacaggctttgaacctcgtcgggcggacgatttataaaaaactgatcaaggaatacactgagaaacaatgggggaagagctgctctcaattgccgccgttcattatccgtcggctgcccgtacgttttaccttcgacaataattatttcaacgaccgctatcagggaatccccgtcggcggttatacgaaaatcatcgaaaagatgctggaaggcacggaaattcgctgtaatgcggactttttcgacgacagggcgaattatctgaggagctgtgcccgaaaaattatctatacgggccccgtggacagatttttcgattatcgctacggacctttggaataccgcacgctccgttttgagacggaggttttgaatacggccaactttcaggggaatgcggtcgtgaattatacgtcgtcggaagttccgttcacccgcataatcgagcataagcatttcgagttcggcagacaggaaaagacggtgatttcccgcgagtatccctccgcctggaaatcgggtgacgagccttattatcccgtcaacgacgaaaagaacgaggctctgtacgcaaaatacgcagatcttgcccgaaaggagacgagcataatttttggcggaaggctggggacctataaatattacgacatgcaccatgtcataggtcgcgccttggaaaccgtgcggcaggaagaggaagaacagaggaaataatttttctcaaagagacaagaaagggcatagtgattttactatgccctttcttgtcagaccttcttttttgcggtaactttgaaggtcagttccaacatggtgatcatgagcgccacaaaaacaatgaggtatacgggaagtattttgaaaccgatatgatttccgaaaagtccgaataacgggggaataaaggtagaaccgacataggcgctggccatttgaatccctatgatggcgcccgaattttctgctccgaagttgttcggagtggaatggatgatggaaggatatatgggcgcacagccgaagccgataacgacaaagccgataatcgaaacgagaggataactgacgggaatcatcagagcgattatcccgcaggataaaatacaggtgccgataacgatcatttttttatcgcccagcttatccgtgacaaagccgctcagaaatcttccgacggtaatccctatataaaagagagcggcaaattgtgcggctttttcggtcgatatgcctttcacctcggtaaaataggtgctcgcccaggacatcgccgtagcttctgcggcgcaataggcaaaaaatccgatcaggagaaagggaacgcccttaattttcagcgcgccgataaggccgatactctgttgttttttctcggcggactgattatggactttccatacgggcagagtgacgagcaagagtatcgctatggcgagctgtataaacccgacgatacgatatccgttattccagttcgaatttgtaagagcatagctcatgacgaacggactgacgatggttcccacaccccagaagcaatgcagccagctcatgtgtttggacgaatagtggagggcgacgtaattatttaaggctgcgtcgatagcccccgcgccgagcccgtagggaaccgcaaaaacgatgagcatccagaactgagtggaaaaggaaaaaccgaacagtgcgaaagccgtaaggaatacacttatcacggtcacgatacgggtaccgagctttcccgtcagtttatcggacagaaggctggatacaatggttccgcccgatatggtcatggaaatgattcccataaaggatatggggacattcaaatcggtatgtatgacaggccagcccgaaccgagcaaagaatcgggcagtccgagactgataaaggcgatataaatgagggcaagcaatagggaatacatttttatatctccgaaggatatgtttatcgtcggcacggacggaaagcatctttgatactttttcgtttatgccgtgttttattatatcacgcaaaaatttttaatgccagcatttcagacggaaaacaataaaatatatccgtaaatataaatttattttcgacgttataataataaaaaggactttgaataatcaaagtccttttgttcgcaagcgaatttaatcggaatgtttttcgaggttgataaacgtttttgccatttcgattttgttgagccgatattcgaggaaactttgacggcggcgttccttttcctgtgccatcgccgtttcacggcgtttgatcgcttcatccaatttttcttcccatgcgaggaagtcgctctgtaaaacgattctgtccgaatagacggccaacattccttcgcccgtcgcgaaggtttttgtttctccttccgcttccgtcaatgcagccatgctcgtcgtgatattgataaacatgggcatatgtccgggtaagagcgtaatttttccgtcgggctccgacacggtcagggatacgacgtccccttcataaaattgtttgtcggggcggagcatttgcagacggaagctcttttttgtttcgccgttcatgcctgataccccgcgatgtcggcgagcccgccgataaagtaaaattcactttcgggaatatcgtcgcactttccgtcgagaatggcgttgcaatcgtctatggtagtcgaaaggggaacatacttcccgggaattcccgtatagacgctggcgaccgcaaaaggctgggagaaaaatctctgcaactttctcgcgcggtagacgaggagtttatcgtccgcgttgagttcgtccatacccaaaatagcgataatgtcctgcaattccttatagcgctgtaaggtttcgattactcgttttgcggtggcgtaatgtttttctcccacgatggagggttccaagatacggctggtggattccaacgggtctaccgcggggtaaatgccttcctccacgacctttcgggaaaggacggtggtggcatcgagatggctgaaaatcgtcgcgggtgcagggtcggtcaaatcgtccgcaggcacgtaaatcgcttgtatggaggtaatggaaccgtgcttggtggaggtaatgcgctcttccagctgtccgagctctcccgccaaagtcggctgataaccgacggcggagggcattcttccgagcagagcggatacttccgaacctgcctgcacatagcggaagatgttatcgataaagagcaaaacgtcctgattttgcacgtcgcggaagtgttccgccatggtaagccccgtgaaagcggctctcattctggcgccgggagattcgttcatttgtccgaatacaagagcggtgtttttcaaaacgcccgaggcggtcatttcttccgccatttcaaagccttcgcggctgcgttccccgacgccgataaataccgagcgcccgttgtgatgcgtcgcgattcccgaaatcaattcctgaattaaaacggttttgccgacgcccgcgcctccgaacagcccgattttacctccctttgcatagggagtgagaaggtcgatgaccttgattcccgtttcaaaaatttccgtgacggggctctgttccgtgagagagggggctttgcggtaaatggaggaaacaggtccgtccaagggccccttgtcgtccacgggcttgccgagcgcattgagtacccgtcccgttacctgttctcccacgggcacggtaatgctggaccccgtagattttacttccaaaccgcgggaaagtccgtctgtcgcttcgagggcgatacagcggcagataccgtcgggtagatgcgccagcacttcgaggtctaccgttctgtcgccgtcgaggacgagcagaagctcgttttgattggggagatgattgtcgaattttacgtctacgactgagccgataatctgcaccacttttcccgtatgtgttttattcataagaatacgcctccgctgtcagtttcggaaagccgacgcgctcgcatctatgagctcgttcgtaatgctttcctgcctttcgtgattgtattgcgccgtaagctcggccaagagttcctcgccgttttccgtcgattgccgcatcgaagtcatgcgcttgaaatgaatggccatcgcgctgtccgccaaagcgctgtaaatttccgccatcaggtattgggaaagaaaattatccagtgccgcccgcgtgttgggttccaacacgggacagacggtcgaaatttcgtgttcgggcaggggaatgggaatcagtcttttcgccgtcggctcctgtgtagaaggggacggcgtgcgcgtatagacgatgtaaacttccttatactctccgctgcggaacatattcacgatatcgtttgcgacggaaatcgcgtcgaaagcatggggctccgaggccatgtgaatgtagaagttgctcaaagggaagccctttttctcgtaatgctcccgcgtttcctgtccgagcgcgaaaattttcgagacttcatgttccgccgcaaatttgtcggcaaagtctaaaatacgatggttgaaatcaccgcataatcccttgtcgcccgcgacgacgaagagggcggtttttccgcttttgtgctcgcggaggaaagggtgttcccgcacggattcgtgcgccgcggcggcggacagaatatttctcaattcttttaagtaacgatagctgttttcgcatttttcgcgggcgcggtagagcttcgacgtggcaatcatctgcattgctcgtgtaatcttgattgtatcctccacgcccgaaatatgccgtttcagctcatgcgtgttgttcatgcgttcaccttattctgctcggcgcttatttcttccgaaatatggattatgtttgctttataagaaacgagatactccttgatgagcgcctcgtcttcgtccgaaagctgctccgtctcctcgatacgtgcgggaagatcggggtgattggcattcagataatcgatgaatccgtccatggcagcgttaacgtcgcgcactgcaatatcggaaaacaaatcgttcatcatgaccgtaagcgcgatgaccgtatggctcatggcggcgggagaggcttgtttctgtttgagaatttccgtcaggcgcgcaccctttccgagaatggatttggtcgaattgtccaattccgcgccgaattgactgaattgcgccatttcgcggtagtgcgcgaggtcgagacgaacctttccgctcacctttttcatcgctttgcattgtgcggcgccgcctacacgggagacggaaagtccgacgttgacggcgggacgcacgcccgaacggaacagctcgctttcgagataaatctgtccgtccgtaatggaaatgacgttcgtggggatataggcggagatgtctcccgcgagagtctcgatgatcggcagagcggtcagagagccgccgcccaacttttcggagagtttcgcgctccgttcgagaagtcgcgaatggatatagaatacgtctccgggataagcctcgcggcccgaagggcgcttcaagagcagggaaatggtccggtaagccacggcatgcttggataaatcgtcatagacgatcaaaacgtcctttccgttgtgcataaattcttcggcaatcgcggttcccgtatagggggcgatgtattggaggggagccgattcgctcgcggtcgaacagacgacgacggtataatcgagcgcgtcatgatttttgagcgtctgcaaaacactgttgacggaagaagtcttctgtcctatggcgacataaacgcagataacgtcttttcccttctgattgatgatggtatcgacggcgatggctgtctttcccgtctgcctgtctccgataatgagttcgcgctgtccttttccgatggggatcatgctgtcgattgcttttatacccgtttgaaggggctcgttgacgtttgcgcggtcgaaaatggcgggggcgggagcttccaccgaacgagtctttgaagtgacgatggacttaccgccgtcgaggggaagtcccaaaggattgacgaccctcccgaggagtgcgtctcccacaggcacgcctacgattttccccgtcgaatagacgatatcgccctcgcccagctcataggaatcggtcaaaagaatcgcgccgacctttccttcttcgagattcatgacgagcgcatatttatcctgaccgacggagaggagttcgccgtttttgacgtgcggcagaccttctatggtgagcacgccgtctccgcaggccacgattcgccccgcgtcggatacacgactcgaaaaatcgaacgcccatacttgttttttcagttcctcggcgatattgccgcaaagattaatcgtgtccatggataagcctttcctttatactttccagtttggtttttaccgaaccgtcatagaccgtcctgtgtccgtgtttgggatttttctcccgttcggcgtgcgaatcgtatacggtttttccgtcgaatacgagaagaccgccgatcagggaatcgtcgatgagatattccgcgaggattccgtgaccgtactttttacggaaagtctcttctatccgctgtttttgcgcggcggtcaattcgacggaagaaacgatggtgatctttgtgaatgcactctcgtttttgccgtcggaaacgaccagattttcctgtaaatttttatccgtaccgtattcgatgacggctcccgtcccgtaacgttcggcgaaaaaagaatcgagcttctgtttttccgaaggcgtgacgggtttcggagtcagtatggtaaatttagtcatcgtcgttctcccattctttcagacaattgtcgataagttggtcgttttcttctttggaaatctcttttttgagaatttcggaagcgatgagtacggcgacttccgcgacctcgcccttcatggaggacattgcctttgccttttcgtttttcgcctcgtcctctgcctctttcacgattttttcggcgcgaacgcgggcttccgtcaatgtcttttccgcggcgacggcggtctgtttttccatttctttctttttctcggcgatttcctgttccgccgtaccgatgagagcagtatatttaactttggtggattcggcttcctgcatttttgcgttgtgttcgttttcctgtttttccacttcttcccgacgggcatgtacgaagcgaatgacaggtttgtaaacgagcaaacctatgccgccgaccaatatgagaaagttgaggagatgaaggagaaagtccgtcaaatccaacccgagaatagaagcaagtaaactttcagtcatagcctgcctcgcttatccgagaacgaaaatgacgagaatggcgacgaccagcgcgtaaatgacgcacgtttcgaggaacacgagaccgagaatgagggtcttggaaattttcttttccgattccggctgacgcgcgatgccttcgagggccttggcgattgcgatccccataccgatagccgccgcacctgcgacgagaatggcgatagccgccgcaaccgcttttgctcccgtatctgtcatagccaataatgccaaagtattcataagtatcttctccttgtattaagtattatttttgattttatgtttgaggcgtttgaaaatttgacctctgttttccgtttaatttttttgttttatatttggaatgtttttgttacgcatttgttttttagtattcaggcttcttttacttcggaggaggcctttttgttgcgttcgcgtttctttttggttttcagagcagacccgtctaattccctcggttccgtcgcttcgccgtagaacattgcggtcaggagcgtatagacataggactgaatcactgcatggaacagggtaaacacgacgccgacaaggacggggactccgatggaaaggacgatataatgatatacgagggcggtaatcaatagtccgccgatcatactgccgaacaatcggaagctcatggaaaggagcagggagaagtctttgaggacgcttcccgcgccgcggagcttattgaatttgatgccgccgaaaagcataatggaataggacgtgacggcgagcgcgatacaggcgttcaaatcgacgagaatagcccgtatgcccaaaatctcgcagagggtgcccaagccgatgtatacccaacagccgaacgagaaagtcgctataaaggtataactgtgcgggctgttgtctttggcgattccctccaccatttcgcaggccttttcaatcagggcctgaaacgttccgggaacctttttgaatctcgggaagatgataaatcggaaaatgagtccgaaggccaatactaaaagggtaaggaaaaaggccgtgcggaaactcggatttaccatgagatgttcaccgaacagatttccgaaaaggggaacattttcgggaagcagttcttccttcatgatgtcgcccacatctcccgccaaaagcgaagttaagttcataaaacctccttttccgttccgtccgagcgcctcttattgtttcgccgtccgaggaaaattcccagaccgagaagcgcgaagagcgcggaaacggacagaatcgcatattgtttcgcccaaacggtgaggaaatatcccgccgtgacgcccgcgataaagagggcgatgagcaagatataatatcccgcttttttcagcgaaagtttgtctttgtcggcggccgcggtaaagagatgaccgctcaacagccgcaggttattggtacagaagaccgtagagagcgccacgccgttcatatcgcggaaggcatgatactgtaatgccgcaacggaagaaatcaaggcattgggaagcaacgcgggaaaggtgacggggataaatcccaccgccgtcaaaatggcggtctcagtcgccagaatggcgctttgataaagaaatcgtccttcctctgagccgatgccctttttttcagcgcgtttcttcgccgctcggtaggtgatgtcacccacgatattggccaagacgaaaaacgctaccggaatgagatatctgagcgctcttatgccttcgccgccgcagattcccaacgtcatgagaataagattccccgtctgcgcgttacagaacacgcccccgcgggctacataggtgtaagcgtcgaaaaatccgcccgcaaagccca

SEQ ID NO: 4341 - DNA, 2098 bp, Unknown
  16S sequences of unknown bacteria
gctgaggccaatataaaggctgatgtggcagcgtcaaaagcagtacttgaagcagggcttccccttaccctcattggtctggatgtaaccaggaaaacactgcttacatgggaggaaatccaagattgaaaatgagaaatagagggtatccattaccttgagtacacgacaaataagccatcttgcggtggctgctttaaaaattgaatattgagtatgttaaggttatgcagttgctgacttaatcctataaccttgatttcttgctatgatgagagcctgttctaccgtgatttcacaatcaatgggtggtaaatctgattttcggtaaagttccgcattatagttttctccattcttcaacatgtggtataatgcagtcagaagcattcttgctacagcaatgattgctttcttgtgaccgcgacgctttttgagacggagatagcggttacgaatttcagggtgctttttgcttttgacaacagcgttggcacattgtaccaaaagcggtttgatatagcatccggctttggaaacccggacagattttttcttccctgcactttcattgttggtcggcgttaagccagcccatgagcataagtgtttcgccgaaggaaaagcctccatattggtaccaatttcggaaatgattccgatagcagtgaaaccactgctgataccaggagcggtttgaagaatggcaagttcctgctgatagggagcggcgagcgcaagaatgagttcttcaagctctgctttccgggattcaaggctttcataatgagctttgattaccttaagtttccccgcctgttccggagtgatatagccgtcaatggcgtcacggagttcaggaagcttcttttttaaacttctgtaaacaaaaggttcaaggtcaaaggaagtatcttcagggttttctaaaatcttatccagtattgcctgagcagatttgccgaaggtgtccgagacaacgtttcccaactggatattggaaaccgtgagacagttctgcaaacgattcttttcgcttgattgaaagcaggtcagtttgaaacggtagcgcataaggtcacgaagctggcggatgtcagcgggcggcatgaagcttccggcaacaagatcgtgcttaaacaggtcagcaatccatttggcatctttcttgtcagttttctttccacggatagccttaacatatttgggatgggcaaggacgatcgaacaatcattttccaaaatgttgtaaatgggaatccagtatttaccagtggactccatacagacgtctttgcaattccgtttgagaagccattgtaacaaatctttcagaccgctcgtgtaggtcgaaaaacggtggcgctcataagtggtaatgcctttgctgttggtagaagcaatgcaggccactacaaaagtcttgtggacatcaatgccacagcagattttgtacacgatttttaaagccatagggactcctttcagaaccgtaaggttcgctaaagatgatagggaaagacggcattgactgaacgtctaagccataaacgagattgtttatacaaagataagattacgtgctcaaagtcacacttatttgtgcttgaaaagacggactacacatataaacatacggtcatccggcaagccggacagcccactcacctccccgtgatttgtagtataccgagttccctacaaaaaaattataacgaaaaaaataagcccaggcaaaccattttcatgacgttttgtgcctgagcgaagcgaaaggaatggatataaacatgaaattttatatttgcagtcattgcggcaatattattgcgtacgtaaagagcagcggggtaccggttatgtgctgcggtgaaaaaatgcaggagctggttgccaacacaacggatgcggcagttgagaagcatgttccggtggttacggtggacggacagaaggttacggttaccgttggggcggcagagcatcccatggcatcggagcactatatccagtggattgcccttgccaccgcacagggcaaccagagaaaggaactgaagccgggccagaagccccaggcagaattcatgatctgtct

SEQ ID NO: 4342 - DNA, 2019 bp, Unknown
  16S sequences of unknown bacteria
gcctcctttgccccgccggacgggctggccgctttcggcggtgtgttattttattatacacatggtaatttatataatgtaaaaaacgaactggatacacttgctgatgcggcacgtgcacgcggtgcggacgcagcgctttatggacatacccactgtgctggctgcgaggagcggagcggtgtggtgcttttcaaccccggcgcgctttcccgggtgcaggggcgcggcagctatggtgtggtcatggtggaaaacggcgcgccgcgttttgagcacagacgggtttgatacgcgcctgtcccgagataaaggagagcggcaactgtaaaaaccgccgcccgcgcagccctcataagagggaatccgcgggcggcggttttttgattgttccgtaatgcttacccggttggacgcgggacggcatgcaaggcctgaaaaaacgacctcgatgaccgtggcgggatgtacgatcagagcagatagcgaaaaatttcatcccgctgctcgtattcacacagcacagaaaggccgaagcagaatacacgctgtgcttccgacaacgggcttggcagcggcgcgtcctccaatgcacagcgcgccagcgcatcccgctgggccggggtgagcagagcttccgcttcctcaaacgtcatagccatatatgctcatcctttccggcagcgttcagtcggcgaacagcggtgtggaaagatagcggtcgccggtgtcgggcagcagtgccacgatggtcttgcccgcgttttccggccgtttggccagctgaatggcggtccagacagccgcgcccgaggagatgcccaccagcacgccctccagacggcccaccagacggcctgcggaaaaggcgtcctcattctccacgggtatgacctcgtcataaatatgagtgtccagaacttcgggcacaaaacctgcgccgatgccctggatcttgtgcggcccggctgtgcccttgctcagcaccggagaggccgcaggctccacggctattacgcggatggcagggtcctgcgccttgagataagcgcccacgccggtgacggtgccgcccgtgcccacgcctgcgataaagatatcgaccttgccgtcggtatcggcccaaatttccggccccgtggtggctttgtgtacagcggggttggccgggttgacgaactgcccggggataaaactgtccggaatctctttggccagatcttccgccttggcgatggcgcctttcatgcccaacgcaccctcggtgagcaccagctctgcaccgtaagccttcatcagctggcggcgctcaacgctcatggtgtcaggcatgacgatgatgattcggtaaccccgcgcggctgccacagaggcaaggccgatgccggtgttgccggaggtgggttcgataatgacggaaccgggcttcagcaggccgcgggcttccccgtcgtcgatcatggctttggcgatgcggtctttcacggaaccggccgggttaaaatattccagcttggcaaggatgcgggccttcagcctgtgttcccgttcaatgtgggacagctccaacagcggtgttgccccgatcagctggtcagcggatgtatagatacggctcataaaaatttcctccctgaatgatgtgcttgtatgttccggcaaagccgggcggaaagggctgtcagcaacagcgccagcacaggcacagccgccccggcggctgtgtgcggaaaggatctgaggtgtgaggcttcataaataccaacctttcagataggtttatagggattataacccgaaccggtccgcttgtcaaggagaaagcaggaagtttttgccgaggtctgcagttgaattcctattaacccaacagtataataggtttatatgtggaaatctaaaaaatagcttttggtgggtcttggactatatgggcagtcctcggccattgagataagttttttattgcagagaaataaaaaaaacagggtttgaacttttgctatcgaaaagttttaa

SEQ ID NO: 4343 - DNA, 28441 bp, Unknown
  16S sequences of unknown bacteria
agcgccaccttgccaaggtggaggtagcgagttcgagcctcgtaacccgctccatacaaaaatccctttgttacatcgcaaagggattttttattttgtcagggggaattcctatgaaactgttcaaacaattaaccatcgtattcctcatctgcatggcgggtgaagtggtagcggcctatctgcccttcccgtttccggctgctgtggctgcactgctgatcatgctgggactgttcatctccggtgtgctcaagccccagagtgtccaggatgtggcggaatacctgctcgcaaacatggcattcctgtttgtgccgtccggtgtggcaatcctggatgagtatgcctccatccagggcagtgtggtacagctgctgatcattatggtcgtatcgctgattatcaccttcacggtcactgcctataccgtcaccggcgtcatcaagctcatggaacgtggaaagaaggaggaacgcgcatgatcaacattatcctgcagagcgccctgttcggcctcaccctgaccttcggcgtctatcttctcatgtcggtgctcaaccggcgcaccggctcgccgctcctcaatcctgtgctgctcaccatcattgccattgtggcagtgctgctggtgttcgatattcccctccaggactatctgaacggcgccaacatcatcaccatgatgcttacacccaccactgcgctgctggcttattccatctataagcagctccccctgctgaagaaatacttcctgcccatcgttctgggctgcctggcaggatctgccgcttccatgaccagtgtctatctgctctgccgcctgatggggctcagcgataccctgacctataccatgatccccaagtcggtcaccactcccatcgccatggaactgagtgcccagctgggcggtatcccgtcggtgactgtggctgtggtcgtgctcaccggtatcttcggcaatatcctggctccgatcctcatcaaggtgctgcgcatcaagaaccgcattgctgccggtgtgggcatcggctgctgcagccatgcgggcggcacctccaaggccatggagatcggcgatgtggaaggcgccatgagcggcgtatccatcggcattgccggcatcatcaccgttgtgctggcaatgttcgtgccccactgatccctataaccgcattcagttaaaaacccccggattccctgttgggaatgccgggggttttgttatttgcgcagaaggacgatggtaatgccgctgttgccccgggcataatccgggtcccgggtcagctcccagtttttcgcgagagcctgccggcagagctccgaaaagggtccgaattcctccccggggataaatccgaggatctgtccctcctcctggagctgcaggagggtagtccgggtgtcccgccggatgctgccgcccacaccatgggaaccatagccgtggatcagcttgacctcccgatgaccggaggcccgggcattttccagtccgctgagcagcagcctgcgggcagtcaggcggtcagggcgtccctgttccagattgagtatacgcatgggggccacctcacagtgccgcaaaggctgcgaaaatgcccagaagcagcccggacactgccgatggaatccagacggtgccgaggatcagccgcagcagacgggccagcagcagatccacagccagggcgccgatgagcaggatcacggtgtagaagccggtgaatccgaaggcgggaattgccaggaaggccagacccgcatagggcaggaagggcagcagttccaggcagagccgcagcggaagcgggaatttgcactgatccagcagcatggcatcgtagagccatccggcggtgcccagggcggcggcgatgccgcagagcaggaaggccgggaacctgtccagggaaaagcgcagggtatagaggccgctgaagtggagcatcagggagatgagcagcacagcggcaaaggagcccagcccggtgaggacacgccggaggttgggtttggcggcggagaaggagagggagccggtgacaccgggcattttccccaggcggatcagcagcagggagaagagccccagacagccgaagtagccgcagaacagagcggggataggcgccagaccgggcagcgggataaagaggaagatcagggcggggatcagcagcagagccagggcaggcagacagctcagcgtcttgagcactgaataccgcaccggagaggtcacctggagggtgagcagggaatagcccacatccagcatctcctccgaaagcagccgatcaagcattaccagcaggagcagcagtccgccgattcccagcgcccagcttgccaggcgcagcaggctgccggcaccgggatcgcccatccggacgccggcggagtcctcataccagtcggataccgccttgagggtgtcgtccgagaaggtctggtaggcgtccagggaagcggataccacccgcagccggtagttcccgctctgggaggtgtaggagaggccattgggggcaatcttctccccggacaggtggttgtagatctcagccaggcgctgggaggtgggagcctgatcgctggaagtgcccagcagcatcaccggcgactggatggagagcccttccggatcatagtcgccggagggggagaggatcaccgtgctggcaatggaatcggagctgtccagcagacccagggcattttcccagctcttgccgtaggtgaacagcagggtcgccgactccgaacggtccgcgaacttccgcaccggctcgaggtcatcggtctggcgcaggatatgggaggtgccgccgctcttgcgggtcatgcgcaccaggggatcgagccggttcagcggcaccgattcatctgccagaatcaccagggtgtagtcgctgccgccatcgcaggtgagcaccggggtttcggtgccgggaaggacaccggatttcagcggcggccgcaggaagatccccagtcccaccgaaacagccagacaggccccagccagaaacagcagggcattacgaacggttttttgcatagaacattcactcccgtgaacacatattttcttggaattttcccacatcggggacagacggttccgaatccctttcacactgccgggtcagccggacagcggcaaagggcggctgctccgaagcaccggaacatctctcggaaccggcctcaaaaaacaggtataataacggttctgtggttattatatcacaaatccccggattttctgttgcggtaatatgaatagcggagcggcagacgggaaaagttttgtttgacaagggctgaaactggcgatatgatttacctgagaatgcgccgcatccctggagagaggcgagcggcagcaaatggaggaactgaaaatggtattgacagttgatattggcaacacaaatattgtattgggcgtatttgaccaggacgagctggtctttaccgcccgggtatccaccgacaagaaccgcactgcggacgagtattcggtgctgatccatggcatttttgagatcaacgggtttgacctgtcccggttcgacggcattatcctgtcgtcggtggtgccgcagctcaactcggtggtggcctatgcgctgggccggttcacatcggtgcgcatccgcactgtgggcccgggactccgcaccggcttccgcattctggcagacgatcccaccgagctgggatcggatatggtctgcaatgtggcaggcgccctcagcgagttcgaaggcccgctgaccatcgtggacttcggtactgccacaacctttactgtggtcaatgcccagtcggatatctgcggcgtcatcattgcgccgggcatgcgcatctcggcagaggcgctcaccggcggcaccgcccagcttccgcccatcccgctggacggcgaggtcaaggtgttcgggcgcaacactgtggaatgcatgcggtcgggcattgtgggcggcacagcggcgatggtggacggcatgctggcccggatcgaagaggaactgggtacaccggtgaagctgatcgtcaccggaggaatttcggaactgctggtaccgcagatccgccacgagctggtgcaccgtcccaacctgctggtacagggattgtacagcctctacaagcgcaacacccgttcggaacggtaaaaatgaatcttttttgaaattatctgaaggcacatcctgcaagaacgaagagttccggcagggtgtgccttttcgcatcctgtacaaaaccaggggagaaaattcatgcggaacggcggaaatgtatttgatctaaatacatttgtatgcaaattttgaacatttcaagttgaaataactggtttctgtttgtgaataactgataaattcatcattgtgacaaagaaatttcatattttcgcttgcaaaagtgcgggagatgaactataatcaattttaacatttcgccacagtaaaaattcaaaaatgcggcggaaaattttataaggagatgagtaagatgtcgctaagcgcaatcatgaacagcaccactctgtacatagcggtaatcgtcggcctgctgctgatcttcctgctctgtgcagtgatgctcaaaatggcctggggcagatgtattgagttgggtatttcccaggaaaagattaagggtgtcatcaagtcatccgtcatcttctcgattgttccgtcgctttctattgtgatcggcctgttttctctggctgccgttctgggtgtgccgtggccctggttccgtctgtcggttgtaggttctgtcagctatgagctgatggctgccgatatggtggccaccggtgccggctatgagtccatcggcgctctggcagccgccaacgatgcttcgcaggcgggcgcgattatgttcgtaatgagtatcggcatcatgttcggtatcgtaacctgtaccttcttcggcaagaagatccagaccagtatgaccagcttccgtgaaaagaacggcgcctggggtgctctggctactggatgcttcactctggcactgatggttgtattcctgcctgtacaggtattcaagggccccatctatatgctgaccctggctgtatccgctctggttacatatctgcacggcgttattatcaaaaagaccggctggacctggctttccaactttgtgctggcggattcgctggtactggcaatggttgcctcggtattctttgccaatctgcttgcgtaagggggtaagttgacgatgaaagatatgaagtattcggataaaatccatctggtcggacgggccggctcggttatgtcgctctgcattatgctgggaatccccgctctgatctgtgcggtctatgatatctggcccacctttggtgaagtaatgtccattggttccggtctgctggcaatctttgtgcccactgccatttcggaagtattcagctatactcccattctgggctcggcctgctacattgccttcatcaccggcaacgtcctgaacctcaagctcccctgcgctgtttccgcaatggaactggctgatgtggcccagggttcggaggaaggcgatgccatttccaccgttgccattgccgcctcttccatgcttaccatggtggtaattgcactgggcgttgtactgctggttcccctgcagcccattctgcagcagcccgctgtacagactgccaccacctatatgctcccggctctgttcggcagcatgttcttcggtatgatcaccagcaagagcgccggtgagtacatcatccacggcaaactcaaggctgtggtactgccgctgatcgtcatcatcctggtgaacttctttgtaactcccatcgccggaaaggaaggctacgccatgctcggcgctatcccgctgaccatcctgtgcgcttacttcctgtacaagaagggtgccatcaaggtggaacttgccaggaaaaaggtggaagctgctgcagttcccaccgctgacggggatatgatccatggcgatgatgtccaggagaatctgtaactgccaatccataccttttcagataaaaacagcaccggattattccggtgctgtttttctatactcccatgccggctttgggggagagtatgcgggcgctacactggcgggccgcctgggccgcacagtatttgtacagggctacaaaccggccccgggctcctggtttccagggcttgagccgcccgcagaagtgcagaatggcggtgtgctgcatcacccagtccatatccttttccccggcactgagcagacgataggcgtcatactggcgggcatcgtagttgtagagggtgtcatccagcggaagaatccgggagccatacagggcgttgagaatatcctggtccgggaggatcagctcgttggcgtgttcccgggtccaggcgaagatttcagcggggtccagttcccggcgctgggctgccagatccatcaccagcacgcctgaattgaagtacccggcgtcgtcatcgctgtgcaggcgcacccggttgaccggcgccgagatctgtgccaggccggaatgaatggctgccgcgaacagattcccctcaagggggagatccagcagcggggaaacggggttgaggatcagaatatccgggtcaaggtagagcaccttgtccaccgaatccggcaggatgcggctggcaagcagacggtagtacatggccttggtatagtggcggaacaccggagcgtccgcaaagagctcctcgccggcctcacaggggcagaagtcccagccgaagccatcgcagtaggagcggacagtttccagcgcatcggggtgcatgcgggaatggatcagccagagggtgacaggggtatccggttctgcctgatgcagggaccagagcatagtgcggagcgggtcgaggtagttttcatccaatgtgacgaggatattcataaaacgggattctcctttatttttggaaataactgctatgcaacattttaaggcagaaaaggggagccttcaagcagcattttggaaatgttcttttaagagtttcggcgatttatgaatagtttttgaattcccggggaagttatgcagaatcccggcggcggaaaaaggcggtgagcggctgtttttgggcaaaataaatatcccccggcagcagccaggggataccgatacttatttaatatggaggattattcctgagccgccagaagctcatccaccatctcggtgagagcatccaggtcacgggtgccctctacgatcttcaggatcttgccctcactgttcaggaacagggtggtgggggtgccggtgatgtcgtagagcaggctgtcgtccagtacggtgtcgggcagcaggttcacataggtgacgccagttgcggacaggatctccttggcctctgccttcttctcctcgtcgtcaaagacatcagctaccaggccgactacctgcacgcccttgtccttgtagttctgggacagggtctccaggtcgggcatctcgttgacgcagggggtgcagtaggttgcccagacattgagcacggtcagtttggcttcagacaggatcgagctgtccacggcattgccatccaggtcggtggtggagaagcctgtgacgactgcgccttcctccacgccctgggcagtgctctcaatgggggtgtacagcaccagattggaagccagttcgggcagggagtccttcatggcctgcagatcagcggcgtcctcttcactgaggctctcgggagagaggttgtcattgctcagatagaagctgtttccgcccagctctccgatgagctcattgttctcaaatccggtgcagtccgccaggttgttttcacccagggtatctgccttgatgctggtgatggcacacaggttgcccgcctgttccgacagggtcaggtattcctcttcgctcatggcctcaccggtgctctggagttccaggacccggtcatacactgcgccgctctgatagaggaacagcacctgtccattgacagtgacgccctccggggcagcaggactattggcggtggggaagacctgttcgcccagacggtcatagatggcgtcgggcagttccactgccatgcccagatagtccacaacgatggcgtgatcggagatgtcctcgggtttttccacgatggtctcctggggttcagaattgcaggcagccagcgagagcatcagggcacagctggtcaggacagcaaaggcttttttgagaagggtcatagattttagttgctcctatttgttcttggtgtagaaaatgccgatggaatccgggcccgactgtgtggacatggttcccagcatggggtagatatagtacttgaggttgtgataccgctcgcggatcttttccacgattgccatggccttttccggacagccggcatggctgacatacagttccgaatccggagtgcagtcctcccagaagaagtgggccagcttggaaaggccgttctggtagcccatggcgttggcgggaatggaaccctcgccattcttgatggcaacgatgggcttgatgcgcagcttggcagcgataccgcccttgagcggggaaacacgaccgcccttgatgaggaattccaggttgtcaatgaggtaataggtgcgcaccttttcccggaccgcatagagctcatcgaggatggtgcggatgccggcgccggcctccagcagatggtttgccaggcgcagttccatcaccatgttgagcgaacagctccaggaatccaccacatggatctgcattgtagattcgggatggcgctccttgaacatttcactggcaagcacagcactgttgtaagtgccggaaccatgtaccgacatggtgatgcagatgatgtggtcatacccttcgtcagcgaagcgctcataccgggtgagaaaatcctcggggctgggctgggaagtggtagggatctccttgcaggttttcagatattcactgtactcctgaatgttgaaatcatgataatccagaaccgggactccatcaattacccggtaaaggggaacgacctcggcatccagcgcgtcagctacttcgggggggatatcggaaccggagtcgatcataaacttaatgcgatccataactcaatcctcacttattatatttttacctacatcatagcatttattgcgggggtttacaatgtaaaatccggtgaatccgtccgtgaaatgccgggggtgtcatattttggggatttttgtccggcgcaggcaacacattgtttgagagttatacacagaattgtcacaaatattatctatattcactaaaaatgaccaaggaaatcctctgaaaaatcaatggattgtataatttttttatgttacaatctatatgaaatggaaaagcggctccctggaaaaaacaaagccgtatcgggactccttttagaatcaaacccctgtccccggggacagaacgaattgcgaaaggaatgtgacagctatgaaactgaccgaacttgaacgcatccatgtaggctatctggatacacctctggagtatatgcccaatctgaccaaggaactgggcaagggcaaactgtatgtcaagcgggacgatatgaccggcctggctttcggcggcaacaaggccagaaagctggattatctggtgaaggatgccctggatcacggctataatgccctgatgaccttcggcggtgtccagaccaaccacggtcgtatgaccgtagctgcggcagtccgttacaatatgaagccgatcctggtgctgaccggtccgaagccggattactgctcgggcaacctgatccttgaccgcatgatgggtgcggatgtgcacttcatcgataccaccgcctatgccgacctgcctgagccggaaaagagcgaaaagaccgccgccttcctggcccaggagaccgagaagatcgtggctgaatacgaaaagcagggcatccatccttataatgtaccggtgggcggaagcagcctggtgggtgcagccggttatatcaacgccatccccgagatcatgaagcagatgaaggaacagggcatcgaggccaagtacctggtctgcggctacggctcgatgggtaccttcggcggtctgctggctggcgccaagtacttcaaggctccctttgaggtgatcggcatcccggtaagccccgcttaccgcagccccgaacaggttgccgagttcatcgacaagctgtccgcggaatatgagctgggcatccatgtcacacccgaggaagtgcgcattgaaaccggcactcccgaagagccctactatggcatcgcctacaatgtgcccgatcccgtgacccagcagtacatggctctgctggcccgcaccgaaggcctgttcaccgacccctgctacaccggcaagatcttccacggctttgtggacctggtgcgcagcggcaagatccccgagggcgaaaacgccatcttcctgcactcgggcggtacaccggcaatctggagcaaggagcatctggatgcggctcaggagatcttctatgacggcgaaggcctgttcgtacacaaggcataagacactgaaatttcccggaactctctctccggtcaataaaaaaatatgggacccgtttttcgggtcccatattttttgcgttttcagccccgacggcgggaatacaggcggatttggcgcaggggttccggaatcctgcattccgcacaggccggggcaggggagtgcccggctgaaagttttccttcgtatgaagccgggacggatttccatgcagaactactcctccatcagtttggcctgatattcccgggaaagggccatcatctggcggatcagccgctcatagtagcctgccagggcgggatcactgagccgggcggtgttctttgccaccaccgcctcctcccgggaggcgtccaggatggggagcccggctgccttcttcactgccatgacctccgccaccacctgcatccgctcctcgaaaagctgtaccatctgctgatcgatccggtcgatctccacccggagttcctccagtgtacgcatataaaaatcctccttattctgtgaatcacccgagctgtccccatccggggaggctctgtccctgttccggtgcccggcagtccggttcgccggtgtctgccaggaccccaggcgggacagcggtcgggttctctccaatggaccgctttgcggtcattatagcatatttcagcggatttcggaacagcattccgcaggtttatgcaggtgtccggtgaatttcctgcacgattttgggaaatttgcaatgattgtattgatttttgacgggggatatattatcatcaagatgaattattgtgacacggattttgcaaaaccggtcaaaaatatagaaagtgatgaaaaggagggatcactgtggcaaaggatctgctgcacagcatctcagaggggatgtctgggttttcaaagggacagaagctcattgcccggtacatcatcgaaaattacgacaaggccgcctttatgactgcttccaagctgggcaatactgtgggcgtgagtgaatccaccgtcgtgcgctttgccaccgaggttgggttcgagggctatccgcagctgcagcgggccctgcaggaactgatccgcaaccgtctgaccgcggtgcagcgcatggaagtcaccagcgagcagatgggcgagcatgacattctctccaaggtgctgaccatggacatcgaaaagatccgccgcaccctggaggaacagtccaacgagggctttgaagccgcggcagacagcatcatcgccgccaagaacatctatatcctgggcatccgttcctcggcagccctggcgcagttcatgagcttctacttcaatcagatcttcccgaatgtgcggctggtgaccggttccagtgccagtgagatgttcgaacagatcttccgggtgggcaaggacgatgtctttatcggcatcagcttcccccggtattccaagcgcaccgtcaaggccatcgactatgccaaggagcgtggggcaacggttatcgccatcaccgactccgccggttcgccgctggctgccaagtgcgaccatctgctgctggcccggagcgatatggcttcctttgtggattcgctggtggcgccgctgagcctgatcaatgcgctcattgtggcagtgggtatgcgccgtcagaaggaagtgggcgaaacctatgcccagctggagaagatctgggacgaatacgatgtatatgaaaagaatgaggagaatatcgtctgatgaaacgggaatatgacctggtggtgatcggcgccggagccgctggaatgctctgcgcgggaacagcggcggaagagggactttcggtgctgctgctggagaagaatcacaaggtgggccgcaagctgctcatcaccggaaaaggccgctgcaatgtcaccaacaactgtgatgaggactccttcctcaaggcggtgcggcgcaatccccggttcctgtacagtgccatcaaccggttcagtacagcggacaccatggcgttttttgaaggactcggcgtcccgctcaagactgagcgtggaaaccgggtctttccggtgagtgaccgggcggcggacattgtcgatgccctgcaccggtatgtaaagcgcagcggcgccgaactccgggagggggaggcaaaagagctgctccttgacgaaatcggggtccggggtgtaatctgtaaggatggaagcgaaatttatgcccgccgggtggctgtggcaaccggcggcgtgagctatccccagaccggctccaccggcgatggataccggtttgcaaagcaggcggggcataccgttgtgccggcagtgccgtcgctggtgcccattgtcacccgggaggactactgccgggagatgatggggctttcgctgcgcaatgtgacgctgaccgtccgcagagccggcaagaagaagccggtcttttccgagctgggtgagatgctgttcacccacttcggcgtatcgggaccgctggtgctcagcgcgtccagccacatgaccggcgatctcggggaatactccatggagatcgacctcaagcccgggcttacagtccagcagctggatgcccgtctgctccgggactttgagaagttcatcaacaaggacttttccaatgctctggacgagctgctcccccggaagctgatcccggtggcagtgcggctttcgggcattgcgccggataccaaggtcaaccagatcacccgggaggaacgggaaaaactgatttcggtcatcaaggcatttccggtgacaccggggcggttccgcccggtggaggaggccattgtcacttccggcggcgtgaaggtcagcgaagtggacccgcataccatggagtcccggctggttccggggctgtactttatcggggaagtgctggatctggacgcctataccggcggctacaaccttcagatcgccttttccaccgcccgcctggcagcacagtccatggcagagggcgagatgacacaatgggaaggatagaaaaactatgactgcgattgcaatcgacggcccggcaggagccggaaaaagcaccattgcccgggcactggcccggaagctgggctatatctatgtggacaccggagcgctgtaccgttccatcggactctactgcaccgaggcgggggttccgctggaggacaaggctgcggtgactgccgctctggagcagatccgggtggagctgcggtatgtggacggcgtgcagcgggtgctgctcaacggacgggatgtgtcggaggagatccgccgccccgaaatctcgctggcggcgtccagtgtatcggcgatggatacggtgcgggcattcctgttcgatctccagcgcaatatggctctggagcatgatgtggtgatggacggccgggatatcggcactgttgtgctgcctgatgcccaggtgaagatctatctcaccgcgtcggcagaggagcgtacccgccggcggatggccgagtatgaggccaagggactgcacgcggactttgaagagctgctccgggaggtcaatctccgggacgagcaggacaggaaccgggcggtggcgccgctgcgcaaggcagaggacgccgtggaactggacagcacctgcatgaacacggaagaagtgcttgccgccattgaaaccatcgtcaaggagagaaacgcataatgtggctgtactattttgcaaaggccatctgtatgatcgccttcaacatctggtataaactggattatcatggactggagaatatcccgtccggcggcggctatatcctgatgagcaaccaccgctcgatgatcgacccgattatcctggcggaaaaggcgcatggtcaggtgcggtatatgggcaagatggaattgttccgaaaccccattctgggctgggcgctgcgtaccatcggcaccttcccagtagaccggggcgccggcgacacctccgccatcgacaactcccgcaaggtcattgaggagggggatattctgggcattttcccggaaggacaccgctccaagaccggcgagccgctgcgtcccaagtcgggcgtggcgctggtggcacggctcactgaggcgccggtgctgccctgctcggtatactgggagggcaagctgggcttccgccggaagatcgtgatccggtacggcgagctgatcccttacgaggccatgggactcaccgagtcctcctcggcccgggagctgcgcaatgccacccagctgctgttcggcaaggtgcttgagagcattgaggtgagcaagaatgagtattgaggtagccaagactgccgggttctgttttggagtgaaccgggcggtccagatggtctatgatctgattgaggccggggagtccatctgcaccctggggccgattatccacaatccccagctggtggaggaactggcggaaaagggggtggaggccattgcttccccggaggaggcagccggacgcaaggtggtgatccgttcccatggcgtagcccagagcgtctatgatgagatcgctgccctggggctttcctgtgtggatgccacctgtccgtttgtggcgaagatccatcagatcgtagcccgggattatggccctgagggcctggtgctcatagcgggagatgtgtcccatccggaggttcaggccatttacgggcactgcaaaggcgactatgctgtggttgcggatgccgcagaattggtggaatttatggaaaaacacccaaatttacctaaaaaacgggtgattttggtggcgcaaactaccctcaatgtaaaagaatgggcaaacatcgtaaaaagcctaaaaaaagtgtgtacaaacgccgagatttttgatacaatatgtagtgcgacgatgcgtaggcagcaggaggccgagagccttgccgccaaagtggaccgcatgattgtggtcggcgggcgtcacagctccaatacgggcaaactcttcgacatctgttccaggcactgtcccactgtctgggtggaaacagcagcggaactgcgtgcggaagattttgccggtgtggatactctcggcattacggcaggagcttcaactccggcccgcataattaaggaggtacaaaaaaccatgagtgacattctgactgatgatctcagctttgaggaaatgctcaatctttccttcaaaagtacatatacaggggagaaggtaaccggcgtcgttacaagcgttgcaccgaacgaagtagcagtcgatatcggcaccaagcatgccggctacattccgctgtccgagctgacagacgatccggctgccaaggccaccgacctggtacagaagggcgacaagctggacctgattgtcctgcgcgtcaacgatgtggaaggcactgtaatgctttccaagaagcgtctcgatgccattgccggcttcgagaagattgctgaagcctgcgagagcggcgaggttctggaaggcgttgtaaccgaagtggttcgcggcggtgttctggttctcaccaatggcgtgaaggtattcattcctgcttctcaggctacccgttccagaaacgataatctcgaggatctgctcaagcagcccgttcgcttcaagatcctggaatacaaccgtcagagaagaagagctgtcggttccatccgtgccgttctcaaggatgagaagaaggccctggagaaccagttctgggagagcgttgaggttggcaaggtataccacggcaaggttaagagcctgaccgattacggtgcctttgttgatctgggcggcgttgacggcatgatccacatctccgagctgtcctggagcaagatcaagcatccctctcaggttgtcagcgttggcgacgaagtagaggtttatgtcaaggacatcgatcccgagaagaagaagatttctctgggttacaagaaggctgaggacaatccgtgggagatcctcaagaagaactacgaggttggttctgttgttgaggccaagattgtatctcttacccagttcggcgcctttgctcagatcattcccggtgtggatggcctgatccacatcagccagatctccaacgagcgcatcaacaagccttcggatgttctgaaggttggcgatgttgtcaaggtaaagatcaccgagatcgatttcgacaagaagcgtatcagtctgtccatcaaggctctgctgaatgatgaggctgaggaggctgctgacgctgaataagcgcctgtgggtctgaatcccttatatgaaacaagacagaacagtcctgctgtaagcgggattgttctgtttttttgttttccgcggaaattttcggcagtaaaactcggatttttttgcacagatatattgcagttttcggcgcaatctcctatacttttagtgtatgtcccgtccgggcagaagcataaagcagtcgctcctgtgaagaataaaactgaccctttttgcggtcagttttaattcggaaagccaaaggagaatcagaataatgaaacgatatgcggcaatgcttctcacagcggcgctggtcacctctctcacagcctgtaactgggataagaatatggattccagcagttccggggaactgtcctcatcgtcgggcagcggcatggaacgctctatgcccatgaacggcgatcagcttctggaaaaccgttccctccagtcgattattgaggatattcaggcggagtttgaaaccggcggcatctatcagcccggacaggtgaccgatacagttctttgggaccgatatgggcttaccaccgatcaggtggcggattattacggctattattccaccgcggatggatattcggataatctgctggctgtcgaagccaaacccggtcagattgactcggtgaaaaaaacactggaaaagtatcgggaagatctgatgactgccatggaaaaaagcgggattggctatgcctatgaccgtgccaagaatatgcagattatcacccggggtaattacgcctttctggtggcggtgaacagcctggaggcggattccaccacggttccgctctttgacagcgaaaacaagctggtcaccgagattatcaacaaatcctttgcctgatcagggcagggccgctgtatggcggcctacatagcaaaaattctcgagaggttttagaaagaatggttttcagcagtattctgtttctcttccggtttatgccggcagcctttgccatctactatctggttcccaagcggttcaagaatttcaccctgctcgtcctgagcctgattttctattcctggggtgaagcaaagtacttcccggtcatgatcgcatccattgtggtggactataccgcctccggtctgatcgaatcccatcggaataataagctgatctgtcggttgggactgatctattccgtagtgttcaatctcggtatgctgggattcttcaagtacaccaacttctttgtgggcaatctcaatgcgctgtttggtctcagccttcccaccattagctttgtattgccgctgggtatcagcttctataccttccagaccatgtcctataccattgatgtgtatctgggcaaggtcaaggcagaacgcaatatcatcgacttcggcgcctttgtggtgctgttcccccagctcattgccggtcccatcgtgcggtataccgacatcaaccgggagctcaaggagcggcagatcaacctgccccagatccaggacggcatcaagctgtttattctgggcctgggcagcaaggtgctcattgccaacaatgtgggcgccctctggaccgagatcgaagccatcggcgccggggaaggattcctttccatctccacaccgctggcctggatggcggtatttgcctactcgctgcagatctacttcgatttcagcggctattcccttatggccatcggcctcggcaagatgctgggcttcgaattccccaaaaacttcgacttcccctacatttcccgcagctttacggagttctggcggcgttggcacatgaccctaggctcctggttccgggagtatctgtatattcccctgggcggcaaccgcgtcagcaggccgcggctctatttcaacctctttgtggtgtgggcagccaccggcttctggcatggcgccagctggaattttatattttggggcctgttcttcttcgtctttctggtgatcgaacgcatgggctttaaacaggtcctggagcgccacagcgccttttcccatgtgtatgtaatcttcttcctgctgctgagctgggcgctctttgccgtcaccgacctcggcatgctgggggatctcttcacccggatgttcgtaccggtgggcggtgtggactggatctactacctgcgcaactatatcgtggtctttattctgggaacggtgctttcccccccggccctcaaggggctctacctgcgcctggagaagaacaatgtcttctgtctgatcttcttcggcgccatcttcctggcctccactgcctatctggtggacgccacctacaacccgttcctgtacttccggttctgatgaaggaggcctgacccatgaaacaagtaaaacaactgctccggtatccggtggtcctggtctttttcctgttcctgttcgggtacacactctttgacctgacccagacagaccgggaatattcggaatttgaaaacaaatacctggcccagaagccgcctttcaccatgaaggcgttcctgaacaacgaatggacccaggactatgaggagtacatcaacgaccagtttgtactccgggacgactggatcacactgaaatcggtctgtgagtcgatgctcctgaagatcgagaacaacggcatcgcctatggcgaggacggctatatgtttgagaagttcaccaccctttccggggaccagcgggcccagtatgaccgcaatctcggctatgcgatgaccttcctgaacaaccaccagaacgacaatgtgacctttgccattattcccaatgcctatgccatcatgcccgagaagctccccgcggggctggagcagatcgaccagctcgcgctgatccaggaggcctatgcccaggcaccggagagcgccgggatcgtggacttctccgggacgctcaccgagcacaaggatgagtatatctactaccgcaccgaccatcactggaccacactgggcgcctattatgcctatgcccagctgatgcagcagctgggacaggagccggtggcgctctccgagctggacggcaggacggtggaaaacttctatggcacctatttcagcaaggccaagaagtttgatgcccaggcggacaccatcacctattacgagatcccggacgccggtgtgaccatcgacggcaaggaacaggacggttattacgacttctcgaagtttgaggtgcgggataagtatgccgccttcctccggggcaacaacggctatactgtcatcaagagcggtgtgcgcaccgtagaggagggacaggagcccagccggattctgatcatcaaggattcctatgccaacagctttgcgcccttcctgctctacaattatgatgaggtgcacattgtggatctgcggtatctggcaggatcgctgagccagctgatcaatgagggcggctttgatgagatcctcctgatgtacaatttctccaatctggtgaccgataccaatctctacaagctgggttattaaccctcagaacaggctctttcccgatgggggagagggcctgtttttttgttttctccgacggttcgacaaaggttttgccaaagctgtgttatgctgtcaggcggagcggttatttgcatttctgcacaaaatccgaagaatttcccacaattttgcccaattaaggcaaaaccatccgaaaaaatcttggaaatagttctaatttatgcgggaaggcatttacttttaagttccaatattttataattcaaaagaaatacgcgcaaagccaaacttgaacacaggaggcagcagggaatggtactcgaaaaggtcaagacaattattgcagatacactcaactgcgaggagagcgagatcaccctcacttcgaatatcaccgaggactttggtgcagattcgctggagatggtggaactggctatggcgctggaagatgcattcggcatctccattgccgaggaggaatatgcttcgctgcgtacagtcgaggatattgtagacttcatcgaaagcaaataaaaagcaacggaaggtctgccgctttatcggcggcagaccttgtttttgtcgctttagctttgaatttcaaatattttgacgaaatcttccggccctgccggaagtggaaaggcggaatacgcatgaaacttgcagagatccgggaactgatggaaacatttgacggcatgaacatctgccgtctggaactggaggacggtgcgttctccctggtactgtccaaggagcacacccccgcacagcccccgcatcgggaagagccttcccgccgccgggagccggaactgcgtcccatgcctccggtggaggcggaagctgctgctgagctgaccccggctgtgcctgagactccggcgtctgccgtgaccgaaggggaggcagtgactgccccggtagtgggagtgttctactccgcatcggcaccgggcgcggctccctttgtgaaggtcggggatcgggtacagaagggtcagaccctctgcatcgtggaagccatgaagatgatgaacgagatcacagcggactttgacggcattgtcaccgagatcgcccccaaggacggcgacctggtggaatacggtgcaccgctctgctatctcaagagggtctgatatgttccgcagaatactgatcgccaaccgcggcgaaatcgcggtacgaatcatccgtgcctgcaaggagatgggcattgaaacagtggcggtttactccactgcagacagttcctccttgcatgtgcatctggcagatatggcggtgtgcgtcggcccggctgccagcgcccagagctatctcaatgtgcagaatatcctcagtgccgccacccgtctggggtgtgacgccatccatcccggttatggcttcctctcggaaaactccgagtttgcccggctggtggagcagtgcggcatggtgttcatcggcccggatgccgatgtcatcgacaggatgggggataaggcagccgcccgggaactgatgcagaaagccggtgtgccggtggtgcccggttccaatggcctggtgccggatgccgctgccgcccgggaaattgccgaccgcatcggctatccagtgctcatcaaggccacagccggcggcggcggacggggaatgcgccgggtctatgcccctgaggagctggaaaatgcctttgccaccgcatcggcagaggcccagtcctgcttcggggacggctcggtctatgtggaaaagctgatcctcgaccccaagcacatcgagttccagatcctggcggataagcagggtcatgtggtgcatctgggcgagcgggactgctcggtgcagcgccgcaatcagaagatgatcgaggaatccccgtcccgtgccctgaccccggaactccgggagaagatgggacaggcggcggtactggcggcaaaggccgccggttatcacagtgccggcaccattgagtttgtgctggacaaggacgggaacttctacttcattgagatgaacacccgcatccaggtggagcatcccgtcaccgagatggtgaccggcatcgacctgatcaaggagcagatccgcattgcggcgggccaggagctccccttcacccaggaggagatccatctcaccggtcatgccattgagtgccgcatcaacgccgaaaacccccgggaggacttccgtccctgtccgggacgcatcgaaggactgttcctgcccggcggcatgggtgtccgggtggattcggcagtctatcagggctatgccatcccgccttactatgattcgatggttgccaaggtcattgtccacggcgacacccgcctggaggccatccgccggatgcgccgggcgctggaggagttcatcgtggagggcgtggacaccaataccgaactgcaatatctgatcctccaccacgaggaatttgtccgaggacagtttaccacctcgtttgtggagcgacatttgagtgagctgatgagatgatggaaacaaaggatatgtttgcccggcgccgggaaaagatcgatcttttcaaggcgttccggaacaagaaggtcaccgtgcaggagaaatcagtccccgatgacctgtataccaaatgcccgtcctgcgggcagccgatcctctcccggaagtaccgggaactgctgcgggtctgcccgcactgcggcgcccatggcgtactgggtgtccgggaccggctgactgccaccgtggatgagggcagcttccgggagctgttcggcaatgtgcgctcccgggacccgctggacttccccggctatgccgagaaactctcggctctggaacagaagaccggcctgcgggaagcggtcattaccggcactgcccggatcggcggttaccgtaccgccctggctgtcatggacagccggttcatcatgggcagcatgagcagcgccgtgggagagaagatcacccggctggcggaatatgccgccaagaagaaactgccgctcattattttctgtgcctcgggcggcgcccggatgcaggaggggatctattccctgatgcagatggcaaagacttcagcagccatcgggcggctgggagaggcgggctgtctttatatcagcgtgctgaccaatcccaccaccggcggcgtgacagcatcctttgcctcgctgggagatattatcctggcagagccaaaggcactcatcgggtttgccggcccgagagtgatcgaacagaccatcaagcagaagctgcccgagggattccagcgggcggaatttctgcaggaatgcggctttgtggatgaggttgtgctccggagtgaaatgcgtggggtgctgatccgtctgctgcggctgcacagcggggaggtgcgcagaaatggctgatacacagcgcagtgcctatgagcgggtgcagctggcccgttccaaggaccggcccaatattcaggattatatcgaccacctgttcaccgacttctttgagcagcggggcgaccgtgccagcatggacgatggttccattgtgggcggtattgccatgctgggggaccgtccggtgacagtgatcggtcaccgcaagggcaaaaccctggaggagaatgtccgctgcaacttcggcatgcctcagcctgagggctaccgcaaggccatgcggctgatgcggcaggcagagaagttcggacgcccggtgatcacctttgtggacacccccggcgcctatcccggtctggaggcggagcgccacggacagggcgaggccattgcccagagcatcatgctcatgagcagcctgactgtgccggtgatcactctggtcaccggagagggcagcagcggcggcgcgctggcgatctcggttgccaacagcctctggatgctggaaaacgccgtatacagcgtgctctcgcctgaaggctttgcggcgatcctctggaaggacggcagccgggccgcagacgcagccgagctgatgaagctcaccgcccaggagctggctgcctgcggcgtggcggaccgggtgatccctgagccggaacatggctttaccggggactgcaccgccttttaccgggatctgcgggagcagctgatcgaagaggtcgagcttctcagcagccggagcggcgccgccctcagcagcgagcgatataaaaaattcagggccatcggcgactgccggtcctgagatttggaaaggattgcgatatgaagatcttggcaatgggcaaatgtgtgccccggcagatcctggacaatgaagcgctgtcccacatggtggaaaccaacgatgaatggatcaccagccgtaccggaatccggcagcggcgcatcgcaaaggatgaaactgtggtgtccatggcggcagaggcagcccggcaggccatggagcgtgccggtacccgccccgaggagatcggtctggtgctggtgtgcacctttactccggatctggcgacaccgtcggtggcctgcctggtgcagcgggaactgggactctcccaggagatcctggcctatgacctcaacgccgcctgcagcgggttcatctatggcctggtgaccgccgaggcgctgctctccggcatggagccggggaagaaggcgctgatcatcggggcagaggtgatctcccggacggtggattataccgaccggggcacctgtattctgtttggtgacggagccggagcggcagtggcagtggcttccgaggacaagctcaccgccgactggggcgcctccggagaccgggaggtactctctgccggacagctgctcccggacggcagccgcacgccgctggcgatgaacggcaaggaggtattccggtttgctgtgagcacggtgccgaagagcatcacccggctgctggaaaaggccggtgtaccgctttcggacgtggatcacatcgtctgccatcaggcaaaccaccgcattgtggagggcatcgccaagcatctgcacaccgatctctcccgtttttatgagaatatagaattttacggcaatacatcagccgccagcattcccatcgcactctgcgatatgcaggagcaggagcttctgcaccggggcgaacgcatggtgctggctggcttcggcagcgggctcacctggggttcggtgctgatgaactggtaggaggaacccctatggatattcgtgacatcatcaaaaccaaataccccatcattcagggcggtatggcaaacatcgccaccggtgagtttgcggcagccatctccaatgcgggcggcctgggactcatcgccgccggcggcatgaagcccgatcagctccgggagaacatcgaccgggcccgggaactcaccgacaagcccttcggcgtcaacatcatgctgatgcatccgcaggtggacgaactcatggagatcgtcatcgagaagaaagtcccggttgtgaccaccggcgccggcaatcccggcaagtatgttccggctctcaaggaggcgggcatcaaggtgatgccggtggtggcaagcgtggctctggcccagcgcatggagcggctgggtgtggatgccgtcatcgccgagggcaccgaatcgggcggacatgtgggcgaaatgaccaccatggcgctggtaccccaggttgtggacggcgtgtccattccggtggtggcagcgggcggcatcgccagcggacgccagatgctggcagcctatgccctgggcgcctgcggcgtccaggtgggtacctgcctgctggtatcggaggaatgcccggtacaccagaactacaagcaggcggtgctggatgcttcggacagcgataccattgtcaccggacgcatcggcggtactccggtacgggtgctcaaaaaccgtatggcacgggaatatgtccgtcaggagcgggccggcgccaccaaggaggagctggaggtctatactctgggttccctgcgcaaggccgtgtttgacggcaatgtcaaggagggttcgctgatggcaggacaggtagcgggtcagcttcatgagatccgcccggctgctgtgatcctcgaggaaatgtatatatcgttctgtcagctcaaaaaagatcttgcaaaggattgtgactgaatatgaaaattcgtgaccgagaactttcgatccccattatccagggcggtatgggcgtgggtatttccctgtccggcctggcaggcgcagtggctgcctgcggcggtatgggtgtgatctccgctgcccatcccggctaccgtgaccctgatttctatcgcgaccccttgaatgtcaaccgccgctgcctgaaggaagagatcgccaaagccaaggagatcgccaagggctgcggtctggtgggcgtgaatgtgatggtggcagtgcagcactatgcggactatgtccgggctgccattgaaggcggcgccgatgccattatctccggagcggggcttcccaccgaactgccccagattgccggggacagcaaggtgctgctggctcccatcgtctccagcggacgggctgcccgggtgatctgccgggcctgggagcggcatggaaaccgcctgcccgactttgtggtagtggagggaagccgtgccggcgggcatctgggcttctccgctgaggaactggcggacggctctgccaagccgctggatgagattgtatccgatgtggtcgaaaccctccgcccctatgaggagaagtgcggacggaagatcccggtctttccggcgggcggcgtctatgacggcgctgacattgcccggctggagaaactcggggcagcgggggcacagattgccacccggttcattgccaccgaggagtgcgacgccgcaccggcctacaagcaggccatggtggacgccaaggaagaggatgtgcggatcatcaagagcccggtgggcatgcccggacgggcgctgttcagtccgctgatccggaaggtggcggaactgggacggatcgctcccagccggtgcctgcagtgtctgcgcacctgcaaccccgccgacacgccgtactgcatcacccaggcgctcattgatgctgccaagggagactgggaaaacggactctttttctgcggcgcgaatgtgggccgtattgaccggatcaccaccgtccgggagctcatagacgagctggtgaccgaatggaggaacaaccgatgaaacttgcgtttgtatatgccggacagggcagtcagtttgcggggatggggaaggatctctatgagaactatcccgcagcccgggctgtctttgatcagttcccggcggattttgacctcaggaccacctgttttgaggacccggagggtctgctgaaccagacccgttatacccagccctgcatgctggcagtggcaatggcgatcaccgatattctggcggagaacggcatcactccggagatgactgccggactgagcctgggcgaatacagcgccctgtactgtgccggtgttctggaccggcagactgccgcggagctcatcaccttccggggacaggccatgcagaaggcctctgagggcgtggaaagcggcatgaccgccattctcggactggaccgggagctggtgcagaaggcctgcgatcaggctcaggccgagggttcggtctgcccggcgaacttcaactgccccggacagatcgtcatcggcggcgaacgccgggcggtggacgcggcggcacagaatgccctgctgctgggcgcccgcaaggcagtcccgctgacggtaagcggtccgttccacaccttcttcatgcagccggcaggcgatgccctgcgggagcgcttcaagagcgtccatttcggcgagatgaagatcccggtggtcttcaactgcctgggacgggagaagactgccgaggaatccattcccgagctgctggagcgccaggtgcagagcccggtttacttctgggacagcattgaatatatgcgtgcccagggtgtggataccatcgtggagatcggcccgggcaaggtgctttcgggctttatcaagaagatcgacaaatccatcaagacctatgccgttcaggactgcgacagtcttgccgcggcaatttccgcactgaaaggagccatgcagaatgtttgatctcacaggaaagaccgcagtggtcaccggcggaagccggggtatcggacgggccatct

SEQ ID NO: 4344 - DNA, 5308 bp, Unknown
  16S sequences of unknown bacteria
ccccctgcaccccctcccaaaaagctttatacattaaagatagggggcacaggtcgttagtatgctaaatattagatgactaatagttagctatctaattgttaggttgcgaataatattatacgacaaaaaacgggatttgtcaataggtgcggcaaattctttctttaacaaaatgttaattatgcgacagggctcgacaaataacgctaaaagtggtataatataatatcaggagggatcaacacttgaatatacagcacgaaaacatcccgaacgccctcagcgtcgaccacagccgacgcgacgaatactgcttctgccccgaacacaaccacacccactacgaaatctccttcgtaaccgaaggcaccctcaaaataaaaagcggcaaagccaccctcaccaccgccgccccctgcgccatcctccacttccccggctccccccacagcgtagaaagccccggcggcatatacgaacgctacaacatcaactactccaccgccctcttcgaacgcttcccggtcatcctctcctgcaccgaagccctcttcttcaccagcaccgccgtcctaccgatgaaccgcgaaaccgcggacaatctactccgcttcgtccgtccgctctttgaggaatacgaatccggcggggacaccgacctcctcggcagcctcctctcagtcgtcctctcattcctctgccgcctcggagaaggaaaccgcgccggagagcgccgcggcagctacataaacaaagtcatcagatatatctcggacaacctctcacacgtaatgaccgcggacgacatctcaggcgaattcttcgtctcccgcgcgaagctctccgcggacttcaagcgcgagaccggcatgaccctcaagcagtacgtctgcctccagacgatcgagcgcgctaggacgatgctgtcggatagaaagagcgttcaggcgaccgcgatagagctcggcttcccggactccgccgccttcatacgcaccttcaggagaatgaccggcgtgaccccgggaagattcgccgcggaacacgcaagggaataaagcgaagggaaaagaatcaatatcatatcaaccaacaattgccaatattcccacaaacttgtatggataataattgatcacttgctcatcgagacaaagaaaggaaaaaccaaatggaaatcataagaaaagcgaccgaagaggacatccctgcggtcgcggaaatatttgaacacgtgatagaccgtgaggagacggtcaaagtgaacgtcggctggaagcgcggcgtgtacccgacggaggacacggcgcgggaggcgcttgcggcgggggatctttacgttcttgaggacgatggaaggatagtcgcgaccgggcggataaatcaggcgcaggttccggaatacgcgctggcgggatggacgactgacactccggacgataaggtgatggtgcttcacacgctggcggttgagccgtcggcgtccgggcacgggtacgggacgaagttcgtcgcgttctacgagaaacacgcgaaggagacaggctgcgcggcgctgaggatggacacgaacgagataaacaaacccgcgagagccctgtacgccaggctcggctacagggaggtcggcatagttccgtgcagcttcaacggtattccgggagttcagcttgtctgtcttgagaagataataggataaaagaaaatcctccggggtcgggtgactccggagggttttaaaggtttttcagaatgtcatgatgtcctatatcctgaaggactattgtggtggagttttcataataccatagcacacgtatatccatattgacgctgaactcccatagatacggggaaccctgtatccttttggtacgcattgacgggtgcatctgtgattctgcgaaaacagacagtttatttctgaactgctttttttctgtctcagacaaggatttgaaatgcttcctgaaccggtctgaaaaggtaatgtcaaaattcattcttcaagatttttcatcaggtcgtcgatgttgttgaatacgggacgtttaccggaatcgatgtcttcctttatctgtttcatctcgctgtgaagctcttcgatgtactttttcggatagactgctaccggaaccatgtatatggtgccgtctttttcgtatatctcgagtttgtcgccttccgaaagcccgagggaagcgactatatcttttggtatcgttatctgtgattttgtgcgaagttctgcaagcataatccatacctccgaaagttagaatttcctactccaataatattatacacctcaaaaaagaaaatgtcaatagtctccgcacatctttataaagctttttgaagagggaaggtgcgaggatgccgcaggcggcatccaagcgaatatgacttgccgccctggcggcaagtcatattctgaggggaggaactttttctccgaaaaagttcctcccccgcttctcacttccgtcctttcacaaccttaagtgtcgtgaactcgtcgcgttccttttcttcgaggtatcctgtgatgtagtggatttgttcttcgaggtctgggattacgatgtttttgagggcgttggcgcgtttttgggattgtttgatggctttggcgagtctgtagacgctgttttcgatggcggcggctttggcgaccaggtcccggactttcatgaaatcgatgtaggtttcgtcgaggagggggttggtcgaggagaagccgtagccgggcatgttgatgtcgtcggtcagtttgacgtcggggatttctatgcccatgaccgagcggcggcggatcattatgtcgtcgtcggtgtcgcgggacatggctatccggaagacttcgttttgtccgagggtcatgttggcgtttctgagggaggcgtaggcggtcgcgaaggcggagcttatgtctccctggattgactttacgtcgtcgatcaggcgcatcatttcgcgcatcatgaggttgcgtttgcggtcgaggaggtcgtagccgaggcgcgctaaggcgagggattttttcatcgccatcaggttcgatttcgtcggtgctgtctgcggcatggtcttacctccttagttcagggtcggggcgctggtttctccgaggtgcggacggcagtatttatcgtagtactcgtcggagacgcgctcgagttcttcgcgcgggagcatcgagaggagcttccagccgatgtcgagggtttcgtctatcgtgcggttctcgttcttgtcctgcgtcaggaattcgccttcgaagcggcgtccgaattcgaagtatagcttgtctatcggggagaggtcctcttcgccgatgacgctggcgagggctctcgcgtcctgcaccttcgcgtaggaggcgtagagctggttcgagagggtcgtgtggtcttctcgcgtgtagcctttgccgattccgtctttcatcagacgggagagcgagagctgaaccgagacggacgggtagacgcctttcatttcgagcgagcggtcgaggactatctgaccttcggtgatatagccggtgaggtccgggacagggtgggtgacgtcgtcgttcggcatcgtcaggatcgggagctgggtcaccgagccggatttgcccttgattcgtccggcgcgctcgtagagggacgcgaggtcgctgtagaggtagccggggtagccttttcttcccggaatttcgcccttcgcggacgctacctcgcggagagcctcggcgtaggaggtcatgtcggtcatgatgacgagcatatccatgccgtactcgaacgcgaagtgctcggcggcggtcagcgcgcagcgcggggtcattattctttcgacgatcgggtcgttcgcgaggttcaggaacattatgacgcgcgagagaacgccggtctcctcgaaggagcggcggaagtagtccgcgacgtcgttcttgacgcccatcgccgcgaagacgattccgtagttgccgccggagatgttcgcctgtctgacgatctgcacggcgagctcgttgtggctcatgccggagccggagaagatcgggagcttctgtccctttatgagggtgcagagaccgtcgatcgacgagattccggtgcggatgtagtcgcgcgggtactcgcgggagacggggtttatcgccatgccgttgacgtcgatgcgcttttcggggcagatgtcgccgagaccgtcgatcggtctgccggcgccgtcaaagacacgaccgagcatatcgcgcgcgacgggcagctcgagcgggtgaccggtcaggcgggtgcgggtgttggtcagcgagatgccctcggtgccctcgaagacctgcactatcgctttgtcgccttcgattctgattattcttccgacgcggtggtcgttgtcgccgacggttatgtcgaccatttcctcgtagcaggcgtcggtcacgccgtcgagggctataaggggaccgtttacgtctgaaagacccataaattcgatattcataaaacgtcctccttatttgatatcgtatttcttctcgatatccgagaagagggaagttatcttctgccacatatcgtcgaacttcgactcatcttcgttcggtatgtcgtacttcatccgtccgaggatgtcgaatattccggctgagcgcagctcggagaccgggatcgacttcgcgacgagggtcttcgccctctcgtgcgactggagaatgtacttcatcatcagatactgcttgcgtatcggcacgtagcagtcggtctcgtgcatcgcgttctgctgtaagaatccggtgcggatgacgcgcgcggtctcgagtatcagcttctgctcctcggcgaggaggtcggagccgatcagcttgacgatgtccatcagagagttctcctcgctgaggatgttcgagatcttcgtcctgagctcggggaagtcgtgcgcgacgttcgccttgaaccagtcgtcgagctcgagagtgtactcgctgtagctcgtcgtccagttgacagcggggtagtgacgcgcgtaggcgagcgctttctcgagcgcccagaagcaacgtatgaagcgcttcgtgttctgcgtcacaggctccgagaagtcgttgccctgcggggagaccgcgccgattatcgacaccgacgccttctcgtgcgacagggtctcgacatatccggctctctcatagaacgccgacagtctcgacggcaggtacgcggggtagccttcctccgcgggcatctcctcgagccgtccggagatctcgcgcagagcctccgcccagcgggaggtcgagtccgccatcatcgcg

SEQ ID NO: 4345 - DNA, 32759 bp, Unknown
  16S sequences of unknown bacteria
tgccaaggcgagggccgcgagttcgaatctcgtttcgcgcttttcctatcatatgatgggctgtcgccaagcggttaaggcacaggactttgactcctgcactcggtggttcaaatccactcagcccaggattcataaaatattaaccgtaatgatgggctgtcgccaagtggtaaggcaatggattctgactccatcatgcgcaggttcgaatcctgccagcctagtttattaaatacccgctcactataatagcggagcgggatattttagtttatgcggtctaagcagttgtggcggaattggcatacgcgctagactaaggatctagtccgggtaaactgggtaggggttcaagtcccctcaactgcatatgtttattatcggggtgtagcgtagtttggttagcgcgcctggttagggaccaggaggtcgcaagttcaagtcttgtcaccccgatttttttaaaatcagtacgcaaaggcgtgctttttttatgctcaaaaaccatatatatctttaagccaaccataaaattttaattgtataatgtatagcctattgaaaatattaagcaaagcagcctaaattaatagattgtttagattatgtataaaagtagataataatgatataaaatataaatgccgttgaaataaacaatcaacggcatttatacttattctattatattttttaattccgaaagcagtctgttattttcttcgggacttaatatacaaaatctaatatatttttcatttagataagtaaatgaggcggcatctctaattaccattttctttcttaccatttggtcaaatatttccgcagctgttattttatcggtaagaagttttgctaacaaaaagtttgatgaagacttgtaaacttttatatttttccaagtaagtagttcatcataaattttttgtctttcagatgatattaaatgtttggtctccttaataaaatcgatatcactgaatataagctctcctgcatatgccgccaatatatttacagaccatggatcttgattttcagcgagcaacttatgaaattcggcgctggatgtaattccgtatccgagtctcaagccgggagctgcaaaaaattttgaagtgcctcttataacaaatatattgtcaaactcatcaacaagtgggattgaacagatttcttcaagattattactgaattctatataggtttcgtcaatcattacgcttatattgtttttcttacaatgtgtaagcagttttctcatatcggttatggctattgctgttcccgtcggattgtttggattgcaggctataaacagaccgacttcatctttaagtacggaaataagtctgtcgatattcggtacaaaattttcatcttcacgcaattcaaaatattcaaaatcgctacctgcaagttttacagcattctcatattccgaataggcagggcccattataatcgtctttttagcacatacagatttaatgaatgttgatataagctctgtagaaccgttcccaactactatattttcgggttttgcacccgtatataaacttatactgttttttagcgctatatagtttttatcaggatagttgcagactattgaaatattttgagctaatttttctgcggcttttttcggaaatccaaatgggttaatatttccgctgaaatcagaaatttcatttttcggtattccgtattccctttcaatagcgtcaagatctcccccgtgcatatgcataagtgtttccatttttgttcctcttttcgtatgttaatcataaaaataaattatgttcatattccgtcagttctttgctttgacttaagattctcggatatacgattttatcgataaagtcgtgttcgtccagtaattttagttcaatcctgtgctctctatcggtaatgaaagtaatcaaattattatcgttattaagcaggtcggaaaatgataatacagagtcctctttacgtttaaacggaacataaataatttcctttttatttttacgcttactttttattatatactttttgtttacagggagcaaaaacatagtaagaatataattggctgcaagctcaacaggaatattactttcaatctctataattttccacaggcgtttattgtttgcgtaacaggctttaattgtatagatcctattaatgctgttttccgaagtgtctatatcgagtaaattcagatgattttcagcgtccaatgataaaagaatcttatcaatcggaatcggagaaatcttgtttgcggatgtaccgttaaagaatagttttcccaatggagtaagcgtatagctcgtgcatgggacaaacaattccagttcttgttcaccgccgatagctattgatgtaaataaagaatttattatttccttaaaatttattttatatgagtatagcggtcgtattaaacgaagataatgaccgaaaatataaatgaaagctctgtcagtcaatatacccatataaagaagagatgacagtattgaggaatccccttcatctaatgttgaattgtccgcttttttccatatatcacggatatctattccgacattgtcatatagagaaacaaacatatcgtctattgatatcggagttcttaaaaatgattccaaggttggggaatctattggattaagatcatacggaagttccttatttaacatttcggcacatatattaagtgaagagttatatatgtgcttgaatttctcatgcgaagataaagaaaagaatccgcaacttgtatccgaacatatacagggttctgttagagaaggaatggatttgtataaaccgagctttcccacaaggttgaaaatataatttacataatatctgtctgaaacggataatcgtttctgaagattatgtatgtctttttcctttaatacaaacttatcgcttaaatataatgcaggattcatataatccataaagacatcaatatccttataaatcgggtgatcatctaaagaataaaattcttttttaaatgtgaaatttactctttctccgctgatattatcaaaatgtacacagaaactgtaaaaacctttgtctttttgtataaaactatcctggctttcaactattgcagacggagataatattgtttcggaaaaaagagcgctgtagtaccagcgtataaataatgtcggagacaggtaggctatttctttcttctgttttccggacatatacataaatatagagttaaaatccgttgaaaaacggtcgaatattttttgcatttccgactccatagtattttctcccttaaattttattatacatcattatatcagatattttttatatttgaaatataggttttaattgcaaacggcaaaattaactttttaattgcctatataaatgaaaaaatgtataatctatatgcggttttacaacttatatgcttatgaaaggatttaagattatgaaaaaaggcgctatatttgatttggacggaactcttgtaaattctatgaaggtctgggaaaacgccgattatatacttgcggaaagatacggctttaaacctgatgaagaatattggaatagggttacgtcatgttcttttatgcagggcgcggaatatattaccgaaagatttaaactcagaaaaacagctgaagaaatagcacaagaactgtatgaaatagttttgaatgattataaaaatactataaaactgaaagatggggcaaaagagttattaacgcgcatgaaaaatgacggacttaaactggctatagcaacatctaatacagaagagatgacatttgcggtattaaagagcaacggagtatttgatttgttcacggcatttgcgtactgtgatgatatcggaaaaaataaatcgtatccggatgtatattataaagcggcgtccgatatggggcttttaactgaggaatgctatatttttgaagatgttccaaatgccgttgacggagccaaaaagtccggcgcagaggttattggtgtgtatgacgaatattctgccgcaaaggagcaggaaataagagcaaaatccgacagatatataatgtctctgaaagagttcatttactgagtcttgccaaataaccgccattgtgatatattccttgtattgaatacaaatgtttattatatatgaacaggagaagctatatgaaggaaactaaaaatttttatataattgacaaaaatgctcttccggaagtatttatcaaagtaatggaggttaaaaatcttcttgaaagcggaagagaaaaaacagttcaggaagcggtaaataaagtagggataagcaggagcgctttttataaatacagagacgctatttttccgctctatgaacattccagaggaaaaaacgttactttgtctatgaatatggacaacagagccggcttactttcggctgtactcaattcaatcgcaatgtcgggtgcaaatatactgacgataaatcagactattccgataaacggtatagcaaacgtaactataactatcgagacccagggaattacgacggaactgggtgaatttgtcgataaaataagcgctattgacggaataagagcgcttaatataattgctcgggaataaaataaaaatacggaggaattaaatatgatacatattaaagtgcctgcaacgtcagccaatatgggaccgggatttgactgtattggaatagcgcttcagttgtataacgaactgtgggtagaagaaatagacagcggaattgaaatcgtatctaaaaacgaaagaataataccgactgacgacaaaaatttaatatacagcaccattaaaggattttatgaacatgaggggcttaatatgcctggtataaagcttattcagaaagatgaaatacctatgacaagggggctgggaagttctgcggcatgcattgtcggaggtcttcttgcggcgaatgctttaagcgggaaaaattattcgattgattatcttgcgcaaatggcggctggacttgagggacatccggataactctaatccggctcttatgggcgacatgataataagcgcagtttgcgatgaaggcatgagatgcgtgaaacttgatgttccggaaaatcttttatttgccgttatgattcccgattttgctttatcaacatcggaatcaaggtccgttttgcctgacagctacacaagaagccaagcagtattcaatgcgtcaagaacaggtcttttaattgcgtccgttatgacgggcaatctcgataatcttcgtatcgcaatggatgacgcaatacatcagccttacagaaaaaaacttataagaggatatgacgaaatatttaaaactgcaagggaaagcggttcaaaggcagaatatctcagcggagccggccctacgcttatggccgttataacagatgacaacgccgataattttgaaaaaaatatgaaatccgttctcggcagacttcccgataattgggaacttaaactgcttaagcctgataaagtcggagcggttgttgaaattatataatttctggaggggtttaattgctgattgtacaaaaatacggcggttcttcggtagccgataaagccgctgtgcagaatgcggcgtcaagaatagccgaaagtttccgcgagggcaataaagtggttgttgtcatttcggcacagggaaacacaacagacgagcttttgaaatatgcttccgatatgaatcccgaagcgtcggaaagagaacttgatatgattttatcaacgggagaacaattatcggcggctcttatggcgattactcttaacgccatgaatattccggcaataagtcttaacgcatggcagctggggattgttacgacggaaaattacggaaatgctaaaatagaggccgtatgttccgaacgaataaaagaggaactggaaaaaggaaatgtggttattgccgcaggattccaggggataaataaaaacggcgatattactacgttaggaagaggcggttcggatacgactgctgttgctcttgcggcggctttggaagcggacaaatgcgaaatatacacggatgtcgacggagtttttacagccgatccgagggtagtcaaagacgcagttaagctgaaatcaataagctatgaagaaatgctcgattatacgacaatgggagctaaagtgctgcataacaggtctgttgaacttgcaaaaaggtacaatgtaccactcactgttcgctcaagcttttctaaaaacgaaggaacaagcgtttgtgcggaaggcggacatcgtgtggtaagcggaattgcatctgataaaaatacggctcttatttccattacggaaatggacaatataccgggagcggcaaacggcgtattttctctgcttgctaaaaaaggcataagcgttgatataattttatgttccggtacgggtgaaatatcatttacagttgctaaaagggacatgaaagccgctgtagaaactataaaaggctcggtaaagggaaagatagaaacaaacgacaggctgtcaaaggtatcggttataggcgccggactggagacaaacccgggcgttgtgtcgtctctactggaagccatttatgaggaaaatataaatatagagatgattactacatctgaaataaaaataagccttctcatagataaaaatgatgaagaaagggcagtaagagcaatacataataagtttataaagcgctgaaaatatttaaatcggatattacaaaaattacctttccttttatacagtatgaacagctttattgtatacggaaaggtaatttttgtgtttaaagcggagacaggctttagataaacatatcaatcgttttttaacatcctgtactgcatagcttccgcgatatggtgagcttttatgatttcactgttttccaaatcggctatggttcttgcgactttcagtattttgtggtatgaccttgcgcttaaagaaaggctgtcgaaagcggtttccgcaagggcagaggcttctttatcaagtatacagaatttgtccgtctgagccgatgacagctgagaattaaaatatactccttcgtttttatatcttgtcagctgtatgtcccttgccgcagatacacgctttttaatctcggcggagctttccgctttttctttactgttaaggtcgttatatgtaacgtcgggagtatcggcgtatatgtctatacgatccagaagaggtcccgatatacgttttctgtatgcggctatttcgcttgccgtacaatgacatctgctatcgcccaggtaaccgcatggacatgggttcattgcggctgccagcatgaattttgacggatagacaacggaggcgtttactcttgatattgttacctgaccgtcttccataggctgacgtagagcctcaaggacgctgcgtttaaattcgggaagctcgtcaagaaaaaggacgccgtaatgagaaaggcttatttctccgggctttggaatacggcttcctcccgtaagggcagtcgccgatattgtgtgatgaggagaccggaacggtctgctcgtaataagaggctgaccttctttcaaaagacctgctacgctgtatatttttgttatttctatgctttcttcaaatgttaaatcgggaagtattgacggaagcctttttgccatcatcgtttttccgcttcccggatgacctgtcagaagtatattgtgatatcctgccgccgcaatttccattgctctttttacatactcctgtccttttacatcggaaaaatccggttgactgtcattagaagaaacgcttagtatagtatttatatcggaggtatacttacttagagtattattgcctataagctgttttatattttcaatggggtacacttccataccgtcgatgagacaagcttcatcggcgtttgaaataggtactatacatttttttatattatgttttaaggcgttgtatactatcgaaaggactccgtttacatggtttactcctccgtcaagggaaagttcgcctataatcatacagtcggatataaactttttatcaatcaatcccatatttgacaaaagtcctactgcgatggggaggtcaaatgcaggtccctcttttttggtgtctgccggcgcaagatttattgttatacgtttcggaggcagttcatagccggaattttttatggctgtacgtactctctcttttgattcttttacggcggaacccggaagacctactatttcgaagccgggaaaaccattggaaatatcaacttcgacattaataatacaaccgtttatcccttccgccgctccgcttatgattttagaaagcatataattttccccccgtaattacattataaatacatcatatcaagcagaattatttttatcaatatatacgtggcttttgatgttaaaaaatatttgtattgaatttggcgtaaaaacaatatattatagaggtcatgtgaagaaattgtttttaaaccataaggtgaaatgattatgaaaagtgattactatattatgtggctgagtcatataaaaggaataggaatcaaaaaaataaataagttgattgaatatttcggacgtgccgaggaaatatataaggctgaaaagtcggatctgaaagcggcgcttaatgaagaagacgcgtcaaatattataaaatcggctaaagacggaagtttggattacttagtaaaaaaccttcgtaaagcaggagcggaatatatttcgatgtataacgatgcctttccagaaggattaaaaagcattgacgacattccgtcgggaatatattataaagggaaacttccggataaaaacgcggttttggtttccatggtggggtcgagacgatgtaccgagtatggaaaacaggcggctttgaagctttccggcgatcttgcggagagaggcgtcagcatagtcagcggccttgcagacggtatagactcatattctcatataggcgcgctcagacataaaggaataaccattgcggtaatgggaacgtcgatagacagatgttatcctgccgctaatatcagccttatggaagaaataataaaaaacgacggatgcattatatcggaatacggtccttaccgacagacatacgcttcggactttgtaagaagaaatcgaattatagcggggatgtcgagggcattgatagttgttgaagccgagttcaaaagcggtacgtcttctacggtcgacgctgcgttaaaatacggaagagaagttcttgcagtaccgggaagcatatttaataagtacagcgagggaacgaatgcgttgattcgggacggatgtcatccggctttatcatttgaagatattttgaatgaaatcggtatagagaaagtaaaaagtgcagactgccgaaaaaataatattgacttggaagatattgacgaagagggaagaaaaataataaaattcctcagtgaaggagaaaaggactttgagactctgtgggaagaaacgggaattgataaaagtaaaattatgacggaactgacgattttggaaataagaaaacttattcaaaaaatgcccgggcagagatatagattggtattttaggaggtacgcaagtgtctaagaatgaagtaaacggcaatgcggaagagaagattataaaagaagccgagaaaaaaacagttaaggctaaaaagaaaacaacgaaaaaaacggcaaaaaaaacagctaaaacaaagaaaaaactggttattgtggagtctcccgcaaaagccagcacgattacaaagtttttaggaaaaaactatactgtaatggcgtcaatgggacatgtaagggacttgcccaaaagtcagctcggagtggacatagaaaacgactatgagcctaaatatattactataagaggcaagggagaacttttaagcgcattaagaaaagaagcgaaaaacgcagaccatatttatctggcaactgaccctgaccgagagggtgaagcaatcagctggcatttgatgacggctcttaatctggatgaggaaaaaaccgacagaatcacatttaatgaaataacaaaggacgcggttgaaaagtcgataaaaaacgcaaggggcatagatatgaatcttgtaaacgctcagcaggcacgccgtgttcttgacaggatagtaggttaccctgtaagcaatctgctttggcagaaggtaaagggtcgcttaagcgcaggaagagttcagtccgttgctcttaaaatgatatgcgacagagaagacgaaataaggagctttattccggaagaatattggacaataagcgcttttgtaactgatacgtcaaaaaatgaatttgaagcaaagctttacggaaacggagagtcgaaaatagaacttaaaagcagagaagatgcggacagagttcttcaagccgttgagggaagcaattttatcgtaaaagaggttaaaagaaacgagaaaataagaagaccgtatccgccttttacaacgagtactttgcagcaggaggcaagtaagtatcttaattttactgcgcagaaaacaatgatgttggcacagcaattatatgaaggcgttgaaataaagggagaaggaacggtcggacttgtttcttatataagaaccgattccgtaagaatatccgatgaagcatatagccaagtaacggaatatataaaagaaaatataggcgaggactatattcccaaagaaagaaacgtatataaaacaaagaaaaatgctcaggacgcccacgaggccatacgaccgacgtattcgtcgagaactcccgacagcctgaaagcttctctttcaaatgaccagtttaagctgtataagcttatctgggaaagatttgtttccagtcagatggcgcctgcggtatacgaaacaatggcagtttcgatagattcggcaggatatattttcagaataaacgcttcagccgtaaaatttaaaggatttttggaagtgtataacagagttgaagagacggaaaatataataaaattcccgaagctgacggaaaactgtgtgcttaaaacaaaagaaatagttccggaacagcactttacgcagccgcctgcaagatatacggacgcgtctctgataaagacgatggaagaactcggaataggacgccccagtacttacgcgcctatattggcgactataatagccagaaactatgttactaaagagaaaaaagccatttgttcaacagaacttggagaaatagtcaatgatattatgaaaaactatttccctgaaatagtgaatataagatttactgcggaaatggaagctgaacttgaccgtgttgaagacggctcggacgaatggaaaaacgtaataagagagttttatcctatgtttaaagaacagctggataatgcaatggaaaagcttgaaaaaatagaaataaaagatgaagaaagcgatgtcgtctgtgaaaaatgcggacgaaaaatggttatcaaagtaggaagatacgggaaatttttagcatgtccaggatacccggaatgtaataacgcaaagccgtattacgagtccgccgatgttgattgcccgaaatgcggaggaaaggtactgaaaaagaaatccaaaaaaggaagaacatattacggatgtgaacataatccggagtgtgattttgtttcttgggataagcccgcaaaggaaaaatgtccgcagtgcggcgcatacatggttgaaaagggcagaaatccggtaaagctggtttgttcagatcagcaatgcggtttcgttaccgaaaagaaagaggaaaataaggaagaagagtaaaaataagccgtgcttttagcacggcttgacttttatattatataaactttataaaaatgattttaaatcaataataaattaaaaataattgttgtatttagtagactttaatggtataatatctgccgtaactaattagaacacacgcatttgactcagctgaaaggtgctcctgctcggagttttggcagttcggataatgcggaggaaaaacctaggaggtaaattatgagcgttatttctatgaaacagttattagaggcaggtgttcatttcggacaccagacaagaagatggaaccctaaaatggctccttatatcttcgctgaaagaaacggtatctatattatcgatcttcagaagacagttaaaaaagtagacgaggcttatgcagctgtatcaaacttcatcaacgaaggcggagaaatccttttcgtaggtacaaagaagcaggctcaggaatcaatcaaagaagaggctgaaagatgcggaatgtactatgtaaacgaaagatggctcggcggtatgcttacaaactttaagacaatccgtacaagaatagcaagacttaaagagcttgaaaagatgcaggaagacggaacattcgacgttcttcccaagaaggaagtagcagtacttcttcatgaaaaagaaaaacttgacaagaacctcggcggtatcaaggaaatgacaagaattcccgacgttatgttcgttgtcgatcccagaaaagaaaagattgctattcaggaagcacacattctcggaatccctgttgttgctattgtagacacaaactgcgatcctgaggaagttgattatgtaatccctggaaacgacgacgctatccgtgccgtaaaacttattgcttcaaagattgcagacgcagttatcgaagctaaacagggagaacagcagacagcagaggaaagcgaagaagttgctgcggacgctgaataatcaataatatacggaggtatttaaaatggcaattacagctagcatggttaaagaacttagagagttaacaggcgttggtatgcttgactgcaaaaaggctcttgccgagactgacggcgatatggaaaaggcagtagaatacttaagagaaaaaggtcttgcggcttctgaaaagaaagcaggacgtattgcttctgagggcgtatgcctttcatatctaaatgatgacaagagtgtaggcgttgttgtagaagtaaactctgagacagacttcgttgctaagaaccctgtattcagagaatatgtacttcaggttgcagaacatattgcaaattcgcaggctgccgatgttgaagctcttcttgcagaggcatggaagtttgacacaagcatgacagttgccgaagctctcagcagtaaggttgctgttatcggtgaaaaccttaaaataagaagatttgaaaaatacgctaaagaaggcaatggaacaatcgtatcatacatccacggcggcggtagaatcggcgttatgattgagattgcatgcgacaatgttacagatgctgttgaagaaatgggcaagaacgtagcaatgcagattgcggctcttaaccctcagttcatctgtgttgatgatgttcccgctgaatttgtagctaaggagaaagaaatccttacacagcaggctatgaacgatcctaagaacgcttctaagccggctaacatcatcgaaaagatgatcgacggaagacttaacaaggaaatgaaggaaatctgccttgtagaacagccttatgtaaaagacggcgatttaacagttaagaaatatatcgaatctgtagccaaggaagttggcgctcctataacaattaagagaatggttcgttttgaaacaggcgaaggtcttgaaaagaaagaagagaactttgctgaagaagttgcaaaagcagcaaaataataactaatatcaatgacgtattgccaatggcagtacgtcatttttgtatgcaaatataacgaaaaaaatataacctatggtagtgccaatctttaaaattaaattaaaaattagataattgtatattaatgagcccttattttgttgttattttgtctgatttatattaaaatatatttatataaattagaaggtgatattatgaaaaataatatagagaatgtaacaaataatgcagaaagtaatgtagagcagtcaaaagataaagcctacgaaaaggttacacactatgttaaagagagaataaaaaccggtgagttaagggtgggggataagattcccacagagagggaactatcggaaaaattggaactcagcagaaattccgtcagagaagcgttgcgaaccatggataatatgggacttataagatgccgtcagggttccggaaattatatatccggggaaatgcagcagattatagaggaaacgctttacatgatgtttatgcttaagcagatatccgatatagacgtaagtcagctaagacgagcgatagacatacaggcaatgatattggcagtacgcaatgttaatgaggacgatatatacgaaataaaacagctgctggacaggcttgatgtcattgaagtagatgaatctgcatttgtagacagagacatacatttattaatatctaaatattcaaaaaataagctgatagagattataaacgacacgttatcaactataatggaaaagtttatttttaaagcaaggagactcgttataggcaatgaaagtgatgttttgaccgtatttcatcgggacatgcttatgagcctgcttgaacgaaatgagggaaaaggggttcttgcaatcaataagcattatgatactattgataaatatttatgataaattaatgagaatgtaatctttttttcatttatatacattgacaaaaccgtaatataaatttattatatatgtatatcgtttaaatggtactaccacatacaatgttttatgtttccccaactttgcatataacatctgtgaataatttctttttgccgccgttttacggcggtattttttatttgactaaaaatacacagaaatgggtggcgataaaaatatattaaaaacttggttttaagcacatgggagaaatgtattgacataaaaacaatattgttctataataaatacatatttgctcaaaaaataatttcaaaaagttttctgatacaaatatctcctggaaaacagaaaacaaaatcccctcttgaaaaggaacgcctaggcgttcctttatttttgcataaaaaaaccggattctaaatccggcaaaaaattttaaataccattactaatggggaatggagaaattattcatggatattaaattttttaaagaatcttatttttcaaaaagatttttaacatcaaacattgcctcattattgaaacttctgtgttcgttatggtgtctttccgaaaccgcggtttcattattcaataaaaagttaacgtcaaatgtagttgatttagtaaaatgtttcatggatattacgacctttctgataatataatatgtaaattttattttaacaagtttaaggtagagcttcgtctttcttttggctgttccgtaaaatcggttgactgccttattctgttaagctcataaggattaaaaatactttttgttatgttaaaagttactgaactgttaaacatatttcatgccccttattgattttgttatgtcttttactaactttatgtatatatggtactaccaataaaaggcgatgtcaatggttttaactaaaaaaatacgtttataaatatataatattcaacagttgatctaaattatattaaactatgtttttgtgcattatgtcatcatacgagctgtataacatataatgtattgtttatttgtcattacataatgccttaaaaattagtttgaaaatcaaattggcaggacaacgtgttgtcctgccaattttttttattggtttttaagaaagagttttattataagaatattcagtatttatgattatttcggggatttatcgttgttattgtttttaggtttttggcgttgtctgatgttgttgtttgactcttcaaaaagtaacgctacgtcaaaagttgttgagttggtaaaaaatcttctattctttttcatatttaagaccacctttcattaatggttcgtattttgagataggttatacatcaagccgccttattacgtcgttctttcggttgctctgtcaggtcgattgaatttctgaccatgatcaggttgagtgggttctgttttttgcgagttaattcgttttcaagttttctcatagtcaatccctccaatctttaaaaattattattaatttaattgtcagataataataaagagcttgattattaaatatttttatgtccgatagaattttaaaatttttattggtactaccaatcctttctttaattaaatggtactaccaatatagtgatttgtcaatagtttttaaaaaaatataaaataaaaatttcttataatagtttccgtaaaaattatgatctctatgcagaaattccgcaataaaaaaaccggcttatatggccggcaaaatggtgtgttttttcatgtcattggggagataacaagaaaaaattaatcatggatattaatataagaaaattattgatgagaacttaaatattattgtagctgcaatacagataaggaggctggcaaaaacgtatgccgccagtctatccgtatagttaagttttgcggcaatattcttatttttcatgatcctcagtcctttctgtaatgaagttaatcttattaattcgttctattggctctaccaatcttttctttaattaaatggtactaccaatttgttggtttgtcaatagattactttaataatataaatttttttctaagtttaagcaattaatattacataaagaaaaatttattgatattaatataaaattaacggttaagatgcaaaaatattggatttacctatgaaatggggtataatataaacaatttcgtaaattaaggggttattatagaaaaggggaatttttgtgggagtaacttcaaaggccgaattgacgaaggatgggaaaatgcttttttcaaatgcggatttaaaaaaattaatatttccgcttattatagaacagctgttatctattttggtcggaatggcggattctattatggtatcttccgtcggggaagccgccgtatccgccgtatctcttgttgattccataaatatattgcttttttatgtgttttcggctgttgcaacaggtggagcagttgtggcagggcagtatttgggaagcaaacgtaacaaagaagcatgcgacagttgtgatcagcttcttaattttgtacttattatgtcgcttgttataactgtaataatgtattttggaaagggatttatcttaaattcattatttggaaaaatagagcctgatgtaaaggcatatgcgaatacgtatctgattatcgtttttgcggcgataccgtttcttgctgtatataactgtggcgcggctatgtttcgcgcaatgggaaatacaaaaatttcaatgaatacgtcgttgcttatgaacggtattaatgtcgctggaaacgcttttcttatatacggattacataggggtgtagaaggcgtcgctatacctacgctcgtttcgagaatggtagccgcatttattataataaaacttttgaaaaatcaaacccttactattcatcttagtaaaaaatacaatccgaaacttaataaggaaatgataaaaagaatattaaaaataggaatacccaacggtgtagaaaacagtttatttcagcttggaaaaattatgttaatgagctttatatcgggactcggaactatggcggtagcggcaaatgcagtaggaaacgccgtatgcacattccaagtaatgccggggcttgccatgggatttgccgttgttacggtaataagcaggtgcgtcggtgcaggggaatacgatcaggttaaatattatacaaaaaaactgataataatgacatatataatgcatattattataaacgtcgccatttttgcggcgctgcctttgataataaaagcctacggattatctgttgaaaccggtatacttgcggaaaaaatattgatattacatgcttcgtttgccgttattatatggcctatagcatttactttgcccaatacactcagggcggcgaatgacgccaagtttacaatgatagtaagtgttgcatcgatgtggatattccgtattgttttcggtattgttttaggaagcacattcggaatgggcgtgatgggcgcatggattgcaatgataatagactggtttgtgagagcaatattcttttcggtcagatataagagcggaaaatggacaagggttaaattgatataacggagaaataattatgaaaagagcaagtggaataataatgcccatattttcattgcctggagatttcggcattgggactatgggagaagaggcgtttagatttatagattttttaaataaagccaaacagaaatattggcaggtgcttcctgtcgtacctacatcttgcggaaattcgccgtattcgggggtatcggtatttgctggaaatcctaacttcatagatttggaagcattatgtaataatggaatattaaagcctgaagatataaaaaacgcagactgtggcgaaggcaacgtggactataacaaactcttaaaaaataagccttgtatcctcagaaaagcatatgaaaacgtatacaaacaattaaaagaagaagttgattcatttgcggaagaaaacgcgtcatggatatacgattatgctttatattcggctttaaaagaaaagtttaattattcggcatggtatgactgggacgacgatataaaattcagaaaaaaagataaaatggataaatacaaaaatgaactcggagatgagatagaatatcatatctttgtacagtatttattcttttcacagtggaacagattaaaaaaatatgcccatgagaatgatgtcaaaataataggagatatgcccatatatgttgctatggattcggcagacgtttgggcgtctccgaaaaattttcagcttgacggcgaattgaatcctacggaagttgcgggagttcctccggattatttttccgaggaagggcagctgtggggaaacccgttgtatgactgggacgctatgcgtgcagatgggtacggatggtggataagaagaataggtcaggcggtaaaaatgtttgacgttataagaatagaccattttcgtggcttggaaagctactggtcagtgccggcaggagaaaaaacggctgtcaacggtcattggagaaaagggccgggaatggactttttggaaagaataaagggctggtttaacggaatagaaataatagccgaagatcttgggatattaaccgacgaggttaggcagctgcttaaagattccggttttcccggaatgaaagtattggaatttgcatttgataacagccgtacaagcgactacctaccgtataaatatgataaaaactgcgtttgttatgcaggtacgcatgataatgcaacccttaaagagtggaaagaaacaggagataaagcggaaatagccttcgcaaaggaatatttcggaataacaggaagaagcagttttaatttcggaataataaaaggcggaatggcttcaacggcggatctgtttataacccagatgcaggactatctggaacttgggaaggaagccagaaccaatgtgccgggtgtggcagacggaaactggaaatggagaatgaaaaagggagcggcaacggataaacttgccgaaaaaatagcgcatattactgaaatgtacggaagagcatgagaggagatataacaatgaaacttacagacagactgtttaattctgttgaagaactttggaacagctatttggagcatccgtttgtaaaaggaatagccgacggaacgcttgaaatcgataaatttagattttatatgatacaggactacaggtatcttcttgaatatgccaaagtatttgcattcggcataataaaaagcggcagagaagatataatgcgtcgttttgcacttatggtcaaggaaactcttgacggagaaatgacgatacataaaaaatatatgctcagattaggtatatccgaaaatgaagcgatggagacaaaaacatcgctaataaaccaatcttacacatcgtatatgcttgacattgccaacaaaggagacgcattggatgtgcttgtggcggttttaagctgcgcatggagttaccagtttataggcgaacatcatatgaaagtggacggagctattgaaaacgagacgttcggagaatgggtggaaggttattcctgcgatgattacagaagaaatacacaggatataatcgaccttgtaaatgaactcggtgaaggaataaccgaaagcagagcaaagtatcttgaggaagtatttataaattgcagtagatatgaatacagattttgggatatgtcttataataaggagatgtaattatgctggagtttcgggacgttacgttcaaatacgatgaggacgatattccaatgatgactgatctgtcttttacagtcgacgacggagagtttatatctatcataggcgccagcggatgcggaaaaagtactttgttcaggctcataaacggattggaaaaacctcaaagcggagagatttttgttaacggtaaatcgattgaaaaacaaaaaaattacagctcgtttatgccacagaaagatttgttgctcccttggaaaacgatagaacaaaatgtatgtttgcctatggaaataatgggagtaccgaaagaaaagcaaaagaaggactgctcggaagcattgaaacaggcgggactgcttgattatatgaataagtaccccaaagatttgtcgggtggaatgaagcagagggcgtcttttgcgcgcacattgcttacaggtgcggatatgcttatgcttgacgaaccgttttcggctttggactatcttacgagggtagatatgcaggaatggcttcttgatcagtggagaaattcgggaaaaacaataatttttattacacatgatgttgaagaggcggtatttttatcgaagaaaatttttgtaatacaagacagaccgttttcttctatggaatgcgttgaagttcctatggattatccgagaaacagggctgatttaaaacgtcctgaagtagctgatttaaaagaaaagcttatttccaaactgagaaagaaggtagaaaaatgaaaaataaaattaatcttccttctcttatacttacttttatactgctcatagtatgggaggcggcggcgttaggaatagacgcccagtacatactgcctacgcctgtgcaggtcgtagaaaaattatgggaactcagagtagtactttttacggtgcatttacctgctacgcttggagtaacactaataggacttattatatcgattatcctgggcgtgcttctggctgtaataatggacaattttaaaacggcggaaaaagctatttatccgataatagtagcgtcgcagactatacctactacggctgtagcccctctgtttatactctggtttggatattctatatggagtaaagtccttgtaaccatattaataacgtttttccctatagtcattaccgtgtttgacggatttaagtctacaaaaagggaaatggaagaattgcttgaaacatacggcgcttctaaaaaagacatattttttatgcttaaattgcccactgcgctgccgaatttcttttcggcaataaaaatggctattcccttaagcgttataggcgcggcgattgccgaatggctcggagcgcaaagcggtctcggttatttcagtaaaagaatgatgactcagcttgacggcgcgggggtttttgcgccgattgttctgctgtccgcagtagcaatgctttcggtggcattgatcaacattttggaaaataaaataataacttggcgaaaagagttataaaagttttttgaaacagttatgtaaatttgtcgattgtgccgtttacgaaatattgtatgcaaaatcctaaagcgcaaggggatatggcgatatgtacaaaatagttttagcattttccaacgaaaaaaacagaacccgtatatatgaaacattggaagctgagggatatactccgaaaaatatgtgcaggacaggaaaggaagccataagagaaataagaagactcggcggcggaataataatatgcggatgcaggcttcctgacatgacggctgatgatttgatgtattacgtaaacggtatagcgtctgtgattgcggtaggtcagcctgtaatgctggatatgtgcgaaaatgaagatatatacaaactttcaacgcctttgagaaagaataagcttatatcggcggttgcatatgttttacaaaaggattgtacggttgcagaggctaagacatcggtgcgtacagaagaagaaaaggaaattataaattgtgcaaaacagcttttaatgaaacataataaaatttcagagcctgaagcctacagatttatacagaaaaaaagtatggatatcggttttaagatgacttcaacggcgaggcttataataagacattataatttataactgaataatttgattttttgatttttgcagtttggtttaggagattgttatgaaattagataaaagtttttataaaaatatttttgcaatagctattccgatagctttgcagaaccttataacgctgggaacaagtatgatggatactataatgctcggaagggcggacagtacgggaatacttttatcggcgtcatcgttggcaaatcagccctttttcattttacaggtgcttacattcggcttggcaagcggatcgtctgtgttgtgcgcacagtattggggaaaaggagagataaaacctataaaggatatattttcatttgttcttaaaatagcaattgccgtcggaattatatttggttcggctgtattgttttttccggaaaaagtaatggggatttattctaacaatccggacgttataatgcgaggagtacagtaccttcgtattataggatacgcttattttacgtttgccataagtaatactcttctttcggcgctgaggagtattgaagtgctgagagtttccgtagtatgttcgatagtttctttctgtacaaacgtatttttaaactgggtgcttatattcggtaatctcggggcgccgagactcggaatacagggcgccgctatagcgactcttatagccagactttgcgagtttgttatagctagtgtttatgtacttgttatagataagagattaaaattcagaataagcgatatgttcaggcacaacaagcttttggcaggagatgtaataaaaaacggaactccggttgtcataaacgagcttatgtggtctttggctacatcggcacaggctgctattttggggcatattacatattcggcgggagaccccgtggctgcaaattccatagcaggggtaatacagcagctttctaccgttattataatgggtgttgccaacgcggcagccgttatggtaggaatggctataggcgagagtaatatggctaaggccgaagaaagggcaaaggcattcagaaatctttcgtttataatgggaatagccgcatgtacgtttatattggcgcttaaaaacgtattcatcggattttatgatattcctgtggaaaccaaggaactggcaagccggataataacagtatttgcatttataacaataggcacctcaacaaatatgactcttataatgggtgcgctgagaggcgccggcgatacaaaattctgcatgaggacggaagttatatgtctttggggattggctattcctttggcgcttgtgatggcgtttattgtaaaagcgcctgttccgattgtatttttctttatgaaaatagatgaaatagtaaaagctatattatgcttgataagaatgaaaggcgataaatggcttaattctctgacgagggaaggcgcggcgtaataaaaaaggatttgaactgtaaagttcaaatccttttttgattggtttttagtataatcctgccataattggagcaattacaaccgtaagaacgcctgcgattactatagccagcgaacccattgcgccgacaagttcatcgagctgaatcgctctggatgttcctattgcgtgagaagctgttcctacagacagtcccaatgcaataggattactgattttaaatatttttgaaaataccgttacaaacgcggctcctattataccggaaactactacggcaacgcatgtaacgccggctataccgccgagttcctctgttataccgagggctatagctagtgtaacagattttgaggtaagtccgaaatatacttcctctgatatgttgaagagttttgccattgcaaacatagttacggagcatgcaacggagccggaaagaattgcgcatataattgccttaaagtttttcttaaggacctcaagctgtcggtaaagaggtacggcaagagctattgttgccggcgtcaataaaaattgaaccattgatccgccgacattataagagtcatagcttacgcctgttatagccaaaaacgcaataacaataatgatagctataagtagcggattgcatattacaagctttgttttctggtttattataatacctattttaaatgccagaagagtgagagcgatgccgaagaaagccgttccgaacagaccgttataaagattttcaagcattacttctcctcctttccgttgttttcgcttttatctattattctttgagcaacttttcccgtaaccaaaaaacaaacgactgtggatacgataatgatagcgaaaataccgagaatttcatcttttatatcggcaaagcttgttataagactggctcctacaggaacaaacatgaccgtcataatacttaaaagaaagtcggcggcgtcctgtacctgatccagctttataacctttagacaaagaagtacaaacagaagaaccattccccaaacgcttgccggtactggtaacggtattacggaatttaggacttctcctaccagagacagtccgattataataccgaactgcataagatatttcataaatatgcccccttaactaatatttaacaataaggcaaaaatcatcaatataaatttattgaagttttataaaaataataattgtcctaccaattattataaaattctgtacaaaaaagtcaataaaatagagattaaaaaagatataaatttaaagttccgtatcaataccgtttattacggtatgttcaccgttatctatagggacaatcaagaatcttctaccgtcaatgatttttgcttctatctcgtctgcttttttttcgcttacattcagtattatttccgaattgttttcagcccatggaagggaacggttttctgtagaaatttcttttatttgttcttttaattcctctacctctttttgaagtctctgctctctctgctttttgcagtggttttcaatagcttttgtatcaactatgttttcgagaacaggagattcgtctccgaattcttcaatgcaggcggcttctatctttatcgctatatcttccggtatgcttgtcttaagattttccatggcatgattgtcaagagtagacggagtattgctcatactgttttcttcggctatgtaatttaacgcctgatgaacgtttattattacttcatcgctgtcatattcgctgtctgtcaaagcgttttttaaaatgtcgtcgaaagtctttttttcttccgaagcagtgcgtttgggtttacaaccgagagccgactccataaactccggacgaggctctttagcatttttggtgtaatagataatggaatgaatatcgctgcttctgtccgtgaaagcagggaaaacaaatcccgtatcaggcatggaaactacccagtcgcgtattctggaacctattctgtgagtatcttccctatagccgagagctgcttttgtaagttcaacagggcagatagaacatattatgtagctgtaaacttcctcagactcatccagcttattgttatcgtttgtctttgtaatgacatcataggcgtcatggaaaagaagtataagatagtttccgtcataatcgtagttatttataataagttcataaagcctatccgcaaggccttccgtttttaaaccgctgtccctcagaccgagaagaaaattctgtttgccgccatgcaactcctcttcaggattaaattccagttccagtagattatttcccactgtgccggaaagagtttttttggcaatttccaaatatttaaaaaattcatcgtcgacaaggtttaaaaatgtttcatttatttttaaaataatatttttatgggagtcgacgtaacatccgagcattttagtgaatgtacattcctcttttttcattctttttttcagttccgatatatcttttctgttcattattttatcctctcattcagaaaatattgttaaaaataattataaatttaaaaagcaattaccgcaagtatgaaataaaacacatatatttgggcagtataatattcagtgaagaattataaaaatatttagccgattatttagtttcagctgatttactttatttcagcatatcttaaaatctttgctagtatagctttttatcggtcgggttaaattaaactttgcgaagagaaatcttcgtaaaagccgatgttcagggatgtgaaaaaaatgaaagctggcaagaaattattggttataccgattttagccgcagcatgcctttttccgtcatctgcaggcggcggtgaaaagagcactgtagaagcggcagttgtaaaaaacgaagagaaaatgcttattccgggcggaaccgcggtaggcgttacacttgaaagcaacggaatacttgttctcggaacaggcaatgttacgggcagagacaggcatgtgtattcaccggctgaaaatattctcagagaaggggatattatattaagcgccggaggaattgaactggaagacaaagaggcgctgtctttggctgtaagagactgtaatgacaggcttgatttaaaggtaaagaggaaaaacgaggtgctggatgtaagcctgactcccgttaaatgcatggaggacggcagcaataaaataggagtatgggtaagggatagcacacagggaatagggactcttacctatattgatcctaaaaataacagtttcggagcattggggcacggagtttatgacgccgataccggagaactgatgactgttaaaagcggaaatgtagttaaaagcaatataacgggagtcagaaaaagtgaaaagggcaagcccggtgaactgacaggtgtactggataaaaatgaaataaagggcgaaattacggaaaataataaatgcggtatttacggcgttcttaatgagcagtcagttgaggaatattataacaagcctattcctatagctgataaatctgaaataagacaaggcgacgttacgatattaaattcatcagtcgacggcagaatcagtgaatataaggcggagattacgtcgattaatttgaaccataaagacgccgacaaaggaatagtattgaaaataaccgatgaaaatctgaaagaaactgcgggaggaattgtgcagggcatgagcggctctccgatcatacaggatggtaaattgataggcgctgtaacgcatgtgctagtcaacgacccgacaagagggtacggtatatttatagaaaatatgctggaagcagcggaataacaacaatgcccacagcgattctgtcgatgtgggcatttataattattctataaaatttttcaaataaatcaatagatccaaaagtacaatatctgaccagcctgtttcaggttgcccgttaatagcatttgatgtcttaaaattgcgtgggaactggtctaatttatatttcgcaacatttcgttttgttgttaccattccttttgtaccattctcaccggttttataatataaattggtgccgccgaacagagaacctttatataagtcgttcttaagtgcatgatatggagcaaaatcaggacaaatctctttcatgataagaagtatgtcttgttctaaattatccattgttaacctccttattctacattgatttctattgaacgattattttccggtatagtatatacagaagtaattttcaatagcactgaaatgttacgaattgtattgcttgctttttaccttatatgaatattaaaacagaagcactcatatataatgggaataggaaccttcggtttgcaaagctcaataataattaaataatttccgcttttttatatagtaacattaccaagctataaatctgtaaacgaagtttacagcaatctaatttctgaaaagggggaatactatatgaaagagtgtaattgttcttattcaacgcaaattgaaaaaacttttattaatcttaaaattcaattatgaatatgttttaataatttcttcagaaacaattcgttttgaaatacaacgatccatagcctgcttttctatataatgatgggcgccttgttcatccatttttaattcgcttataagcaaccattttgcacggttaactatacggatttccgccatcttttcctcaatggaaagtgttttcttttcggtttttctaagtttttcccttgcactggaaagccagcatagagcagtagccataaatgcttttgatgtcggcttcgaaagcacaaatacaccatgctcggctactttgtcatagatttccgcctgtagttctgcccgaactatcagtagaacaacggtttcttttgaatttcccatatcaattgcaaaacgcgtaccaacatcatcaggtagaggcgagttaatgataacataatcaaaagcatactcggcgagtgctcgcttggcagcgctgatatttgatacgaagtggactggagagtacttggattccgggagaagagcagatatagcattattaaatccttctgctgcagaaacgatcagaacgctatagactagttttttcaaactcatttttctctcctcctttatggattgttatttgtttacttattgcaataaatatccaatattgcgtcaggtatatgtgttttgataaattcactttcagaagcaattttgcaagctgtagctaaatctttcggcaatttttttaaatttgtcaaagtttcggaatcagctttataaagattaatatttgccgcatttggcatatcaagttgattttgaagtccatacagaccggcataaatcataagagcaaatgccaagtacggatttgctgtaggatccggcgaacgaagttcggcacgacgatatttgccgactgccgctggaatacgcacaagttgagaacgattctcttcagaccaggaaatataccccggtgctttgctttgaccgaaacgtctataagagttatcggttggattcagaaacgctgtcatatcctcaactttatcaagaactccggcaatcatatagaaaagattttcagagggttcaccgggctttactgacatattgatatgaaatccgttgccgggtgcgtcgtcaagcggttttgcagagaaatctgcccaaagtccgttcctgtatgcaatagttttaacggttgtctgaaaggtcatagcgttatctgcagcagtcagagcatcagaatagcggaagtcgatttcattttgaccgggaccctcttcgtgatgggaactttcgggacgaatagccatttgctctagagtaagacaaatttcacgacggatattttcgccgcggtcttcaggagcaatatccatatagccggcattgtcatacggcaatttggttggttttccgttttcatcaagatggaacagataaaattcctgttctgcaccgaaagaaaaggagtagccggctttttttgcatcctctattgcctttttaagtaaacttcttgtatcacattcaaaaagagatccatccggataggtaatataagtgaacatacgaactactttgccatgttccggtctccatggaagcaacatcaatgtttccggctccggatgcagcaaaagatcgcattttgattcgtcgccaaaacctgcgattgcggaagcgtcaaaagcgattccgtattcaaaggcacgaggaagttcctcgggcaaaatagatatattcttttgttttccaaacacatcgcaaaaggcaagacgaataaattttacatcctcctcttggacatactgcattacctcttcctttgaatacttcataatatcttcacctctttcttcgagaaatcaatttaattggctacatacatttgcttgtatgggtttttactgtttggagtaatgacggtaaacggagacgctaatatttcgtttatatcgtaaccgaataaaacgcaatattcggaaacatactttttaagctccttcatatcctcttcatcggcaggacaggcggtaacctgacttggaaactccacatcctcacagttgcttcttagaaacattttaccaccatgcattccggtgcatggaaaaaagccgacgattttcttgttttcagattcgagaccaagaacaacaataacgcctcctgcctgatattctcctaagaaacttcccgcagttccgccgattaccattaaaggcgctttatctttataagctttcatatgaatgccggcacggtatccggcatttcccttaacgaagattttacctcctctcattgcatatcctgcggcatcacctatatttccgtgaataactattttaccttcgttcatagtgtcgccgacagcgtcctgagcatttgcattgacgataatggtggcgccgtttagatatgcgccgagtgcgtttccggggacaccgtcaatagtaatttctttatttgacatacccactgcgataaaacgttgaccgcaacagttggttatggtgcagttcccctgaactttgcggatgttatcatttagtgctttgtagtcaagcctatttgcgtttattaacataatattataccacacctccaaatttatttctgtgattttcggaaagaaacaaaatatgtcgcttgctttttcatcagatcagggctgattgtattaagcggcatttacttaggcagcaatgatatatagaatccgatacattcattgcttccgataaatatgaaatctttaaatttttcgtcttttgtaaaaagtcgtttcatttcttattactctcccgcatgagaaattccgagtatttcaagttctttgtctgtaagtccgatgccgcgaagcatcagacgattgcccttaagagcctcaattgagttgatacccatgccgcccatcagttccttgatttcatgattccaagcattcatcagattgataagacgcatactgccgatatcgggattcagacgctttactagctcgggacgctgtgtggcaatgccccagttgcatttaccgctctgacaggtacggcaaagatgacagccgagagccagcaaagctgccgttgcgatatagcaggcatcagcacctagagcaatagcttttacaacatcagccgcgcttctaatactgccgcctacaacgagagaaactttattacggattccttcatcacgaagtctctgatctactgcggcaagtgcaagttcgattggaataccgacattatcacgaattctggtaggggctgcgcctgtgccgccgcggaagccgtcgattgcaataatatctgcgccacttctggcaataccactggcgattgccgcaatgttgtgaacggcggcaacttttacgataactggttttttgtattcggtagcctctttcaacgagaaaacgagctgacgcaggtcttcaatcgaataaatgtcatggtgaggtgcaggagaaatggcatccgagccttcgggaatcatacgggtacgggaaacatctccgacaatttttgcaccgggcagatgtccgcctataccgggttttgcgccttgtcccattttaatttcaatggcggcgcctgctttgaggtaatcctcgtgaacaccgaaacgaccgcttgctacctgaacgattgtgttttctccatagacgtagaaatcctcatgtaatccgccttcaccggtattgtaaagaattcctagctgagttgctgcgcgggcaagggaagcatgagcgttatagctgatagaaccgtaactcattgccgaaaacattatcggcatagacagttcaatctgcggagataagtcgcacttgattttaccgttctcatcatgttcgatttttttcggttttttaccgagaaaaacacgagtttccatcggttcacggagagggtcgattggcggattggttacctgtgaagcgttgatgagaattttatcccaatatatcggtaacggattaggatttcccatggaagaaagcagaacgccgccgctgtttgcctgtttgtagatttccttaatagtatcgctctgccagttggcgttttcacgaagaacacaatcgctttttacgatttttaatgctcttgttggacagagagatacgcagcgttggcagttaacgcattttgtttcatcggcaatcataacgcctttaatatcgttgaaggtatgtacctcattcgcacat

SEQ ID NO: 4346 - DNA, 9833 bp, Unknown
  16S sequences of unknown bacteria
gcgtcaggcgctcatccaggctttccacatctgcaaaatccatgtctgcaatggaaagatccgcccgccggcggtcacctttcccggccaggaacagcaattccgtgtaattgctcgtgcccgccaaacgggagccgaggcccagcagcgtcccgccgcccacagcgctgccgaatatgtgctccggctgtttgccctcctcggcatacaccagtgtggtgcccgtgcccatattgaccaccacgccttttttctgctggctgaagcgcagcgcgcccgccgccatggcttcaatttcattcatgcggcgcacggggacacccaggatctcctctcccacatgggtcgcccgtccgccggtagcggcgatccaggcaaaatcttcttcagtcatggcgttgtccgcagcaaaccggctcagtgccgcgcagaaggatttatggctgctcatcggccccatgcgcatgggcgtgataaagcgttttccgtcctccgtcatagccatcagctttgtggacgaggtgcccgcgtccagtcccaaaatcagtttcatgcctgctgctcctctctcagatattcctccactgcctgaagctgggccggggtgttcacccccagcatttcctctgcagtgcatgccgcgcacacaccgacccggccgcccgcgtcctgcagcagcttcggcacgtctgtcaggtagtattccccctgagcattgttgttgttcagccgccccagtgcggcaaacagttttttgcagtcaaacacatatacccccgcgtttagctcgcggatttttttctgttcgctcgtgcagtccctgtcctccaccactcggtcaaaggtgccgtcggcgcggcgcaaaatgcggccatagggcaaatcctccgtgcaaacggccgccagaatggtgcatacgttgccttctttctcctgcgcctcaaacatggcgcggtacgtccgctcacgcatcaggggcatatcgccgcagcataccagaaccgggccgtcataatcgcccacggcttcctgggcgcaggccacggcatgtcctgtccccagctgctcggcctgcatggcaaaggggtagccagcaaaagcctgctccactttttcgtgctgataccccgccacgataatgatatcttccttgttcaaaaactgcaggccgtccagcacatagcccagcagtggctttcccagcgccgtgcgcagcaccttgggcagattgcagccttccgactgcaggcgggtacctttacccgccgccaaaacgatcgctttcatttccgaatgctcctcattgcaaaaattttccagccgaaaaaaatgcgcgtttgattttcccgcgccgcttcggacgttgcttttttcatcggcagcagcaaaaacagccgcttcccggttattttaccatagaaaaaccttcttgtcacaaaaatttatgaaattccgctcttcgacaaatactatgagcgaacgaccaaaataagcaaaaaacagacgacacagaaaggcggaatgaatactatgtcacgcattgtgattgcgttgggcggcaacgcattgggcaataccgcacaggaacagcaggaaagaattgagcaggctgccccttccctgatcgggctgatcaagcagggcaacgaaatccttgtcagccacggcaacggtccccaggtgggtatgatcaacctggcctttgacgaagctgccaaaaacgacaaccgggtggcgcgcatggatctgcccgaatgcacagccatgagccaaggctatatcggctaccacctgcaaaaaggcattaccaaagaagtgcgcaaagaaggaaagccatggaagaccgccaccgtagtgacgcaggtgatcgtggacgaaaaggatcccgcattttcaaaccccaccaagcccatcggcggattttatgacggcaaaaccgccgccaagctgatgaaggaaaacccaggcgtcactttcgtcgaggacgcgggccgcggctggaggcaggtcgtggcctcgcccaaaccggtcgacattgtggaaaaggactcgatccgctccctgctggatgatgatttcattgtcatcgcctgcggcggcggcggcgtgcccgtaacaaaagacagccacggcgatttccacggcgtatccgctgtggtggataaggatttttccgctgccaagctggccgagctggtggatgcagaatacctgtttattctcaccgccgtagaccacgtggcgatcaactacggtaagcccaaccagaaagaacttcaggaaatgactctggccgaagcagagcgctactgtgccgagggtcagtttgcccccggcagcatgctgcccaaagtgcaggctgccatgaactttgtgaaaagcggaaagggccgtaaagccatcatcgcttccctggaaaaagcccccgaggccattgaagggaaaagcggtaccgtgatccacatgtaaaacaggccgcagggaaccacaccgagttccctgcggctttttcaggtctggccaggcggtatccccctgtaatatcgaggctttctcaacatttagctgcacataactccccactatagaaatggcagttgggtgcggaatgaatacggaacgtttctgcaaaattaaaaaaatcaagctgatggctcgtattctccctgcagataatttcaatttatggagcctatacacccgtgtgcaaaacaggagggcaatgcgttttgcagggaaatagttgaggataatgtccggacgattgatctgggtagggacaacgctgcgctcgtacaggtttttcctgatctttcagtatgagacgagaatgaacgccacgaggaacagggtccaggtcatcgttcaacagcttaatgatcaggcagccactgtccaccgatacctggatatgtgcgacgggagggttacacttatcctttctcttttttggtatatcaacccaaaaagtcctcaatcacatcgtagagatgagtgggagaaagctgttgctgcgagcaatgcatagccagatttgtgacgagtgcttcctttgtggaaatatcggaaacaaacagaatcagtttcttatcttgatagaccgcaatcccaaaagaggaataacttcctatttctggattgtggattttttccagctttggtatgtacgacagcattttgttaaccactcctttcttatgaaaaaatcatgcccgctatgcccgctcttccttctatacacgcgctcacagcctctgctatctttttcactgggtatcttgtcgtattgggcataaaaattgactcccttcttggttccagcagttttccactgtataccttaaagggagccatcggcactccttcaaaaacctattcattctttcatttccaaacgctctgccacaaaaccgctccggttccggaatgtttaccgcagccaccagagcgcttacgtctgccagatgcaagagcgcgcaagccggatccaaccgtatccgccagagatctacagcaccgtttcccctggcgtcaccaccggcataaggcccaagaatataggccgctttgaagcaatatgcctccactgcaggccgaatgcgaaaggtgatcatatgcttccttgcagtctatcttgattgctttcaattcttattatacagatttttctgttaatttcaagtaaaggatagcaacgaaacgccaagaggaaaagtcagcaccggcaaaacccactctgaaaaagacgtggaaagcatctgccgcatcggaaggcaacctgaatcagccccctctgcattatttcatcaaactgtgctgtggccatcgtatcttttgtttggagcgcaggaactgcaagtggatacggaatactatggtcccgatgatctgacgatagagcgagttgatcaatatcgatacagtaaggccaacgcattctataacatccgccgcttgcggcctgatctctggcagcacacaagcagtcacctttgctgccttggctgccatgatcatcgccatcttttgaaaaacagtacacccgattgtactgcggagcacggctcattctgggcaagctgttttatcaggcggcttttatacctacactactttattgcacacttacggattccgttttgtaatcttgcgataaacaggaactgtccaaaagaagctgaccgcttgattcttcggcgtaggcacaggatatttctaaaccgaaatgcaggtgaacttattgaaatataaggagtcctatggtaaaattattattctaattggacttttttctgtcaatgcgcgttatgccggttccacaattcgtcaaatatacactgcaatggacactatgcccaaagccgtggtcatgaatgacattatccccaagcatccggtgaatcatgtccgatataccaagcccgtcaaggctgccagcgctatgaaatttctgcccgttgagaaacaggcaaagtttctcgaagcagcgaagcagcacacgctctggcacacctatgctacccatatgataaaaagagaaatgcggccaaaagtattgcagaaactgccggagcatgtaaggatccagacagctatggatcggtatgttcatattacagaggaatctatggaggaagcggttcaccagtttgaagcagccaaaatcgcagcaagttaagaaactggtgtggttttggtgcggaggaacaaatgaagccgctgaaagccttggaaaaataaaggagttttgaaaactatgaaattaggtatcgtaggactgcccaacgtgggaaagtccaccctgttcaacgccatcaccaataccaaaaacgcccaggcagccaactaccctttctgcaccattgagccgaacaccggcatcgttccggtgcccgacaaacggcttgatgaactgtgccgcatctgggaaccggataaaaaaaccaacgcggtgatcgaatttgtggacatcgcaggtctggtgcgcggcgcagccagcggtgcgggcctgggcaataaattcctgggccatatccgggaatgcgacgccatcgtccatgtggtgcgctgctttgacgacgagaatattgtccatgtagtggatgatgtgaacgtacccgtgggcgtggatccggaaggcgatattgacgccatcgacatggaactgatccttgcggatctggaagttgtgcaaaaccgcatcacacgccagagcaaagcggccaaaaccggcaataaggacgccaaggccgaactcgcctggctggaaccccttgccgcctggctgggcgagggtaaaagcgcccgcaccttcgcctttgacaccgacgacgaagcccagacgctggcggtgcgggagatcggcctgctgtccgccaagcctatcatctacgcctgcaacatgggtgaagatgacctgatgaacggcatcgagaacaaccgctatttcccactggttaaggccagggccgaagttgagggcgccgaagccattcccatctgcgccaagaccgaagaggacattgctgaatacacccctgaggaaaaagcggaattcctggccgaaatgggcatcgaatccagtggtcttgatcagctgatcgccgccagctactccctgctgggcctgatctctttcctgaccgacggcaagaaagagtgccgcgcctggaccatcaaaaagggaaccaaagcaccccaggccgccggcaaaatccactccgacttcgaacgcggctttattcgcgcggaggtgtgcaatttcaacaccttgatggagtgcggcggaaaaatgagcgaagtcaaggcccggggcctctaccgctccgaaggtaaggaatatgtagtgcaggacggcgatatcatcgagttcctgtttaacgtataagaaggctgtcatgcttctttccttgaatagcattcctgaaaccgtgattcccggtttcaagggcggcactggccggacctgcgcccggatatatgccgatgaatccaacaaaatcatgcatggtttgctgccgcccggcgcatctatcggcgcccatgtccatgaaaccagcagcgagatcatctggatcctctccggcaccggcaaggcgctctgcgatgatacggaagaactgcttggtcccggcagctgccactactgtcccatggggcaccgccacagtctgatcaactgcggcagcgaagatctggtattcttcgccgtggtgccggagcaccgcctatgagaatgttgattcgtcgggcgctgtgcctcatggtatccctctctgccgccctggcgctgctgtctccggcttcggccgcatctttccgggacgttccaaatacccactgggcctatggcgcgatctgtgaaatgcaggaagccgggctggtcaacggtgttggaaatggttcttttgaccccggcggacaactctcccgggcacaattcctggctatggctgtgcggctgctggagcaggaaaccggcgagcatgcgactccggcttcttccggcaactattgggctgcgccctattatacggccgcggagcattttcatctttttggcggcggaagcaaaaatgccatcactctgtctggtatacaaaacagtcgaaagagtctggatactgcggtcacccggtacgaaatggccgtgctggccaacaatgtgctcgccaatgccccgggatatcgctttgatacctcaggcatttcctccgcagtcatgccggattacactgcgctgcccagccagtataaagatgctgtatgccggatgtacagtctcgggatcttgaccggacaagccggaggatatttcaacggcagtaaacctctgacccgtgcggaaagctgcgctgtcctgtcccgcctgcgcgcccgcttcgcagccatgggttccggcggtaacaccgaagccgcggagggctttgcaatccatttcattgacgtgggccaggcagacgccgcactggtgctgtgcgacggcgaggccatgctgatcgatggcggaaacgctgccgattccgatctgatctacgcttatctcaaacagcaaaacgtctccaaccttaaatacatggtaggcactcacgctcacgaagatcacatgggcggcctggccggtgcgctgcagtatgccaaggtgggtacggccttctgttctgtaacacaggacgacgccaaattttttcaaaacgttgtcaagtacctgaaccagcagggcaaacgcctgacggtaccccagtgcggcagcacttattcccttggcagcgcccagttccagtttctcggcccggtccgcccgagcgatgatcccaataatatgtctctggtgctgcgcatcacttacggcgatacatcgtttttgttcaccggcgatgcggaacgagatgaagaagccgatatcctgaaagcaggatatcctttgaaaagcaccgttttgaaagcaggccatcacggcagtgagacctccacttcctatccgtttttgcgcgctgttgcgccgcaatacggcgttatttcctgcggtgcaggcaattcctacggccatccccacgatgcagctctatcccgcctgcgcgatgcagacgtaacgctgtaccgcacagatctgcagggtacaattgtgtgcaccagcgatgggaaaaccgtgcgttttactccgtccaaaaaccctgccattcaaaccaaccccacggaacaccagagcagcagttacatcggaaaccgcagctcccatgtgttccatcgccccagctgcgccaaccttccgctggagaaaaaccggatttattttgccaaccgctccgacgccgtgacctccggttatactccctgcagtaaatgcaagccttgacgcaaacaaacgcagcgccccgcaaaaaccatcggggcgctgttttgttctctcttgcgccagaaaaaaacttgtgatacaataagcacgttctatgcgggtatggcggaattggcagacgtgcaggatttaggttcctgtgccgcaaggcgtgtgggttcgacccccactacccgtaccaaaaagggaggctaaaaaagatattggggataaaaacccagtgttttcaaggcttccaaggcccgtagatgagtaaatctacgggcctcattttatcgatatttgacctcgcgttattcactctgatgagagtcaaacccgcgggtagcagatgatatagagaacagaaaagcgcggcgatatttcctgcggggaatatttgccgctctttctttttggccggaatctcaaaagtggttccggttttttcattttcagaggaggaatgagtttgggaaataaatattttgcggagttagcccgccgcctgcgggcagccggaatcaccacaggccatccggagaagaaccggctgacagtgctgctgaacgaccagccggtcctctctgtttcggcggggagtgatgtgttcctcctccctgccggaatcaatcagccggaagccagtgaactataccataaagttgcccagaccgcagatgaagtgtatgcctatgttgatgcggtccagaccgcccccatccttcatgccagcggtctgagtgagaaattccatctcctggcggattttggcggcgcagtgctggctgggcgtgaattggaaaacggctggggttatcaatttgttacatggatctgggactgtagcaggaccagcgtgagccacggacattattacgaggaagatttttgcggagcgaagcaggacttcgccgtccgttccgggctgatctccaaggcccagcttttctcattggaggaacgagccgagttgtaccgggctacaggctatctgctggatgaaggttcggagttggaagatggccagctcaaagccttacagactgcaaggacaaagattgaatacactgtcccagacctggcggacaggctgaagcagggacacgagcaggaaccacaaatggatatgtgaaattggaagaacaggggccgcatctgcaccttatgtgtagagatgcggcccctgttcttttatgctcagaaagagggagacagccatgacaaaatatttcgcccaagataccccccaagccagtttggagcgcatgatgatgagcgtccccggtttccagcgtcgcggcggtgggataagcttcagcagcttccattacaagccagaggatgtagactgccaatattgcctgcactatcgccgcaaatcctgccagattcccatctgcccttatattgcagagaggctggcctccggcgctctggaataccatgatctggttctggagtgcttgggcaggcacctccgtttgcggctgtaccaaagaattagatccgtgacgcattgggatggcccggatcaggccatcctgcacaagatccgtccgtattgccaaagggcggcggacaagccgaaggaagatactccttctgtctactgggcagccctctaccttttggcctcaagggaatcactttggaagacggtggttccggcacttgccagcggatatattgactttcactgcatttcctgcaggggcttggcggttcgggactatcccatcttttattccgccaaacggctgtatgagcgaaaattccccatggacgccggtgaactggcgaacaggagcctgatagatgatcaggatttcctcaatatcctttatgcgactctaattgcccggtatgggaaatcagtcatggacacggaggagaggacatgagctatgtgatccaagcagttttgagcaacgtccggcatcctgaggtatgaacctgcggactcccattaatagcctctggagcttcaacaagaagt

SEQ ID NO: 4347 - DNA, 2221 bp, Unknown
  16S sequences of unknown bacteria
attttactctaattatacttttatttcaagaaccttgcagcaagtttcaaaaaaatagttcttggatctgacaatttcggaaaaacgtatcgttttcggtcggatttttatacaaaaacaacataaaatatcgtcattccttctcaatacagttttctatgatgacgtattcgatgcaaaacggtaaactgcgcacaaatccaactgtaatctatcgaaagctaacttttctccccataaaatcagaaaccgggccggataaatccggcccggcaagggtttgtcaaaacggttccacctttcccaaaagcgtaccaaaaagaatctccattccctttccaaaatcgattttctctaccgcattttttgctcgtatcggatattctcccaataccgttccttccttgctgactacgaccttgccgagcagctgtccttcttctactggcgcttccacatcctcagccagctcaacctcctgagtcaggctattttcctctccccgcttcataacaaaagacggaggcagatcataggcaagatctacctgccgctgcactccatgcaacacaggtaccggtgtcagctgctcctgtaatgacggtggctgtaccgtaacataattggcgaacccataatccagcagcgttcggcagcttgcaaatcgctgagcactggtatccgaccccagactcactgcaatcaaggaaagattatcccgctgggcagacgccgataggcaactgcccgcaccgtttgtcgtcccggttttcagaccggttgcgccgttataaaatcgcaccattttgttggtgttgaccagttctgtcgtcccaccccgtaagctgtccatccagactgttgaatatcgggtcacatctggatagcgcagcaatgccgctgacatcagtgcaatatcacgcgcagtggaataatgctcctgtgcatccaagcccgttgcattggcaaaatgggtattttccattcccagctccttggccttctcattcatcatgccgacaaaggcatcttcactccccgctaccgcctctgccagcacaacagcggcatcgtttgccgaggagataaaagttgcccgcaggatttcgtccactgtcatttcttctcctggctccaaccagatctgagagcctcccatggatgctgcatgttccgaacagctcaaaagcgtatcatactggaattttccctgatccatcgcttcaaatgtcaaaagcagcgtcataatcttagtgatggaggcaggcggcatgggagcatcggcattcatttcatataacacctgcccggtggtttgttccattaaaatagcagatttacattctaactgcagtcccgattggtcagatgattcttttgacacctcttcagcccaaaccggtgtaattccaataaaaagagcgagcaggtatgccgtcgcttgttgcaatagacgaaaggtcaattttgccacctccgcagatatctgaatggtacagtctatgctgcaacgaacggcgacatgtctgcccatcaggaaaaagaccgttttaggaaaaaatagctaaaaaatccggtttttcacctgttttccaatgattttcaaagcaaaaaaccggcttttctgtcctctatttgcaaatactaaacgggaactgctcttgcagtttcaatcgcgcgcgaatcaaaaggcggtgcgaaaccatgaaaaaaattgtgttttttgcggtggcccttttttgtttatggcaaacgccccacgccgccgccaatgaccagatggattacctttccatcgaaaacaggatacaggatgaatgggtagactacacttacagttatccgcaaattacccggggagaaagccgggtaaccgaacagaggttgaacggctttttgcgggaatacagccagagcacagcattgaacgcccggctgcaagcaaaaagggaatcacggcagttccatggaaaaacaacctttgcaatcaagcgaaatgatatccatttcttcagcattgtattttcctcttgctgcaaaggcaaacagctgcaaaaaggctttgtttttctgccccaaaacggcttacaacttcggttggaggatctgttttcctcgccggatttcgctgctgtcctagaagaaaaaagtgctgaatggcgccaagagcagggagtctccagcaatctacctacccccctgtctcttatacacatctccg

SEQ ID NO: 4348 - DNA, 20476 bp, Unknown
  16S sequences of unknown bacteria
cgctgacagctctctttaccaaagagagccttgctctgtggattgtttacatcaaatttcgggtacaaataacaaccccaaaaattcgcaattttgttatccctgtgtaaagagagccgggtttgcgatattctgttttgcgatttaaatggtacaattttgtaacttttatttacttttataaaattatttgtattctaattaaaaaaacacaaaattaaagcgggcagttcagttttgcccgcttttttactgtcttattggttttgaattttcagttttttcattgtgggtatcataataagaactgtcgcaataaatgtaaccgtgtcggcaatgggggcggagtaaagaaccccggtaaccccaagaaattttggcagggtgataaccaacggaacatttatgacaaattcacgcataagggataaaatcattgcttttgcagggcttccgattgcttgcaaaaatacgcttgatgatttttgaatgcagcataagattatggcgattaaatatgtgcggaaaaccataacggcaaaatcattgtacaaccgactttcgctgccgaaaatacctataatctgtctcgggaaaatctggaacattaacagcgatataacgccaagggtgatttccgccttcatcatcgctttgtaaatttctcttacacggtcagtgcggccggcgccgaagttatagccgacaataggttggcagcctgcggcgatgcctattgctattgaaatcacaatttgaaaaactttcataacaatgcccataaccgtaagtggaatatcagctccataaggtgaacttgcgccgtattttacaagggtgttgttcataacgcccattgccacaactgtggaaatttgtgttaaaaacgaacttatgccaagaggtaaaaatgacttgataattttaaaatccgggcgaaagctcttttgaataagctttacagacttcatacgggtaatgtaaattccgcttaatacagccgttacaatctgtccggttatggttgcaagggcggcccctgtcatacccattttaaatacaaaaatcgccaaagggtcaagtatgagatttataacgcagccgattattgtggacgccatagcaaatgcggggcttccgtctgctcttataaccgagttgagtgcgcttgtaaacatataaaacggtatgcccaacactataacgccgaagtattcctcggcgtaccgaatattattttcagttgctccaaatgcaattagaattttgtccttaaaaaccaaaaacaaaaccgttgccgcaatcgccgtaattactgtaactgttatagcgttgcctactgtttgggctgcggttttctcgttgtttttgcccaaagcgatacttaaataagcccggcaaccgtcgcctataagcaacgccaaagcgagggttataaccgttatgggaaagaccacatttgtggcgccgttgccaagataacctatgcctctgcctacgaaaatttggtcaacaatgttatacagtgatgataccagcattgatgtgatacagggaattgaaaattttaatatcagctttgatattttttcttctgcaagatattgatttgtattcataaatcataatttcctttcatattatcaaaatctcgaaaattacggtttatttttcctaaaaaataaaactgcgacaaatctactgtaaaccagcatatttgtcgcagcttgagcgtacaaacgaaaccttgtttccgaatacgaacattttaatacaaaatttatctaaggtcaataaataaaattatttttgacaacatcaacaaatgaccacagagttgtagcgcaaaaattttgtataaaaattttgcactattttgaaacgtcctctttttcgtgttcctcctcgtttttgatttcccagtgaataaggaaagtgagagctgcacggagaatgattattgcgcctacctgtacaatgtctgacatatcacgggccacaacggttcttaaaatctcgccgcccagtttaaattccaaagccattgcaagaccttccgcaaggttaagcctggttttggggtctttttttatccaagaataaaatgcctttacggcggttaccgctataaccgtaagccccataagttcaagaatgattacaaaaaaatttacggcgttttcaaggccggtttccaatactcggtttagtgaaaatgccccaaggctgatagcgtagttcatataatttaatctcctaatatactttggctttattttagtacaaaaaatatgagttgtaaatcaaattaaatataaaaggcgttttatacaaaaaaatatttttttatttgacaaatggcataattaaaagggcaaaatacccatgtgtttctaaattcacatgggcatttggtttattatgcttttaaattttcttttctgcttttgtatctgccaaggaaaacacctgttaaggtttccgccggtaattcttcgccggtaatgatttttttaagattttcctcacttgtgttggggtttgcaaaggaaagaaccaagccgtcataatctttgggcacggtgaatataccgtttataacatatatcatgtcgtagtctccgtcatattttgtgttgtcttttgtaaaatcaagattttctatggtgtattctatcgtttttttcttaccgtttacggtgattttttgcttgccggtaatactgccgaatctttgggtgtccttgctccaatcaatgttcaccttttccccggtgtaataatccgctatttcgcactttgggggatatattccgttgtagccgccggaatattccctgttgccgtactcatcttttgtcgtctcctttaaatccgcaaaaaagaaaacctgaaaatgtatttcgtcatttttgtcaccggatttggcgtgataattttgctccataataatataaccgtttacggtgccgtggtcgtttaaaatattactttcctcaccgtcattaagataaaatctgtcgcaggttataaattcaaagggcagtccggtttccgggtttgcgttttcacatggaatttcatacatcacatcaatgtctttttcctcaaaataaggggtctgattttcgacatttttactgcaagatgttaaaaacacaaggcaaagggcgaaaaccataagtgtaaaaaatcttttcatactgtttatcctccgttttttatttaattgtaacatacttggtaaaaaaaaaacaatatttatccggaaaattacaatattttatggaaaatgacagcaacgaggatatttgcggaattccgggcaagaataagtaccggagggagagcaaattgaaaaagtattttaaattattgttccgggttttggcggctgttttttgcgttgccctgccggtgagatacaacctgccggataagatgtacacttccgacagggggcaggcggaaataggccgggtgcctgaaattaaacttattgcgaaagacaggcggatttgcgccgacagaaccgacgccgagtatgacgccaaactatttggacttatcaaggtgaaagaggttacagtcagtcaaaaagaaaccagatatgtggctgtaagcggtgagcccttcggccttaaaatgttttgcgacggtgttatggtagttggattttctgatatattgactgccgacggttacaaaaacccggcaaaaaatgcgggacttaaaatcggcgatattgtaactgccataaacggcaaaaaagtgcaaacaaacgaagatgtaggcaggataatatccaagtgtcgggggcaggaaataaccgttgagtatctgcgtaatgacactgagaaaacagcccaaatcacagcggtgtatgataaaaatataggcgcttacagaagcggaatgtgggtgagagattccagcgcaggcataggtaccatgacattttacgatatagaaaaggggcttttcgccggcttggggcacggcataaaagatatagacaccggcaaggaaataaggcttttgtccggggaaaccgtgccggttaaaataaccggggtgacaaagagcaaaaatggcagtgcaggacggttgaaaggcagtttttcatcagtgagagcctcaggcaagatattgaaaaacacatcggtgggggtttacggcaaaatttactctgccggggattatcagcttatgcctgtggcaaacgaaatcgaaataaaacccggcaaggcctatatgctaacctgtattgacggacaagagcccaaaagctatgaaatacaaatagaaaaaatttacctcaattcaaaagaccggacaaaaaatatggttataaaaataaccgataaagaacttttaaacaaaacagggggaattgtccggggcatgagcggaagccctataatacaaaacggtaaacttgtgggagcagtaacccatgtttttgtaaatcgggttcaccgaggctatcggatatttgcacaaaatatgcttaccgcccttgacagcgcagaggaaaatacaaaataaaaattccggggaacaggcgaaagcctaccccggttttgtatttgtttttactgtgtcgctacattataaaataaaccaaaacagatataaaacgtagaatgtagcgccccacatcatatttcttttatataacctgtcgtttgtgcggtttatataggcggacaaaaattcattgattgaaattaacggcatatagtaaagaaaagcgttcccgtcggaaaagctcttaaatataaggtagcagcacacaagggtaataaatccgtttaaagctataagaagtttatcctttgttgacctgttgttaaaattcatatttgcacctcaaaaatcatatatcttgtataagagtaccattaaaaaatgtaatatcggtgaaaacaaaaaggactgcccgcagcagtccgaatttgaaaagaagaaattttattaggattaattttattatgtatcgatgtatctctcatcgacaggtggaattttaccacagttttacagtattttctgtgacttagtcacattacacaaataaaagtattatttttgtgcatttgcacaataattgttagttgtgacttgactttttcaaatattgtggtatccttatagggtatcaaataagggtacaaccgggtgtggcgcagttttggtagcgcgcttgaatggggttcaagaggccgtgagttcgaatctcgccactcggaccatatcgagtattcataagggatttgactttatgaatactcgatttttgttttttcatcttgatttttatgtgcagagcagactttatgtctgctcttttttgttatgccgatttaggttctgtcaggtattcgattgaaacgccttgtcgtatatcggctgtgtaattttctcggctgtaacattccggtatggcaatatatccgataaagcgatagtaaatcactattcgttgtgttctgtttttgcctgtaccctctgtttcaaacacatcaatatggtcaataagctctctgagcaagggtgcggtcagcttttgcatgtgcataaactgccttacggtttgaatgaatttttcacactctgtcttttgccgatgactgtccgacattgttgtttttaatgtgtgaatttttgatttcagttccaatctttcaacttcgtatttatgtgagagttctgaaaaccattcgtcgctcactttacctatggcgttatcttcataaagcttttcgtaaagtcttataaccgtttcaagtctaagctccgctttgtgaagtgcttcttcatttaccctttgctcgtttgccaatgttgtttcatttttcttaatcagcagttccgcaaaatattgttcgtcacaaagcagaaaatgtgccatttgtctaagttccgctttaaccacttcttcaagagaatcagctctgacataatgccttccgggacaatttccacgataatcgactttgttgtcagaacaagtgaagtagtgaatatccttgtttatggtatttgtatggtaacgcattttgctgcgacagtcgccgcaatatatcaatccgttaaaaatacttctttcgccgttttccttcttgggagcacgacgttttgtttttgccgttatttcttgcactcggtcaaaaacttcacggtcgattatgggttcgtttgcatttttgaaaacagcccaattttctttatcgtttgggtatctcctcttattcttaaaagatttggaatatgttttgaaattgataatatccccgcagtattcctgttgtgacagtattttttgtattgttgtcttacaccatttgtacggattggtttgtgttttctttccgcctctgttcagtcctttggaccgccaataagccataggaataagcacttcgttttcctgcaattctcttgcaatggtttcattgcctttaccgtcgaggcacattttgaatatgcttttcacaacggttgcggcttccgggtcaattatccatttctttttgttttccgatgatttcatatatccgtatggcggttgcgatagcggctctcccatactgcctctgagcctgtgggatgaacgaattttttttgaaatgtctcttgcatacatttcgtttaagatgttcttgaagggtgcaatttcgctttctccctcatcgctgtcaatggcatcgttcacggcgataaaacgaatattatgttcggggaaatagctgtcggtataattacctaccgaaacataatctcgacccaggcgggataaatctttaaccattacggcagaaacaagtccgatttcaatatcgtcgataagctgttgaaatccgggacggttgaaatttgttccggtatatccgtcatccacataatattttgtatccgttaaacccatttcttttgctttttgtgatagcagcttcttttgattgcctatggagttactctcgctttccgttccgtcatcacgagataaacgacaataaagagccgttatccctatttgatttttgtttttcgactgcatttaatcctcctttccgacagtcgaacaatcatatacatctgtcattttatcattgatgctgtcaacagacaattctgcgaaatcgcccgtgagatgttttttcaatctgttattcaaatgattgctgtcgctatattttttaatgttaaaatcctcaaatttgccgcaaacgatatatcttactccgtttatcatatatttgcctgtacccaatctgaaatttactatttgctttttcatatcatctctccctctcacgctgtcgaattaaatattttctgtaatgctcgcaagctttaattatgaaatcttcggtcttttgtttatccataccctttggcaaaacatcacgcagcttgtcggcaggtattcgcacttgctctttttgatttggcttttcttcattgagaacggcgaaaaccgtatcgacgaaaaagttgccgtctttactgaattttcttaatctttgtgcttgtgacaatgacggtgtagcgtcggtaaattctatttgttcaagcaatatttgttgttcatattccgacaaatatgaaatttccaccgcaggagtaaaggctatcctttcctcgtcaacaagtttaagtaattcgggtattaagtatgtcaggcggatatatcgctgaacatttctgccgctttcggtatcggatatgttatctcttgacttgtggacaacttgtccataagttttaccttgatgctttagtgcctctgatttcattttgtatgcaaaagctttttcactcggtaaaatatgttcacggtgtatgtttgaatccaccatttgcacaatcgcctcgtcttttgtgagttcttcgattattgcgggtatgcttgttatccccaattccttgcacgcttcaactcgtctgtgtccgctgataatttcatatttacccgccggaaaagaacgaacgattatcggttcaagcaatccgttttcttttatgctttctgttaattcttgttgttcgattccgcttctttccttaaacggatgattttcaaaaggaacaagtaaatctatgcttatgttttttatcatttttctgcctcctttaatatttcaacttttttgagggaaatacccttatggtttttctcataaatcaatcttaaatttgttccgttatctatttcataaaagccaaggtaactctgccaccaaaatacaggtgtgattatttttcttccgtcacttagccgaagaaaaagtcgcatcatatttcggcttgcctctgctcgcattatcaactttgcgaagtattcgccctctttgtcaataaatttgtagtcggaggtaatgatgtgttcttctctcatttcttctcttgtgtaaactttgttttgaatcataatatatcccttcttaataaattctctttatcggaaagtaaaagctatatatttatttatatatttatacggctgctctccgttttggtttttaatcaccgttttatctttgctttacacctccgtttctgtattgatttggtgtcaaaatcggtaattttttcttttgtatcgggtttttattgaaaatcggtatcgctatattaaattaaccgctgtcatcatattcacggcgatttttaacgctttttgcgcctcttttggatttgtacttcgggcagaaaacaatgattgccttgtggctttgcttgcatttgtttttgcatttaagacaaaggctgttgtatgttcgtctgcctgttttgggatttatgaaaaaatcccattcttgttttgctttctttgataatctcggcattgtaaaaactcccttcacttgtttgaacagagagaggcattttgcacccccctatttgcaaataaattttccctctcacttggtaggcaacgaaaacggtcaaaaattaaccctctgaccaatatttttttattaccccttcacttgtttgaaccgggaacgcttttttggggtgcttttcggaaaattcataaacatttaacatttgcccctctactcatttggacaaagggtgccgaaatgcacacccaaaattgacggtttaataaaaattatttgggaaatttttttatgccctctacttgtttgaaccgtgaacaaaaaaagtcagggtatttcggcgaaaaatttgcaaaaaaataaagcccctcgtttcttgaaagttcaaaaaacgaaggactgggtccgtaaaaatattaaattgtaattgcaatgcacaaatttagcgagcagaccatttgtatatccacataatacaaacggtaattttaggggctaccctaagacccgtggtgacgataaagaatttatttgtatcatcattttttatgtgcgaatttttggactgtaaataaaaatctttggcatacgccaactaattatattgaactttcgctcttttgatgatataatcaattaaaagccgcaaagaggtcgggtatgaaagtcagttacgataaattgtggaaaattctcatagatgaaaaatatcagttgcgagagcaggcgcacataagcagcaattccgttgcaaagctcggtaaagacgaacttgtcagtatggaagtcttgcttaaaatatgcgaaacccttgattgtgatataggcgatgtatgcgaattttataaggatgacggagaaaccgaaaatgcataaaacaaaagaacaaatatcatacaatatgtaacaagttaaatccaaagacacaaagatagaagttatgctcagaaaagaactttggtcaagaggtttgcgttatcaaaaaaattccaagaaagtattcggtaaaccggacattgttttttaggcaaaaagattttagaggttaatcaaatatataaaaatgagagaatattgaaatggataaatggacgagagaagaagaaattattattttagatttatattgtaaaattccatttaaatcatcctctaaaaacaaccccgaagttataaaaatagccaatttaattggtcgcactcctagtgcagttaatatgaaaattggtaacttcggaagttttgacaatcgcctgaaagaacaaggaatagtaggactttcaaatgcaagtaaactcgacaaggaaattttttacgaatttaatgaaaaatgggatgaattggcatacgagagtaaaaaattgattgcaaaatataatggcgaacaaatttttgacaactacaaagatatccctaatggatatgaaaaagaaactttaataaagcaaagagttcatcaacaattttttcgtcaagctgttttagcgtcttacaatggtgcttgctgtataacaggattatcaaaccccgaacttttagtagcaagccatattaagccttggaaagacagcacatctaacgaaaaaactgatcccaaaaatggactgtgcttaaattctttatatgacaaagcgtttgatcgtggctttataactatatctgacaaatacgaaataatcgtttctaataaaattagagatatttgtaatggcgaatcagttgataaattctttaatatcttaaaagggcataaaatcaatttaccagagaagtttttgccacaaaaggagtatttacaatatcataatgattgcatatatgaaaattggtaatgagaatgagtaataatatctcgcctgaatcaggtaatgatgctatatttttatcttctatgtatcgtgaagataaaaattccatacacggctgtgaaaatgaattatatattatatattacaacggtgactcaaataatggtcatggcagttttgagattgaaataatatcaagcaatgtagcaaataatttacttaaagatgtgggagacgactatattaagttttttgattacttgcctcaatattttgaaggcaagtgggaatatgctgacagagatactaaactatttcaagaaatttattctatttataatgaagctgactttattgtatctcgagatggctcactaaaagatgaattcgactttataaaaaactggtgtttgaatattacttattgactcaatatatctattactgtattgtaaaacatgcagatataattttccaaatacggtattgaccgaatgcgatataagaaaaatcaatgcagatgatataccagattttgatattctcacagccgggtttccctgtcaatcgttttcggtatgcggtaacagaaaaggtttcgccgacgaaagaggaaatcttttcttcgaaataatgagaatagcagatgctaaaaagcctaaaattattttccttgaaaatgtcgctaaccttaccgaacacgataactgcaaaacctttaaccgcatacacaacgagctttccgagagggattattacatacgatacctcattgcggatgcttgcaattacggaataccgcaacgcagaacaagaacatatatagttgcatttaaggactatgagatgtacaacggttttcgctttccggaggaacagtcgctgaaaaagcatatttttgatattatcgaccgttcggtaaaggctgatgataaattttatcttccaaaaaattccgtacagtatcaaaaaatgaatgcagcaattacagatgaaaaccaaatatacaggttttcggattacggtattcaaaagagtaaatacgaaatatcttttacgcttaaagcaaatatgggaacatggtacaaccgtatcccgattataaaagacaactttggaatcagaacgattacaccgcaagaatgtcttgccttgcagggatttcctaaatcgtttgatttccccgatattccgataaaaagtatgtataaacagtgtgggaacacaatggttgtgccaattgtaaaaagaattgcagaacaaatagcggttgccattcaaaacagcttttaaatcaatatactcgttgtttgttaaatatttattttacagttaatggaagattgagattggagaatgcatatgacaaacaatctagaaaacttaaaaaattatttttgcacagaacatgagaaaaaaattttctgcaccaaactttgcgtaaaaggaaaatgttttgacattttgtatgattatgacaaaaaacatgaaatagataattttgtttctaatttttctgaatatttgccgtattatgtgtataacgcagacactttagaatgtattgacactgaaggagatctatcgactatacttaaagaaatttcaaaaaagtgttggaatggtccaaatgtccccagtcgcaacaaaaatgtaaacgggatttttggcgaagtatttttggatttttatgaaagaatcgtaaaaaaagcaacggtggcctgtacatacgcaagcagacgtgattttaatagcaacaatgaaaacagaggttttgataatgttttattctgtataaaaaacaatgatgttgagtttatttttgctgaatctaagtttgttacagacaaaagtacagcttcttctgctttagtaaaagatataaagggagaacctgcttctgaaaataaaaaaactttaatagggcatcttactaaagattttatgaataattatattactttcgttgtagagaaaaattcatatttttcagattcagacaaagaagtgctaaaaccttttattgtaaaactaaatgacacacttattaaccataatggaaactttattgactttttaataaacaatgatgttcgcattaactgcgtgtttttcgcaatatttaagaataaaagtgttaatccgggcgattatgtagatgcttatgatagtatttatttcgaggcagaaaaacatcttaaagatattggcttcaaaaattattctatagaaatagtgtttattcccacaaaatcagcgagtacagaaattaaaggagcaatagatgaatattataaatagaaatgatatagttaaaatattgaacgaatatgcatttgacaataatattcagcctgtaattgaatgtttaaatacacttttggaaaataagcaacaatatcagtctaacattgatttaatttttatggctatcgcatccactcaaatgtatggatttttatcatatttgacggatgatgaacaacaactattctttgaatgcgattactttcgtagtaattcatatagaggtattgaaataccattctataatagaggacagttatcttttttgtatgaacttaatgataatcagaaggtgtttttttccgcaccaacgtcgtttggaaaaacaagtattgtaacagagtatatattaaacagcacagataatcttaataatgtagtatttattgtgcccacaaattcattattagaagaactgtttgaaaaattcactctttataattcaaaattagaattaaattataatatttccactcagccggtttatccattaaccggaagaaatattctgtttctaactcccgaaagatttatgattgttgcagaaagtagaatgataaacaactttgatttaatagttatggatgaaacttataaaatagttgatgctcataatgaaactatatctgattttgttaatcatagagcattaaggtttagaaaagtagcggaccttatagctaaatcaaatagcaaagtagtatttttaagtccgtttacatattctttgacaaaatccatgagcgattttctaactaagcataatataaaaaagattgatcgccaacttgaatatgtaaagcgtcaaatagtaaaattagacagttccgatgatgctaaagaatattttggagaacgcttgacttattacaggcgcaattcgagtttaacacaaaaagcaaatcttattttatcaaagttacgttcaagcagttctatcatatatgttcctaattattctaaagcatatgaacttgcgaagagcattgatttttcttgccttaacaaaaatgatgatccaagatatttagcttttataaaacatattaaggaaaattatttagtaactaatagagaatcctggatcgtctatgacgcattatgcaacggtgtgggaatttatatatccccattgcctcgttatatcaaaaaagaaataataaaactgtatgaacgaaaagtgttgactactttaattgtcacatcagcatttacagagggtgtaaacacctgtgcaagtaatctgatttttacaagtcttgttaatggtcctaacactaataaattatcagatatcgatgttttaaatgtttcaggaagagctggtcgatttgcaaaaaatactattggcaggattttttgtgtgaacaacgatatatataatcgagtcattgaacttcaaaatacaagcgatgttaaattagaaaattacaactataaaaaaggactgcaaagacttgattttgaaattgaaatgatggatgatgagtatttaagtgatgcacaaaaagaagaattaaaaatgcaacaatttgaaattgaaaaaatgggtttgagtaagtccgacttaaacatttccctaaatgtttcgaataattggaaaataattttatacaaacacttcacaaaactttcttgtgagcaaatagaagagatttacaaaaggatcacagacatattcgaacaaaaggaaggtgaatgtactaatgctttagattatatttttaaagatttgagggatgcttttataaatgctcaaattaatgtatttccgcaagaaccttatgagataagtccttttgataaatctggtgattttacatggggaaggctatatcaaatttatgtttcaggatttcctaagaaaattatttctaataatataaattttatatcttacaaattttccaaaatcataggaaacaatcattattcgaataaacgtgaagtagaatcgttatttgaatccaataatgctaagtggattctcagatactataataacgatttatctcttaatatgaatgctttttatgctgaaacattcaaaatagtttcaaacataatccagtacaaaattcctttttacctaacattttatgtgtctatattcaaattgtttatgaagaaaagaagcaccaataaaattagtggttctgactttgatataaatcgtcttataaatatttttgaggacggggaaacttctgaagaatattcaaaacttttagattacggtattcctattaccacaattactaaaatttcaaataacaaaattagtatcgaaaacttgaaaaagcgaaactatgattcaaagatttttgatgaatatgaaaaaataattattgaagaaacaataagtcttttatgaattttttaataacatcttttcttaataaacgcagcagatatgcttaattatctcttacttcttagacttgtttctggcttttcaatgctcgcaagaaaagtagaataaagccgtcaaatattggttaagttttagcgtagtattgattttataatttgtagacaggtcttagggtgtccataacgaggtgtttggtagtgcggttatccaaacacactgctcgctgttgcaatacaatgaagcgaaagtaaccaatttggacaacctgtccttaattggtctgctcgctgagattgtgcggaagcgggcaagttaccgtttggataaccaaatggtctgcttgctaagattatgcattcggatctcacaaataaaattaaggcacaacctacggacattttcccgtaagttatgcctttttctcatctataaatcacttgctcattaacgatttctgttgctcgattacgaatattattcattttttgtacccacaacatcatattttctgctttgagtttttctgtaactcgctcctgttcggcgagtgattttactgtctgttcaaataaattttctgcttgacgctcaacattggaaaggtaattgtcgagcttacctgatgtaagaaaattgtaataaagcactcgatgatttgatttcaaatatcgtttgtgtcttattccccacacaccaatttgcttttcggtttcatcggataaagcaagatttggcaaaagataatcaccttgttgtgtataaacaccgccgttattttcgaaaattgtttccatatttaagcctccttgtattcggtaatttaattataccgaatataagacgaaaagactaatgtgcggattattgtttgaatacgatgttcaactaccggtaaaactgtatttcgccaaatcctatatgaacattcgcaccatatcggatattcacagagtgtttaactttgtgaatatctttttttgtttgcgtaacatttttacccgattgggcatagaatatatctgtgaaatttatttgtgcaaaatcacaattttacaatattttctttgtgcattgtgactaagtcactgaaatacaattaaacatatgctataatccaatcacactcaggggaaacctgtggtgattacatagatattttgatttgagagaggtatattatcatgacaatttctaaattctttaaagaagccgctcagagctttgcaaacaaggaaatcaacaactgattttaaacaattataattttgaaaggagcatacggcaatggctgtacagatgattattaaatacgcagacaccgagaaaaaggttgttggcaaaaagaatatacttgacgaaattaacatattttcaaaaagcgacaactcctatgacagcgagctttgcagaaagcgtgtcgcaggttctaatcacaaacttttgttaagaatgtaagtttaatattgtacgggattgatttttatgtcaatcctgttttattttatattcctatttttgtatttccgtgatataataagaaaaaacggaggtaatttaatatggacgcatttgaaattatcaaagacagaagaagtgtaaaaaaatacaccgataaaccggttcctcgggaacttatcgaaaaagtttgccgggcaggcacttgggcggcaacgggtatgggcaggcagtcacctattattttggcggttacaaacaaagaggtaagggacaaactttccgaaataaacgccgaagttatgggggcaaaaaacgacccgttttacggcgcccccgttgtgttggttgttcttgcaaacaaggcaatgcctactgcaatttatgacggtagccttgttatgggcaatatgatgattgaggcagaatctttggggcttggctcctgctggattcaccgtgcaaaggaagaatttgaaaccgagtacggcaagcggcttttgaaagagcttggcatcgagggcgaatacgagggaatcggcaatcttattttaggttacggcgacggggaaaaacctcggccgaagccaagaaaagaaaattatgtctatcacattgattgatttgcctttggcgacaatcgaaaatgcccaattcggcaaaaagccataatggataaaagtcaatccgcccgggtgcagttcgggcggtttttcttttatcgaatgatattataaaaattcaaaaatataaagtaaatttatttctcgccttaaatatttattaaatttattgacacgggggcgctataaatagtacaatatcctatataaatataggatgtaattctgccttttgccggcggaatttcccaaagttttaaaaggagcgacaatattgaaaaagaacggaaaaagttatgtcagccctatatatgcggttgctatgatttggataggctggacattggttttgccactgtttagcattatgcactacataccccttatagcggtctctgtggcggtttacaacattgtaaatgcggttatcaagaaaaatgacgcagatgacgaaaaagcaaaggcacggcaacggcggaaaaatcgggctgcggaaaagactaaaaccgaaacccccaaagaggaaaagggcaccggcaatcctcaggttgacgcacttatcaaacagcgtgacgatgcaatcagtgagatgcgcaggttgaatatgaacatcgaaaatgagaagataaccgcccaaatcaacgatatggaatataccacatcaaagattttcgagtatgttatccaaaacccggataaggtttcttcaatttccaagtttttcgattactatttgcccacaaccataaaattattggacacatacgataagatgaattcccggggtgtaaaaggcgaaaatatatcatctaccatggcaaaggttgaagaaaccttggatatggtaaccgaggctttccataagactttggacacactttttgcaggggaggccattgacgtaagcgccgatatttcggttatggaaaaccttatgaaaaatgagggccttaccggcgacagccaacccggtgaaataaatttaaccacatctgaatgataaggagagacgaatatgaacgaagaatttacattgacccttaccccggaggaagaccgggaaaaagagacccttgaaggggttactcggcaggctcggcggcggttgggcgaaaccgcaccggaagtaagccaggccgaaatcgaaaaacagagagaaataaaggcaattcacctggacgagagcacactttccgaaaaggagagagcccaggttgaagaattcagtaaaaagattgatatttcaaattcaaatgtggttatgcagtatggctctgccgcacagaagaatatcgcacagttttccgaggccacattgggcagcgttaaaacaaaggatttaggtgaaatcggcgacgatttgacagatcttgtaaatgagttgaagagcttcaatgcggaggacgagaaaaaaggttttttgggcatcttcaaaaagcctgttgacgcaatgacaaaccttaaaacaaagtacgactccgcagaaaaaaatgtggaaaaaatcgtaaaacagcttgaaagccatcaggttactcttatgaaagacgtggctatgttggatcagatgtacgctctcaatgaaaagtactacaaagagcttacaatgtacatcatcgccggtaaaaagcgtttggtagattacaaggccaacgagcttgaagaaatcagaaagaaagctgaagaatccggtgcgccggaggatgcacaggcttataacgacgctgtaaatctttgttccagatttgaaaagaaacttcacgatttggaacttacaagacagatttccgtgcagatgggcccgcagataagacttttgcagaacaatgacacaatgatgattgaaaaaatacagtcgtcacttgtgaacacaattcccctttggaagagccagatggttttggcacttggtcttgaacattcaagacaggccacacaggcacagcacgaagttacggaaattacaaactcaatgcttaaaaagaatgcggaaatgctgcacacaagcactgttcaaaccgcaaaagaggcagagagaagcatcatagacatagagaccttgcagcataccaataaggaacttatttccgcattggacgaggttatgaaaattcaaacagagggcgcacggaaacgcaagagcgcagaggccgaacttggcaagttagagggcgaattgcgtgaaaagcttttggaattgcaccctgaaaaataaatttttaaggagacaatatggatttctttaaaaaacgcagtaccgcttgggcggttcttgtgataacaatagttttgtgttccttttggggcattaagaaaaggcccacagacacaaaggatatagaattgctgccctccggcgtttacgtacaggacaaggcaaacattttaagcgatgaaacggaagattacattacaaagctgaacaacggccttgtaagcgagacaagctcggaaatacaggtaataaccattgacacaacaggggacgacagcctttggagcacggcttggaattacggatacgacttaaatctttccaaaacaagcagtgtgtttataatagcggtaaacgacggggacgctcttgttttacaaggtgacggcttgtttagcgattattatgactatttttccgatgatcaactgggtaaaatcttgaagtccaattacactgttcaggactttgcggacaaaaatcttgaccgggatacaaaggcggcttttaccgctttgataagccaatacgaacaggcttttaatgtaagtattgaaccggcatctcagattacaaaatacccggagcagacatataacgaatatcgggcaggcgagggctatatggccgttcttgtaagctacataataattttgctggttttgcttttgataattattgcaatatcaaacggcagacgcagaagacgcaggagaatactttacggctatcccacaccgagacctgtgagaaggtcggtatttgtgccgtcctattacccgggcagcacaagaccgcccagacagacacctccgccgagaggcggctcctttggcggctca

SEQ ID NO: 4349 - DNA, 5161 bp, Unknown
  16S sequences of unknown bacteria
gattggtgatattgagtccgctcgcctctctcggcgtgcgttccaatcccctggcgatgaaacagtccgccgctgccgccgcgtctttctccgtgatcactttgctcgcgtcgtccatatcggtggtgaaaatcgtatccgtcttggtcgtttccccttcctgataggaagcggtgagcgtcgcgccgtccacgaccagcccgttcgcatagcgcacatacgcattggcgaaaaagtcggaagtgccgtcgtaaggcgcccaattggataccacggaggtgacctccgtccatctgtcccactcggagaaaaatccgttgatgagctttacgtccacccagtcgttctcgttcaccgtcatctccatgcggaaataggtattgccgtacgccgtgatattgtttttaaaggtgccggcagaccaggaatacgcctcccagccgagctctcccccgaggggaatatcctttcccgctccgccgttatagaaaagctgaggcatcgggtcgtccgccgtcgcggacgctctttcccccgccaccgaagagataccgttattgccgcccgtcaggacaaagccgtaggtgtggctttcggaaagagatttcgctccggggaccagcttgaattgcagattatcgctttcgagtcccacaaatttatacgtgagcgtcacctttacgccctctttcgccatcgtcgccttgggcacgggcgtgcccaccagcatttcctgccattcgccgttgttataattgacggcgtaatcggtcgcttccgccgccacgtatgcgtcggcgtccccttccgcctgttcgaggactttaaagttcgtgaggttgatctcgttcttcgacgtaatcaaaccgtcgcccgcaggcttgctttccaccgtccccgcgcttgcgagaatcgtgccggtgcccagcgatcccgccagcagcaccgccgccagcagcgtcagaaattttttgtttctcatcttgtttctcctttcattttatacgggtcgcacccgttttcttttaatattcatagacggggaacgccttgtcgagcactttccgcacgatcagcacgataggagtcccgatcaatgcgcacaaaacgccgatagacgcgcccatagccatctgcggcgtgccgttgtcccgcacattggttacgatgtacaaagcgatcgtataccccttggcggacgccgccgcgtcgcccagcagcagtttgggctgcaaaaagtagctgaaaataaccgccgtccccatcagaagcagcgtcgccagcgtcgatccgatcagagggatcaccacgtaccaaagctcccccatcagtccgagtccgtccagtttccccgcttcgagcacctcggcggggatacgcgccatcgcccccgacatgagaacgatgttgccgcctatgcccgaccataagccgtagaaaaggatcgtccaccacgccgtcttgggatcggcaaaatacccgtcgaacggaacgagcttttccagtcccagattggcgaacagttcgggaataaagttgttcagcatataggaataggaaagcgtgaggacggtgaccgaaatgatggacggcaggaaaaagatcactttatagagattattgagaggaatctttttatacagcatatacgcgcagaaaagagagatcggcaggatgacaaaatcgttccataaaaagacggtaaacgagttccataccgcgcgcggcagtacgctgttcggctttacgaaagccgtatacaactccttataattggcaaaccccgcccatttccattcgcccgacagcatatcgaaacgcttgaaggacagcagaatcgagtcgaagttgacaaagagccagaatacgcagaaatgcaaaacgggaatcgccatcagcgtgatcataaacgcgatttcgttcgcgctcttttttctgcgttttccgagaacgcagcgtttatttttcgtttgctccatacttactccttttccgtccggctccgcggcgccgcggagccggacttaccaagcggcgtccttttcagttcacccaggtatcccaggcgcccttgacgcccgcgtattccgccgcgcaccagctgtccgccgtcacgccgggataattgatgagaagattgacatacggatcgcccgcgttgaatttgcgcactttgagtcccgtccaaagagggcttctcgaatcctcgaaccacgtggtggaatttttccaaatgtcgatacaggactgctgaaaggaattgagggagatcgactccacatcgtactcgaaaggcatgggcgtgccgcagatctccgtatacaatctgagcatatcgtcccggcacacgtaggcgagaaacgccttggcgccctctttgttcttcgctttattgggaacggcgacaaagctcggctgaccgctgtaattgtaagagatatactcgcccttctcgtcctttaacgcgtcgtccatataagggacgggcatcatgcggatctcgtcctcgatgtcctcgcccgactcgttttgaatccagctgccgttggggatcatggcagccatgcccgcgccgaacgcctgctgcgcctgataatgatcgtaagagccggacattctcgcaatgtatttttctttatttttgacgatcagatcctcaaacgtttggagcatcgtcaacttaccgtaagaagggctgctaagcttatcgctgttgaaaagttcggggctgtcgaactgcatgagttcgttcatcttttcctcgcccgatacttgcagccaccaattcgtaccgatgaaatcccaatagcccccgctgacctttcccggatagacgaaaggcgcgattttgccgttcgtatccgccacgatccggtcgcagagcgctttcagttccgtcaccgtttcggggacttcccattcgtattcgtcgaacatggtcttattgtaaacgagtcccgtcacagaggtggcgcttgggaaaatgtaatagtgcagattgttttggttgtatgcctggccgtacgtcttccaggaacccgttatcttttcgagaatcgtcttttcctcgcccgggatcttcgtgttatacagctcgtcgagattttcaagctgatccaaagacgcatagctttgccaaggcgaagccagtaagtaataaatatcgtcgagattgctgcccgcttccaatttcgagctcatcgccgtggtcgcctgggcgtctatcgtcagtacgatataatactcctttccctcgtccgcttccaggaaatgccgcgacagctgacggatccattcgctgccgttgccttccgaataggtgatcttgatgggagtcttgccctccttggtatccaaatacatctcgcccttcttgctgtcgaaaacgacgtcgccgtaagcgcccgacgaatcggaagggcctttcgaatcgttttcgcggctgccgcagcccgccgcaaagctcgcgccgaaaatcgtgaccgccgaaagacataccgccaaaagtttgttcaatttcatctttgttttcctccaaaaaatatactcgatcggaattaaccgtcaatagggaatcacgaagcacccttctccgctttttaaactcagcgtcaatttgccgtccttgacgggacgaacggattttacgccgttgaggacgacgatggcgttatgtacgctctccaccgtcagcgtcacctcgttgtccagttttctgcccggatcggtaaaattgacgaccatatagccttcccgcgcgtccttatcttcgaacacgcccacgagcacgtcctccgtgccctccactttcttcaccgtcttggcgctctccatgcgctgcacgcgctcgaaattgccctcgccgccgtcttcgctggacgtcatcacgcctttccacgtaaagtttttgtaatagggcatcatcgcttggagatagccgttcgccgtctttacgtaatcgaacgtcgcggtcttttgataatcgcggtcgagcagggcgtcgtttccgaaatatcccgcgccgtcgtaaggaggcggacaagtgaagcagaaccactggatcccgtcgccgccgtaggcgaggaagctataagcctggaacgccgcgtcccctatgctttccaaaggtctgttattgccgaaagaaatgctttgcaggaaggtccacatcttcctgttctccccctcttcgtccagcgcttttctgaccatttccatattttggaggaagctgccttccagaaaataatcgcgggactttttcaaagggtaatgatcgtaactcaaataaggcgttttaactttttcgaggtactgcgcgatatacgtttcgtaactgatgggcgttgccccgccgagctgcgcgccccccgcgatgacgggaaacagattgacgtaatagcacagatcgggcgccgcctgcgtaaagattttttgcgcaaagccgtgctgatcgaatttatccgccgcaggctcgtcgccgataaaacagccgtaaaaagcatccgcgtattcgtattcgacgtacggcttcaaatagtttttcactttttcgacggcctgttcctcggtgtctacgcccgattcgacgagcgtctttgccttcgagaggtagtcgttgagcgcgggaatgctgatcagctgcttgattcccacctcgtgcgccgctttcagacatttcttgttataggtttccgttccccataacatatactcatagccgggaaaggcaatcgtgatgcccgattcggcgatccattggtatttttccagaaattcctcatccgtcagagtcgtgacttttcccgttttattcccccagtcgtcgtattcggtgattttgtcggatacccctacccacataccgatatccaaaagttccttggaatcgtatacgggttccggcgcgggcgtcccggagtcctttcctcccgatccgctgcaagcgcctgcggaaaacatcagcgcccctgccagcatacacacaaataatttcttcataacacctccaaaattaatctttgtttatatttttggtcttacaacagtttttctccgttaaaaaattttttccaaaagagtcgttttcctttaaagcggttttattgtatcatatatttttcgccttgtcaatactaaaattaaaaaaagttttatatat

SEQ ID NO: 4350 - DNA, 32759 bp, Unknown
  16S sequences of unknown bacteria
aggaattatgggttcttgaactcacttcctgttgctcttagtttgacaattcaccacagcagctttctaagatcttccacgttctcggcgatcttagacgcgccggccttttccagttcctcgcggctgccatatccataggcaacgcctaacgcctgtgtcccgacagcgcgggcgccgtcgatatcgtagcaccggtcgccgatcatcaatgcgtcggcggcggaaaaaccagtctgctccagggcgtaagcgatcacgtccgctttgtgcacccgggttccgtccaactcgcttccggcggccaatgaaaaatatttcctcagctggaaatgctccagaatccgctcggcgaacacggcgggcttggacgtggccagtgccagcgtcttgccggcatcttttaaatcggccaataattccggaatgccgggatatacctcgttttcataaaggccggtatcggcgaagtattcccgataagcggcgacggccttcctggcctgttcctcgctgaatccataaaaccgctgaaaggattcctgcagaggcggcccgataaacggcgtcagcgcctggcgatcgggcggatcgatctgaaaggcgcgcaaggcgtgctgtaccgcgctggtaatccccaccatgggatcggtaagagtaccgtccaaatcccacaaaagcagctgtttgctggtcattctccggttcatcctttcaaaacgtacattatatgacgcccagtataccacatcgtcccgcgtctgccaacccggttgcgaaaagggggccgccatgatacaataggcgaagcgaataacaaaggggagagcttaaatgacggtgctgtgtccggtttgccaaacgcctatcacgacgacggaagacggaggtgtctgccgaaaggggcaccgctttgatcgggcgcgcagcggctatatgcacctgctgcccgcgaaccggaagcacgccaaaaatccgggcgacgacaagttgatggtcgacgcccggcggaagtttttggataaggggtattaccgtcctttagccgatacagtaagccggctggcgagcgaatggctggcgaacctgccccaccaaacgccttgtgttttggatgccggctgcggcgaggggtattataccaccctcctttacgacgcgctgtgtcagcgggggatggagccggatatcctgggggtggatatttctaagctggccttggataaagcggcgaaacggcaaaaggcgattttctatgtggtggccagcgttttccatcttcccgcaccggacgcctgctgcgatttgctttgcagcctgttttcgccttactgttcggaggaataccaacgggtcatccgtccgggcggcgccatgctgctggttatcccgggggaaaatcatctatgggaactcaaacaggcaatttacgagcgcccatataaaaatcaagtcaagccctttgcgctcgaaggctttaccttactagaccacatgcaggtacacgatattatatacctggcggaacataacgatatcgaaaatcttttcaaaatgaccccgtattactacaaaactagtgagcaggatcaggcccgtttgcttgggcggggggaactgacgacgcagatagagtttgaggttctgctgtatcggaaatagcggtccgcgccagggggcaaccgttggttgccccctgtttttaacggttttccgatcttgtacgccccgcatggctatgatatgatagcgcataggaaaaggagggaagggccatggataaagacaaagcggcggcctttattgaggaaaaacgtaaggaaaagggcctgacccagcagcaggtggcggaggctcttcatgtgacgcgccaggcggtttccaaatgggaacagggcaaatcgcttcccgacgtggacacactgctgcatttggcggaattgtttcaggtgccggtggaggctcttctgggggaggaatacacggcgccgccggcaccggaacctccttggtatcaaaacgtcaaaaaatcgccctcgccgcccctttatcaggagccggtgccgctgcgtcagctgccccagggcaagcccaactccccatgggggattctgctctgcgtgccgatcggcttgttggtcgttatcgcgcttatctggccgtgcctgaaaacgataggctacagcttcacctcctacaacgcactgtctacgccggtttgggtcgggctgcagaactattcgaacatggtcagggataacgtgtttcagctggaattgggcaataccctactgctgatcccgctgtctcttttgttcctggtgctggtcggttttctggcgcgtgccgccagccggcttcccaaagcggctcgtttgagcctgggggtggttttgagcctggtcagcctatctgcgctgctgccctccgggctgaactatatcttttcggcagattcgtacggcctgctgaacggctacctcatgtctaaggagattatttccgaacccgtattctggctgctggatggggtatggccgcatctgctgtatgtgtttcagatgttctgtatcgttctggcacccctgtattgggtgtgtgtggccggtttttctgatggggccaatggcaaaattttgcatgtggcggcgacattgcttccggtcggcatgctgggcgtcgtaccgtatctgatctctgtgtttggtttcccttcgacgaattacgcgctcgacaccttgctgtcttacctaatcgactaccgccagattcgttttgagttgggaacagccgctgcagtgtcggtggttttgttactcctgctggccctttggattgccgccatcaatgggatggtatggctttttcgaaagctgatgggtatgaggcgtcctctcgcgcctgcccgcgccgggcggcacagcgtatgggcttgggtcgtgtttttcgtggggtgtttgtttgcgttggttgctctcgttccggttgtggcagggtttcaaaggtctatcatgccgctgcaagagcagtttttgttcccgccccgtttctgggcgatggagcccacctggtcgggctacgccaaagcaatagcctcgatggtcgaaaatgggaacttttcggaaggcgccggggtgtggccgctgctgattacactgggctggtactgcctgctcatcctgccggccgcttatgccctgacattttatcggtataagtatcaacgtctggcggctggaatcggcatgctctgctttgctgtgtctccgtggctgtatgaatgggagaggatgcgtttccatcttccggacttgttgatcggatcgagcaaggcatttctcctgtccccctggttcgttgtcagtctgttggcgtcggtatgggtgcttcggcggggagcggatggatgccaatccctcgccgacttgcggcgcggcgggaagcggttgatgcgcatgctttccggtcttctgggagtggcggtgctgtcctcgatggcggtctatttcgaaggccgtttttatgcgcttttgccggattacagcaatttgtttcacatttgtaaggagctgggaaacggaggatccaccatcattcttgcctacgggattgttctgggaaccgtcggcttagggctgctgatgccgacgattttgcatagggaacctaaggaacgcgtcgtttccgcctaacaaagaagcgggccagttattctggcccgcttctttgttggagatccctatgattttcggatgcttccctgacgaaatgcctccacaaaccagatatcctccagctgaaacacccggccgttcagatagtcgaggatgcctgctgttgtatgaaaatcaaacgccagcttataagagcacagggcttgtttgtgaaagccggtgcccttgttgatggcgttcgtgccatactttccgtctccaagaagcggatgcccgatagaggccagatgggcgcggatctgatgggttcggccggttagcaaatgaatttccaggagggacatcccgtctttttcctccagaacccgatacttcgtgcgaatggttcgggcgccttctttggctttgtcggaaatatacacgcggttctgtgcctcgtttttttccagatacccctccagcaaggcttcttttttcttcatgataccatgtacgatgcacaggtagtatttttcgatctcccgttccttgagcttctcattcaggatccgcagtgcttccgccgttttggcggctatcacaatgccgcaggtattccgatcgatacggttgaccagcgcgggtgcaaagctcgcctccctggccggatcgtaagcccctttttcatagagataccgctgtatgcgaaacaggagggtgtcgcggtattccttttcgtctggatgcaccagcaggccggcttttttgttcagcagcagcagattgtcgtcttcatagacaatatccaactgcctggatgccgccagaaagtcataaaccggcgccgcttcctccagaaattcgtctttcaaatacagggaaagcacatccccgggctgcaaacgtgttgaaatttcacatctttttccgttgcatttgatgtccttggtgcggatggctttgtacatcatggaggcgggaagattgtgaaaggttttggataaaaacttgtcaagccgctgtccagcgtcgtttttttgtatcgttatggttttcataaaacgctccatttcccggaaaatagaggatgggccactgccattatagcatatgtcccgctcttttcaaacttcatattttttgctatactgattggtaagaataccctgtggttaaggtgagggggaagaacatggttaaggcaaaaaatcctcacgatgggcatcgcggtcgcgtcaagctgcgtttcctcaaagaggggctccataattttgcgcctcatgaagtgatcgagctgctgctgttttttggcattcctgttaaggataccaacgagctggctcatgagctgttggaacgcttcggcagcctgtcgggtgttctggaggcgccttacgaggagcttaagcgcgtcaagggcatttccgatcacgtggcctccctcatctgcttctgctgtcagctgtcacatcgctactatgaggacaagctcagcttcggcacggtgctgaatagtatccatgaggtggggcagtatattctgccgaagtttcttggcctgaagaatgaggcagtggtgctgctgtccatggataaccgccgaaaggtgctcaactgcaccaccattttcgagggcagcgtcaacgccacggaaatcaatgtgcgcctggcgttgcagcaggccttgcgggataatgccacggtcgcggtcctggcgcataatcatccgaacggccatgcgtttccctctgccgacgatattgaatccaccaagatactcgtaaaggccatggccttggcagatgtgcggctggtggatcatatcattatatctgaggatgactttgtgtcgatggctcagacgccgtcgctgcagtatatttttacctgaacctgataaaaggagcagccgcgtcttgttgcgcggctgctccttttggcttgtcaggaccggatttccggccgtccctggatgttgtacaggcgggtgattttatcccaggtggccttatcggtttttccgttcggttccagccctcccagctgctgcatctgctggaccgcacgctgcgtatcctcgtcgtaaatgccggtttttttgacaggcggcaggttactgtaacgttccgagatggtgtccagcatgatttgcaggaagaataccagattgccggtatcgccgggcatcatcacatagtcgggtgccggaaaaggccggagagcctccgcgggcgcttccaccttgagtatccgggtgtattctgcgtaaatggcgtcccaggtctgccggttgacccggccggtcggttccagaccgaagctttcctgaaaggcgatgaccgcctgggtggtttccgggccgaaaataccgtccaccgctatcagcgggatttcgatgtgccgggtggcaaccgtacgcaaataggtctgcaactcccggatatagagatcctgatcctgatgaatatcgttgggaatccaggtcatgtcgtttctccttccgccagttcggtgcccgggaattgtcccggctgcttatcattgccgacgcgcagatccgagtacaggctggcgatggcgtcccaagtcagtgggccgacaatgcccgcggcttccaggccaaaaagattctgaaaagcaatgaccgccgcctgggtttgattaccgaaaacgccggtgacctgcaccgcggggatttccgggtaaaactcggaaatatatgccaggtattcctgaagaatctgcacatattctccctgggagccaatacgcagcaccgttcccggatacagcacgacgccgccctccatcaccgccgtactgtcgagtatgccgcgataggctttatacagctcgttccaggtctgctgtcccataatcccgtccggcgtcaggccaaaggtgcgctggaatgccatcacggcctgataggtggcgtcgtcatatacgccggtggtagtcagcggggggacggtatcgtaatacgcggcgactacctggagataatactgtatcatccgcacctcgtcccctgtgtctcccggagacagcaaggaggggaactgctgcgctacctcgtccagggaaatcccctccgaatccagttcggataggcgcttgacactgttgtagagataggcgatccgataccaggtggctttgccgataatgccgtcggcggtcagcttgaaaatccgctgaaattcccgtacagcgtcgtctgtctcctgtccgaacacgccgtccaccggtgcgattttgggaatgctggggtaattgcgggatatgcggttcagctgtacctgcttggtgcgcacgctgtttccggcatcccccagccgcaggggcagcccgggataggagggggagttgatgcgcaccggtgtatcggtgttcaggttgatgtccgggccgtagaactccaccagaatatcgtaagggccataaccctgctccgctagaggcaccgttccccattgagacaacccgtcgcaggtgacggtggtgccattgcagtattgggtgaagtagggctcgacgctgccctgccggtaaacatactcgttgaagatatcgtcaacgatgtcactaatgttggcgaagatatcccggttctgtacataggcctgatcatagcgtgtggagttggtgatgtcgaaatcataccccatgctgcggtaccactcggtatagtagcggttgagagcataagaaatctgcgcatagacattggcgcggatggcgttttccggccaggtcggatagatttcgctggatgccacgtttttaatatagtcggggaaagaaaccgtgacattttgggcattggagcccggcgcccccagatggacggtcagaaattgaggaatatacggctctccgttcaaagcggtcgctcccttctaaagatcctggggtccggtctgaaagaataccagatcctggggggacaattcaaattcaggaatggggatcatctgaacgggctgcaccgccgtgttgccgccgtagatcggcgcgttcacattgagtactcggaaatacccgggagcggcggcctgaatgttatagctggtgtaaggcgaggggatccccggttccatggtcagcgcgctgtccacggccggcagcgcgatcacctcggttaagccgtcccggtcggtggtggtatgggcgtacagctcttcgccgccgccgtttacccgggtgaccgtcacgatggcgcccggaatcggcgtggcctcccttgcggaggataaaaacacctgtaagtatcctgtagacatgggaagggacagctcttccggcaggacggcggggccttcctccagggaagattccggggcctgcggcgtgaaaatctgttgtggcgtctgctcgctgttttccgcgggcatcggttttccgagcgcccctggcttctcgaccagcggtacgccgggcagcagcccttcttccagaatccggtcctccagatggatgggaaagcttttggaaacgggccggcccgcctgtggaagaggctgtgcggacgttgacgcgttgctttgggacgggtggggcacgggtgccgcgctttcttgttccaaacgctcgcgcatctcccgccggttatcctcctggaaatccggcggattgggcggcgaaatgattttggccggataggcgacgcgtaccgggccttccggctcctcgacgggttcgccgtccggctggatacggggcgcgttttgctggtagaaacgcatcagctcccggttgtactgttctatcaggctatccaggttttgagaagaggaatccagcttcataaacattctccatttctccggcgaaacggattggtggggaaggcgtctccttttcgccggcaggagacgccggagggcagcggttgcctatcaattcatatatacggcttcggcggctaaatatgccaaagcggcaacattgcatctttttttggagaatggtatactgataggaaatcagcctggccgggacaagccggcgcggataaggaggatgtctatgaaaccgatactaatcgtggaagacgacgaacatatagcgaaaatgatagcggccaccctttccatcggcgggtacaccagcgaaatctgcgaggatggagagagggcggtcactcttatcagcgagagagattacgatctggtgctgctggacgtcatgctgcccggcttggacggcttttcggttatccagcggattcaaagtgataaaaccccggtgatttttctcaccgccgttcaggatgtggccgataaggtgcgcggcctgaagctaggggccgaggattatattgtcaagccctttgaagcggtggaactgctggctcgggtggaggtggtgcttcgccgcacgaaccggggaaagacgcagatttgttatggggatatcacggtcaatttggatgagcatgtggtgaagaagggcaacgatcccgtttccctcacgccgaaggagttcgacgtgctggtcttttttctgcagaacaccgatattgccctgtctcgcgaacggctgctctcagctgtttgggggtatgaatttgcgggcgagacccggacggtggatatccatgtccagcaggtgcgccggaagatggggctgcagcggcagctgatcacgattcccaaactgggctatcgcctggaaagtcgctaagcgaaagagagtggtgggccgatgaagctctggcataaaatatttatcggcacgctgctgctggttatgctggcggtggacggcacgtcttttttgctgctgtctcagagccaaaacatgctgtttcaacaggaacagaagcgggcggcgtccgaacacagcctggtggccgccgccgtgcaaaacaccgtgacagtgacccgcctgcagcagaataaaaccctgctgagcgaggaggatacctatgccgtcgtggaaaaagtgctggactcccagaaaaagcgaggggccggcgtgtccctctaccgggccggcaaacgaatatccaccaccggcgtgatggaagaagcccaggagctggacgtggtaaaagctgtgacagcggaagctcctcagctgaaatttattacccaggatgcccggagctgtttgctggtcggctctcagatctccatggaaaaggcggactatatcctggtcactatgacggacgcaacggatctgtcggttctccgccgcgaacagctgcggtatgtgcgcacgctgagtttggtgctgtctctggtggtggccggcctgctgctggtgatggtctggtggctgatgcgcccgctgcaaaaggtgaattacgctatgcgtcgtattgcccagggggattatcagaaacggctccaaatcgccggctacagcgaactcgccgagctggcccgcaacgtcaatcgaatggccgattccattgaaaccaacgtcgacagcctggaacaggtggcggataatcagaaaacctttatcgccaatttggcgcatgagatgaagacgccgctgacctccatcctgggctttgccgatattctgcgcgtcaaaaaggtcgtgacggaagccgaacggcgcgagtacgccggtgtcatcgtcgaggaaaccaaacgactgcgctctctttccggcaagttgatggaactgattacggtagggaacacccagttggattttcagcggatatccctgcctgatctcgttcgggaggtggagatttccctccagccttccctcgccctgcgggaaatgaatctgcgctgcgtggttcccgacgtggaggtgcgtgtagataaagagctgttcaaatcgctgctgtacaatttggcggataacgcgatgaaagcctcgaaggcggggcagacggtggagtttttaggcgggcttgcgccggatggccatctggttttgattgtgtccgactccgggatgggaattccgcagaaagagatcgccaaaatcgtacagcctttttatatgctggataaagtgcgatctagaaaagcagggggagcgggcctcggcctcgccctgtgtgtagagattgctcggctgcacgggatacggctgaccattgaaagcgaattgggaaaaggcacgcaggtttatctcacatttgacggggaggcggaagcatgagcagcggaaaacgaaaaaagcgcatacggaaagactggctgctgatgagctggctggccgccgccgcggtggcgctggggctgtttctggctcttgggatgaacgccctgcttcccacctatgagaataaggtgctgcctttggaaaaggaattgcttgcgcccgccccggtttacgaggccatagaagaaaccctgacgctgtacccgtggaatctgtacgacgccgctcgggtgtccagcctgtccgagtcggataaggcggctttgggcgtacgtctttggcagatattcgactggctgtacatctgcctgtccgaagaccaaaataaggcgcaaatcctaaccgccgtagaagataccagccagccagccgcctctatgaaaaaaggacgggatgaaaacgatcggccgctctattatttggcgaattatcgcctggaaacggcagatgaaaagggagtgcgttcggctgtctgggtggattgcgtttttgactatcggatggaactggtttattttcactatcggacagaaccgtccgatacagcctatgatcggtttacgattcagcagggcggctgggatctgcggcaggccctatccgacggggaggcggaaggattgccggtttggcagcagctcaagaatatacaaagcaacggctggcttccctcctcctttacagagaacgatttatatgcggccaatgctctgacgacggacagcgaactgctgctggtctgcacctccaaggccaatgacggccagctgatattgatgctggatccgctccgtttttcaatgaccggcttcagcttacaacaaaaagactttgtggtagaagttgattaaattggctccttttaaaggcttttatgcaggagcggtaccgggcgacgggtagccagtcggtcagcatgctgtcgagtaaacaggaagttcgttgaagagttgagggagacggagaaaaccggaggaaaaacgagattatgcaagcgaaatgaacaacaatagctctcaaatgcggaagaatcacatttttttcgagaaaatgcgaaaatatcttgacatttcctgcattgttctctatattgttattgttgttcacattccggaatcccacccggcagaaccgggcgggattttttcgcgtgaacatgcatctggcacatcgcataagcggtatccacgcagcgccgcagtctccgccgatcggcgagattgtgaaaaaccctttgcggagggcgttgtcaaggatacagcggtttccgatggctggttcaggccggctcaggaaattctattaccgcaaagggggatgcattgtcatggaaaacaccaatattatccaactcaaagacattgcgatgtcgttcgatggggaacaggtgctgagccgtttgaatctcagcatctcggatggagagtttgtcaccctgctgggcccttccggttgcgggaagacaaccacgctgcggattatcggcggcttcatcacaccggacagcggcgatgtcttttttgaaggcaaacgcatcaatcagctgccgccgcacaaacgggccgtcaataccatttttcagcggtatgccctgttcccgcatctgaacgtctacgaaaatgtcgcctttggcatgcgggtgcagaagaagagcaacgccgaaatcaaagacaccgtggcccggatgcttaagctggtcaatctggtcggctttgagaagcggggcgtgcagaccttatccggcgggcagcagcagcgggtggctatcgcccgggcgctggctaaccatccgaaggtcctgctgctcgatgagccgctggccgcgctggacctcaagctgcgcaaggatatgcaggtggaactgaaaaatattcagaaaagcctagggatcacctttatctatgtgacccacgatcaggaggaagccctgtccatgtcggataccgtcgtggtcatggacggcggcgaaattcagcaaatcggcaccccgcaggatatttataacgaaccgaaaaacgcctttgtggcggatttcatcggtgaaagcaatattttggacggcgtgatgcatgaggactatttggtggaatttttcggccggaagttcaagtgcctggacgccggctttgcgcagaaggagccggtggacgtggtgatccgtccagaggatatcgatatcgtggagccggacaagggacaccttattggtaccgtgaccggcgtgacctttaagggcgttcattacgaaaccatcgtcgatttcaagggcttcaagtggttgatccaaaccacggactactatgctcccgataccgttatcggtattgtcctcaacccggaggatatccatatcatgaagaagtccgcctattccggcatgttcggcgactacagctcctattcggaggagtttgaggaaatggccgaccccgaggcggatctggtgcacgaggaaagcgaggaggataacggatgaaaaacacccgctgcgccgcagcgcccttcgcggtgtggatggtgttgttcaccgtcgttcccctgggcattgtggcctggttcgcttttaccgatgcgcagggctccttcacactggacaacatccgtgccatcggggattatgccggcacctttctggactccatcgcccaggggggacttgcgacgattctgtgtcttgtcttggcctatcccctggctttcagcatcgcccgttcctccgaaagggtgcagcaaactatggttttgatcgtcatgctgcccatgtggatgaatttcctgctgcgcaccctggcttggatgacgctcctggaggacaaggggcttatcaatcagttcctcggccttctcggcttggggcctgtccatatgatcaataccgacggagcggtggttctgggcatggtttacaactttctgccctttatggtgctgcccctgtattcggtcatggctaaaatggatgaccgcgtgattgaggcggcgcaggatctgggcgccggcttctggaacgtattccgccgggtggtgctccccatgtccgtgccggggatcgtgaccggtatcaccatggtgtttgtcccggcggtgagcacctttgtcatcacaaagctgctgggtggcggcaagaagatgcttatcggcgatgtcattgaaatgatgttcgccggcagcggacggaattataatgtgggcgcggccctatccctggtgctgatggtgctgatgctcctgtgcatggcactgatgcacctggtcgacaaggacgacgaggatttgggagggatgatggcatgaaaacactctcccgtatctacaataccttaatttttatctttctgtatgcccccatcgtggtgctcatcgttttctccttcaacaattccaagaaccgggccgtctggcatggctttaccaccaaatggtattccgacctgtttcataacgacctgattctggattccttgaagctgacgctgctcgtggcctttctggcggcgattatcgccaccgtgatcggtacggccgccgctgtgggcatgtacggtatgaacgccaagctgcgtaaaaccctgatggcggtcaacaatattcctatggtgaatccggaaattgtcactggcatttcgatgatgctgatgtttgtgttcctgttccgggccaccggcctgctgaaactcggcttcggcacccttttgctggcgcatatcaccttttgcatcccctacgtggtgctgcaggtaatgcccaagctgcggcagatgaataagcatatgtatgaggcagccctcgatttaggctgtcatccactgtctgcctttttcaaggtggtgctgccggaaatcatgcccggcgtcgtcaccggggcgctcatggcctttaccatgtccctggatgactttgttatcagcctgttcaattcgggttccacggcgcagaccctgtcggtgaccatctattccatgacgaaaaagccggttaccccggaaatcaatgcgctgtctaccctcatgtttggcacggtgctgctgctcttattactcgtaaatatccgccagatccgcgatctggggggtaaaaataagaaaaagggagatagataagtgaaaaaaatcgcgatactgctggtggccgtgctgacggccgggattttcgccggatgctctgcgggcgacacggacgagggcagcggtggcaaaaagaatgtgacgctcaacgtctataactggggcgaatacatcgacgatgaagatttcaacgtcaatgaaaagttcaccgaggagaccggtatcaaggtcaattacaagacgtttgagaacaatgaatccatgtacaccatcatcagctcgggcgcagcggattacgacgtcctgtttccctcggactatatggtgggcaagctgatcaatgagaatctgctggccaaactggattttgccaacatccctaactatcagtatattgacgaagcgtataagaatctggattacgatccgaacaacgaatattccgttccgtatacctggggaacggtaggtattttttataataaaaagcatgtggatgaaaaggatctggcccagggctgggacatcctgtggaacgagaaatacaaggacaaaatctatatgtttgacaatccgcgggacgccttcggtatcgccctcatcaagctgggctataaagtgaataccaccaacaaggccgaatgggaagccgcgtataacgagctgctcagacagaagccgctggttcagggctatttcaacgatcagattttcaccaaaatgcccaacgaggaaggctggctggccccttactattctggcgacggctccatcatgatgtatggagaggacggcaatgaaaacatcggctattttgtgccagaacaaggaaccaactttttcgtggacgccatgtgcgtgactaaggacaccaagcataaggcggaggcggaggcctacatcaatttcctctgccgcaccgatgtggccaaggccaatgcggaatatctggggtattccaccccgcagacggaggcccgcaagcagctggatccgacggtaggggagaaccctgtgttttatccgcctgcttccatcatggaaaaaacgcaagtgttcctgacgctccccgccgaaaccaataagctgatggacgacctctggattaaacttaaaagcaaataaccggcaaggcggcgctgtggcgccgccttgttttttgggggtttcttttcaattttagccggcatggacattgaaattaaaaggggttattgctatactatattttggaaggaagacagccttttcaggagaggtgtggaaagcgtgatttgttttcgttgtggaaaatcggtgccggaagggggcgtctgcccctattgcgggcaggatttgtcggcggccagtccggcgacagaagcggcgccggcggattcgcaggcgtccgtgccgccggcaccgctgcccgagaaaaaacgacgctctgtcgctggtcctcttgcggtaggggcggcggcggtgctggccgcggtgtgcctggctcttggcggaagaaggctggtggacggcttgccgttggcacccttgctgacgctctgcggcgtgtttgctttgtttttcgtgggggatctgctgggccacaagcagctacgtatggcccgcagcgtggggcactggtgcttgctggctctggtgacctcggggctgctgtgcgcctgtacgggtgtcgtgctgtccctggccggcggaagttcccgccggatgaacctggattttgcttatcggtatctgctggacgggcatggcgaggtggcccgcgaaaaggcgcagctatgccccgagaaggacagcgacatgatcacattgttggcggacgccattgatcgggagtatttgaccgcctattttgaagcggacaggctcctgcgggatggggagctggacgcctccacggaacccttggttcaggaagtgcgcgcgctgtccgccgatgtcctcggcctgtcgatcgacgccgcaaccggcgaaatgacaggtacggcggcggatttgcctctggccaaggaggatatggatccgacggccatgacagaggcgaagcggcaggaacgcatggagcagctggtacgggaaatctgcgataagcggggcgccggcgatgtgatgagcgaaaaaacggatgagctgtatcggctggacaaggccatgacgctcggcgatctcagccaattggatgcggccacggtggaagagctgttgacgctttatcccgatgacgaggacgttctgctggtagccatcaaatactatacccggcaggaaagttgggccaaagcgcgtccgctggctcagaagctggtcagcctgaacggcagcgaaaacaacctggtggtgtatacagatttaattgcgcagcaggtcaagagcggccagagcagcagcgatcccgcactggacagcgaagcgcagaagcttttggagcaagcggagaaaaaagagacggaagccggcggcctcaatacccagcttccctcgcagcaggacaaatacgatcagctgatgaatgaagcggacgatctgcgtaagcaggcctctctgcttgacatcacccgcgcggtgaactacctgctcgcaaaaaaaccgatgagcggggacaagagcggcctgctggatttgcagattgccaagctgtacctggcggcggacgaacgggacgatgccaaagagtatatctggaaggtcgtggacaacagcggcgtgctgcgccaggattccccaatccgggagcccttgcaggaggtcgtaggggcctacaacaccatggaggcgggagaaagcgatccggccctgaccatggcggtacagcggctggtgcgcgcccaaagccaggatgtcgtatcctcttcgggggagacggtcaacggaactatggcgaatttcgtcacctccacgctgaaatacgacaggctgtcggttttgatcggaaagatcgatacgaagaattaccccactgtgcgcgcctatgtgaacataagcggagaaaaggatagaaagttcggcgcggcagacgggttcgtgaagtcggattttgaattgttcgatacgcagttccaaatccaggatttcaagctgatccaggatgaagaagcggcgaaaatttcgattgcgctgctgatggatcacagcggcagcatggagggagcgccgctgaaggacgccaagctggcagcggaaacctgcgctgaaaatatggacgcggatacccagcgcatggctttggtgccgtatgacgacagcgcctcggtcgcggtgtctctgaccaattcctcgtctaaattggtcagcgggatccgcaatctgtcggcggcgggcggcaccaacatttctggaggcatccttacggcgttgggagagctggacggtgtcggcgggacgcgggcgattatcctgctgaccgatggaaaggataacaacagccaagaggaaatgcagaaggtgctgcaaaaagccaagcagcagggcgtcgcgattttcaccataggtctgggcgacgtgaacaaagcctatctgcgtggtatcgcccagagcaccggcggaaaatttatcgcggcggaatcctccacggaactggcggatatttatcgcctgctccagcagtatatcgtcaacaactactgcatggaatacacgataacggacaatccggaagcggatccccggagcctgacggtcggcataccggactatgcggtggacgatgtcaaggcttatcggatttccggagaggaaatccccgatgaagacgaagatacggggatttaccccgtgtcggacggggatttggccgtatacgcgctcacgcccggcagcgcggcccaaggcgacatcagccaggggcttaccgtcacggtacgcggctccggctttcaaaagggaatgaccgtcagcgtcgggaacgtcgccctaaccaacgtgaaggtgaaaaacgcgggagaacttaccggcaagctgcgggggaacctgacggccggtgtttacgcggtgaaagcccggttgcccgacgggcgggcggataccctgtataaaggcttccgcgtattccgcgccggcacggtatcctctgtgcagatgggcaacctgtttatcttggcggataatatcggcgtcaccagcgaaagcggcagccgcacgcagctcaccgcctccggcaatgtcagcgtcaacggctttctgtacagcacgtccgagctgacgattactcccaatgctcagctggatgacgacgatctctccaaagcggggcgcaaggcggtgtacctcggctcaaacggctcggtggacggcgaaggcaagctctacgccagctacgcgcaggcggtgaagacggcggagagcggaaacagcctgcagagcatggtgggccatacctttgcggagaacattttccagggccgggatctggtggtccgcagcgggacgttttccatgagcgtgggcgaatccgataccgatttcggcgctggcggcaacggccaggccattgccgacgaattgcgggattactcgttgaaattcccgggcttcaccgaggtttccgcggccaaggtgaccctgtacgccgatcggctgcagctggatgccgaggcgttggatttcggcgctatcgaggacaatctggtttctgccctgaccggaggcgtggccggcaccaagaaggatcgggaggcgctggtcaaaaccctggggggagaatgggagcgcttttttcccctgtcgggatcgttgtcggtggcgctgggcgcatcggacgtgcgtttcggcggcgaggtcaagctctcgcttccggacgataaaaagttcttcctgtttccggtgaaaaagctgggtctaaagataaactccctggacgagaattatgagtattggaacttcgatgtcagtattttaatgcccggcgtgaaggtgataaacggcagcgaccagtcggacagcagcatcgacgtggcggtagggtcgtatttttggtatccggacagcctggaagtggcagtgaccatggatccgggcattccgattttcaaggttttcaatctcaccaaggtcggaggcgggatggccggcgccagcggcctgttcattcaggatgattcggtaaccaaaaaggacgcgacgctgaaggtgctggccgaagcggatatcaacgtgttcaaaatgctcggctggaagcaaaccggcgcggctcgcagcatcacccgctggggggaactggggaaaatctccgacgcgcaggtgctgctgaatttcagcgatctgtcgctggatatccaagcggatctggaattgctgcagcaaaaaatcgcctcggcggaaattggcatcagcaccaaaaaatttctggtgaaggccggcgtcggcgccgagctgtcctgtgcgggcatcgacatcggcggtgagctggaggcggaagtttcggtatgctgggccgggcagaatcaagacggtgtttcggcgctgatcggcctgggcggcaatggccatctgcgctgcagctgggcgaatgtgaactgggaaaaccggaagatcggcatcgagtttaccgccgatgtcggtacgtccagcgggaccaccctcgcggtaaaggtgtactgcaacgatgactgggcccgggcctggtataacagcgaaggtctcatgctgtgggataaattccattatgaggatacattctgaggagaaggagggatggacggtatgatagcatataaaaatctccggccccgaaaagcgggcctaggcttcaagctgacttccctttttctgacggcggtactctttgccgttctgctgccgctgtcggcgctggccaagacgaaggaatatgaaattcgtctgaatgaacccaaggagaattatgtgttttcggttctgtgggacaataccgataagcaggcggatgtggtgatcacctccccgagcgggaagacctataacctggacaacatgccgcaggcccaggccggtgagggggagcttctgttttggtttgcgtcggcggagaaaggaacctggaaggtcaaaatcaccggcgaagggctgggaacggtgacgctggattccggcgtgatgcccgggcggatgaacattgcctcgttcacggcacaggtagcgggcgacaaagggacggcctcctggaatatccaagacagcgaagaggacttgaccctggaaatctgggcggcgccggatcccgtcaattacggaggaaagcggttggcgtccgtcagggggaaagtgtccggtcagtgcgaattctccctgtccgctctggagtccggagattattatctgtatctcaaagccatcggcagcggcggcattttcgcctgccgctatggggacggccccgtttcctggcgcagcgcggatgctctgccgaagctgagcggcgtgaaggcacggatgctggacgaggagctgtggctttcctgggaggcaatgaaggatgcgtccgggtatcgcatccgggtgtatgatgcggccaccggcgaactgctcacggatgagagcgcggagaagaaagaaacccagtggtttggagagatacccgcttccgtcaacaagctggccgtcaccgtggcggcctaccgctggggaaacaccggtgatttcgaacggcataccgtgacgcgcggcaatttcgacggcgtgacggtcatgttcccggaggaagaacacctgaatactaaaaccgtgtatgtccaggtgacgtttacgggaagctatacggtcagcggagcgctcaacgacaccatgctggtggaaggaagcagccagtcgggaaactatcgggtggatatggaggaaggagacaaccgcctctccttttatgtgaccgattcattggggaacatccgcaccttcggcaaggatgtgcatgtcgatgtgacggcgcctcagctgtccgttctgcgggatctcaacgggcagtccacctcagagaaccacgtgtttctagagggacataccgagggaggcgccgtgctgaccttgaacggcaagacggtggacacacaaaacgggtatttcagcatccgctgccccctgtccgtgggaaaaaaccggctggagcttttggcgacggacgccgccgggaaccagtcaaagtacagcgcggtggtggagaggccctggttcagcgggtcggttctgatttggattttgtgcatagtcgcgggggcggcgctgctggcggtttacgctgtgatcttcattcgtgcaaggaggaagaaaacatgaaaacggccaagcggattttctttattctaacggttgtgtgcggcgcgcttgccgtggtgtttgatattgtggccgtgtgcatgcaggtgcaggtgtcgggtgaaaagctcctgaccatggattcgcactggggctatatactggccgtcaattatcgctgggtgaccctggcggcggttatcctgaccgtctcggcgctcgctatgctaaccgcgtacattttgtacagaagaaagagaaaaaaagacgcacaaatgccggaaggctgattttcccttgaaacaccccgcggcgcggggtgtttttcttcgggaatcttgaccggtttccggtttggttgtatgatggtagggatatgaacaaggaaggaacaagcttatgctgacgacattgaaaaacggccgtctgactgtgacggcggacacccggggcgcggagctccaaacgatcgataaagatggtggcccctcgtatttgtggagcggcgatcccgccttttgggcattccacgcccccacgctgtttcccatcatcggcgcgctgcgcggcggccgtgccctgtcggcgggcggcgaaatctccctgcccaagcacggcttctgccgtacggccgagtttgccctggaggacgccggcgacacctttgtgacctaccggctgaccgacagcgatgcgacccgcaaagggtatccctttgccttctgcctgcgggtgcgctatacgctggaaggcgacagcgtagaaacccgctacacagtgaccaaccgcagcgagcaggatatgcccttttttatcggcggacatcccgccttccgcgtgccgctgtccgagggcgaaacgctggaggattacctggtggaattccccgaaaaggaaacgctggactgcccgcaggtggagcttggcagcggcctgattatggacacggtgcgcaaccggtttctcaccgaccgatcttcctttgctcttaaccatgtgctgttccgcggcgacgccctgattttcgacgatctccgttcccgcagcgtctccatgcgctcggtgaaaagcggccgcggcgtccgtctggatttcccggatatgccgtatctcgccatttggacgccggttgtcgattccccctttgtctgcctggagccctggacgggcatgggcacgcgggtcagcgaggacgatcggtttgagcacaagctgggcgctaagattttaaagccgggcgaggaacaatcgctggcgtttaccattacggtgttttaaggcaggcgatgacaatggaaacgatacaggccgttctctttgacctggacggcaccctggtggacaccctgggcgatttggccgacgccaccaacgaagcgctgcgccggcgcggtttccctgagtatcccgaagagcaataccggcagatggtgggcaacggcgcccgccgtctaattgaacgggcgctgggggagcgctgcacgccggagctgaccggacagctgctggcggatttcgtgcgcatctatgacgagggctgtctgcgccgtaccgcgccctatccgggtatccccgaggccgtgaccgcgctgaaggaacgggggctgcgcctggccgtggtcaccaataaacctgaagaacaggcagacaagatcgtccgccattttttcggcccccatgtttttacctgtgtggtcggcggccggcctggacgggccgccaaaccggatcccgccgccgctctggaggtgctggccgccctcggcgtgccgccggccgccgccctgttcgtcggcgactccgatgtggatatgcaaaccgcgcataacgccggcatgcgcagcgcgggcgcggtctggggctttcgcggggaagaggagctgcggcgggccggcgccggcattctcctgcgaaaaccggtagaaatagtaaattgttgttgattattttcccgacatgccttataataaataatcgttaagttttgtggatggaggactacatatgaaacggtttatgaaaattctgtctctgggcgcggcggttttgatgctggccggttccttggcggcctgcagcggcaaacccggcgcgggcttagatctcatttctgagggcaagctggtcatgggcaccaatgcgtttttccctccctttgagtacaaagagggcggcgaggttgtcggcgtggacgtggacatcgtcaaagccatcgcggagaagctggatctcaccttcgaggtcaagggcgatatcgaatttgattccctgcccgagagcctgaaagccaaggatatcgatctcatcgccgccggctttaccgcccgcgccgaccgagaagaggccatggacttctccgacagctattacaccgctctgcagaccatcatcgtccgggcggacagtgcgtatacctctttggccgacatcaaggacaagggcctgaaaatcggcggccagtctggcactaccggcctgactgaagcggaaggcctgaccgataaggacaaggcgattggctacaccaacggtgccctggcggtgcaggatctgatcaacggcaacctggacgtggttattatcgacaacaaccccgccaaggagtacaaggaacagcacagcagtgaaattaagctgctggagaaccagtttgaggaagagcactacgtcatcggcgtgcccaagggcaacaaaaagctgctggaagccgtcaacaaggccctgaaagagatcaaagaggacggcaccctccagaagatcctggacaactatattaaataataaaaagagccggccgcttcggcggccggcttttctgtctatctgttatctgtgaggaggcactttcttgaacgccatagtggatggatttcaaaacatcgtccagtccttttccgatgcgattttcctggccgtcattaaggacgatcgctatcagtacctgctggatggactgaaaatgtccctgctgctcacggttatcgccgcggggattggcgtggtcatcggtatgctgctggccattgccaagctgcaggatctggacaatctgtcgggcagccgcttcatgaacgggctgcgccgctggctggccggcttcgccaacggctatatttccgtggtgcgcggcaccccggcggtggtgcagctgatggtgatctatttcattatcttcggccggcttttccagggggttctggaagggtatcaggtggcggccctcgccttcggcatcaattcgggggcttatgtggccgaaattatccgcgcgggcatcatggccgtggacaaggggcagacggaggcgagccgttccctcggcctctccggcgggaaaaccatgttgttcatcgtcattccccaggcggtcaagaacgtgctgccggcccttggcaacgagttcatcgtcctgctcaaggaaacttcggtggccggttatatcggcatcgccgatctgaccaagggcgcccagaccatcggcagcgtgacctacgattacatcgtgcccctcttgtgcgcggcgtatatctatttcctgatgaccaccaccctggccaccggcctgaacaaaatcgagaggaggatgcggcgcagtgattgaggtacagaatcttcataagtattttggcgaactggaagtgctcaaaggcattaacgcccgcattaccgacggcgaatgcatttgcgtcatcggcccctccggcggcggaaaatccacgtttctgcgctgcatcaacctgttggaagtgcccaccaagggcgatatcctcatcgacggcgtgtccgtcatgcacaatttgcggcagctggataaaatgcggcagaaggtcggcatggtgttccagcagttcaacctgttcccgcatatgaccgtgctcaagaacatcaccctcgccccggtcaagctcaagaaaatgaccgcgtccgaggcggacgacaaggcgatggagctgcttaaccgggtgggcctggcggataaagccaacgaataccccaaccgtctctccggcgggcagaagcagcgggtggccatcgcccgcgccttggccatggatccggaggttctgctgttcgacgaacccacgtccgccctggatcccgagatggtaggcgaggtgctggaggtcatgaagcagctggcgctcaaccggatcaccatggtggtggttacccacgaaatgggctttgcccgggaggtgggggaccggatctttttcatcgacggcggcgttatcagcgagcagggaacgccggacgaactcttcggccatccccaacagccccgcacccgggaatttttgtcaaaagtattgtaaggaggccgccgcatgaaagccacattgattttgtatatcgtcatgggcgcgctgttcctcgtgccgctgatcctgttcaatattcgccggatttttgttcggaagcctccggctcccctgaaaatcaattggggccgcggccttttcgtggtgctgttttccgcattcctcgtcttttttctggtctgtgcgtatcggaccacgatggaaagccggtatgaaatcgcggcggagcgcatcgcggagcagcacgcttctatgctggccggcaatcaatcggcggaagattttcgccagtacgtgttggataacggcacagaggacgtttcggaaagccttcgggccgcagatttgaccgatttacctgtcgccggcgaccaggcgcgttttcagattagcagctggctgaccccaaaatattgggaagaggacgacgcctatgcgcaaacggagaagctgggcgacgaaaaccctgtgtatatcatgtaccgtatggaggccggcggccagcggaagctgtacaccgtccggatgcgcaagaccgacgacggctggaaatacgattggttcggcaacgccaccgaggaacaaatcaagagtatggaaaaaggccggcgtctgccgtcggaaaacaacggcaaatggtacgtggtccaagcggataaacacgaataaacgaacccctgccgagagccagcgctttcggcaggggtttttacagccgtgcggtaagttcgtcccagcggcggatatgcagacaggcgcagcgcggcgcgggcttgtctccgccttctctgtcgtccacgtcgctgtcaaaccacacggggaacatcccggccgcggcggctccctcgatgtccgcctgcggattatcgccgcagaaccagacctcgctggccgtcagccccgccttgcgcagggccagttcaaacagcatgggctggggcttgcgcagcatatagtcgctcgacgcgagaataaactcaaatgaatttcccggcagcagcctgtccagccgcttccgcagcgcctctcccgaccaaagaatattgctgacgacggcgctgcgaattcctttggctttgatgcaggccagcatctctgccgcgcctggcatcgcctcgccggcggacgccgcgtcccagaataccgtttcctgctccaagggcgtcagggaaaaggcgatccctaaatactcgtacagcagccggttgaactgctcaccggttatttcataaccgccgctgcggatatccttgacataggcgtcgatccttttggccactctcccgacatcctccgccgtatagccgccgtcgtttttgaccgcatagcgaagtagcgccgcgttgccgcgcagggaatcccaccccggctcgtaagccagcgttcgcccgtagtcgaacaggatcatctttggatacttcatgcctctcatcccttcacgcccgtcaaatcaaaagcgggaatatacgcggttccgctgcagccacgctcctgtacatagccgtcggtgattcccctctccagcatataatcccataccttccggcgttcccgggccgtcagcgttcggttcaaggaaggatacgcctccatcggcagcaccggggtgtactggaacagcaggctgacccataccgcttccttgtgtcccgccagccagtccaataccgccagggattcccgggtataccccggcagcactagatgccgcaccatggtgccctttaccgccaccccctgtgcgttcaaaaccatcggccccgtctgccgcgccatttccaggatggccgccgccgcgcgggagaaataatcggacgcgcccgaaaaggccgctgccggttcttcgtgtacgtatttcaaatccggcagataaatgtctaccagcccctccagcgcccgcagcgtctccactcgctcgtatccgctggaattgtacaccaccggaatcgccggccgatacaatcgcagcgcttgacggatcgcggccgcgtagtgggtggggttgactaaattgatgttgtgcgccccttgcgcctccagctcccagaaaatctccgccagccgccgaatgctcaccgtctccccgaaccgctcgtggctgatcgggtgattctggcagaacacgcagcctagggaacagccggaaaagaacaccgtgcccgacccctgcgtgccgctgatgcagggttcttctcccacatgcagcgccgcgcgggccactaccggcatcgccggcatcccgcatacgccggcggaaggcgcgtcgtccgcgcggggaacccggcagctccgggggcagagagaacagcgggggatagccatatggattcctgctttcctgtaatctacctcttattgtactccaacgcatcgcggcgttcaatggaaattcagaatttgttcgcattctgcccgccgaatctggtatactgaaaacaatccatattggaaggagctttcccacatgaaatgcatctcctggaacgtcaacggcctgcgtgcctgcatgggcaagggctttgccgatattttcgccgcggaaaacgcggatatcttctgcctgcaggaaaccaagctgcaggccggccaaatcgaattagaactccccggctaccaccaatattggaattacgccgaaaagaaaggctacagcggcacggctgttttctccaaacaggagccgctgtgcgtatcctacggcctaggtatcgcggagcacgataaggaagggcgggtcattaccctcgaatttccctcgttctatttcgtcacggtctatactcccaattctcaggacggcctggcgcgcatcgcctaccgactggaatgggaggcggccttccgccgctatctctgcgggctggatgaaaacaagccggtcgtcgtctgcggtgacctcaatgtggcgcataaggaaatcgatttaaaaaatcctggtcccaatcggggaaacgcgggcttttccgatgaggaacgggacgctttttccgccctgctggaggccggctttaccgatagcttccgtctgctgtatcccgacgtgaccggtgcatacagctggtggtcctaccgcttccgcgcccgggagaaaaacgccggatggcgtattgactattttctggtttccaaccggctggccggcgccgtccgggaagctgcgatccgcaccgaaattttcggttcggatcactgcccggtggagcttcagctggatatctgaaaggggagaagcctcatggacgagtatcaaaaacaagtggccggcctccaggccgcgcaggtcatcgaagccctgcgccgcaacaatatggatgggtattttgtggaacgcgcggccgatgttcccgagcaggtggcccgcctgctgcacgacggcgacaccgtggcagtgggcggatccaaaacgctgacccagaccggcgtgctggatttgctgcgcagcgggcagtatcgtttcatcgatcgctacgcaccggatattcccgacatgcggaaggtattcctcgacagcttcgcggccgacgcctatctgtcctcggtcaacgccgtcaccctgaacggcgagctgtataacgtggacggcaacagcaatcgggtggcggccatctgctacggcccccgctctgtcattttggtggccggcgtcaacaaaatcgtcaaggatatcgacgcggccgtcacacgcgtcaaacgctgcgcggccccggctaacgccgcacgcctcggctgcgacacctattgcgccaaaactggcgcctgtatgggcctgcggggagacatggcgtccggctgcaaaaccagtacccgtatctgctgctcctacgtggtatccgcctaccagcgggaaaaaggtcgtatcaaggtcatcctggtaggagaggaattgggctattaaaagaccagcggccggggcgaaagcccaggccgctggtctttttatgtcagcggtacgccgcaaggatgggcgggccggctgtcaaacgccgcctcccgcatcacctgctcatacagccggtagccgccggataggttgtagcatgtgaaaccgtgccccgtcagtatccggcaggcgatataactgcgcaggccgctttggcagtgcacatacaccggcttgcctttgtccagctcctcaagccgagcgcgcagttcgtccagcggaatgtgcaccgccccctcgatgtgtccccgtcggtattcgccgggggtgcgggtgtccagcagcgtgacctccgggttgtgctgcacgccgggaacgtccttccagtggaactgctgaactgttccgtccagcaggttgccaatgacgaacccggccatgttcaccggatccttcgcggaggaaaagggcggtgcgtaggccagctccagctcggccaaatccgctgcccccatctgtccgcgcacggcggcggccagcacgtcgatgcgtttgtccgccccctcgaagcccacgatctgcgctcccagaatccgcccgctgccgcgttcgaacacagtcttgattgtcatattggaagcgccgggatagtaagtcgcgtgggaaggggagaaggtcactaccttgtcgaaccggtaccccgcggcttcggcagcccgttcgttgagtccggtcgccgccacagtcatgtcgaacacccgcagaatggaggtgccctggctgccgtcaaaacggctgtcccggccgctgatgttgtcggcggcaatccgcccctgcttgttggccggccccgccagcggcacccaggccggatctcccgtcacggcatgggtgatctgcaccgcgtcgcccacggcgtatatgtcgggcgcggaggtttccatccggtcgttgaccacgatggcgccccgtccgcccagcgtcagccccgcttccttggccagccccgtgtccgggaccacgccgagggccagcaccaccatgtccgtttccagcctttcgccgccctccagccggaccgacagggaggaatccgtctcttcgaagccctccaccgccgcatccagccgcagcgcaacgcccttgtcccgcagatacgcgtgtacgccgcaggccatgtcgtagtcgatgggcgccatcacctgccgctgcttttccaccaccgtcacctggattccctggtgggtcaggttctccatcatctccaggccgatgaagccgccgcccaccaccacggcgctgcgcggggcgctgctttggatgaacgtgtgcagccgcagcgtgtcctccaccgtgcgcagggtaaacacgcgcgccgactccacgccgggcagggcgggacgcagcggcctggcaccgggagagagaagcagcttgtcataggcttcctcgtactcgcttccgtcctccaggcgccggactgtcacggttttccgcgtcggatcgatagccgtcgcctcgtggcgcacccgcacgtccacggcaaaccttcgccggaagctctcgggcgtctgcagagtcagctcctcctggtcggtgatcacgcctcccacatagtaggggagcccgcagttggcgtaagagacgtatccgctgcgctccagcatgacaatttccgcctgctcgtccagccggcgaagccgggccgccgccgtggcgcctcccgccactccgccgataatcacaaccttcatacccgcgctcctttctcgatgtcgccctcccaggctagaatgccgccgatattcaccacatggggataccccattccgcggaacaccctgcaggcgctttcgctccggctcccgctgcggcagtatacgtacagcggtgtgcggggatcgggcgcgatacgcggcagctcgctttcccggcccagttccagatggacgcttcccggaatatggccctcgccgtattcctcgtcggtgcgcacgtccaagagaacggcctgcggatcctgtcggtaggttcgcacccattcgttgatattcggtgtactggctcgtgattttttgaaaagatgtatcgccatcgtttgacctccttgtcgggtttctgtccccactataccacgccgtccgccggccttccgtgataaagtcaccggccggcgcaaacacgaaatgcgggccacatgtcatggcccgcacgcggtcttttcaaggggtggcgcatcctgtcttattttttggctttcagctgttccgcgatcatccgggcgcatttgtatacgtcgccgccgcccatggtcagcaccagatccccctcgtccgcatgagccgtcacatagtcgctgatttcctggaaggtgggcagatacagcgcccccggtatgcgatcggtgatctgctgggaagacacatgataggtgttttcttcccgggagcccatgatgtcgctgacgatcaccttatcc

SEQ ID NO: 4351 - DNA, 15279 bp, Unknown
  16S sequences of unknown bacteria
cggcagaccggaaaaactgcgctggccgtcgataccatcatcaaccagcgcggccgcaatgttcgttgcttttatgtggccatcggccaaaagatcagtaccgtaaaaaacgtaatggaagaattggcacatcacaatgcgctttcctatacaacggtggtctttgcaggggcttctgatcctgcgccgatgcagtatattgcgccctatgcggggtgcgctatggcagagcatgtcatggaagagggcggcgatgcgctcatcgtatatgatgatctttccaagcacgccgtagcctaccgcagcatgtctctattgcttcgcagaccgccgggccgtgaggcgtatcctggcgatgttttctatctgcattcgcgtctgttggaacgcgctgcgcagctgtccgccaaaaaaggcggcggttccattacagcgcttcccattgtggaaacgatggccggcgatatctccgcctatattcctaccaatgtcatctcgataaccgatggccagatctttttggaggaaagcctgttccattccggcattcgtccagctttgaacgtagggctttccgtatctcgtgtaggcggcgccgcacaaacgcccgccgtccggaaatctgccggccagctgcggttggatctttcccagtaccgggaaatgaaagttttctcccagtttggctcagatttggacgaatctaccagagatctgctgtcctatggcgaacgcttaacgcagattttgattcaggatcgctatacgcctatctcagaggacgagcaggccgtcattctgtatgctatgacgcaaaaggggctggtctcttccctagagcaaacaaaatgggtacaagagggattgattccctttatccaacagtcctatccgcagatcttggcacagctgggtaaggatcatacgctcaatgatgatgtgcgagcgtggattgcggatgcggtaaaggattttatcgcccaaaaaacagagcaaaaacaaaaagaggaattggcaaaggccaaagccgctgccgttgtacaggagaatgagcaatgaacttagcggagattagacaaagaattgtcagcatctcccaaacgcggcaaattacgcaggccatgcgcatgatttccagcgcgaagatgcgtcaaggcctaaaacgcgccaccgccaacgactactatatccaatccgtccgaaccgccatccgcaccctgctgacgacggtatctacgatggagcatcgatttgtagaccgtgcgaaaagtgggcgtgccgcgtttgtggtgataaccagcgaacgtggtttagctggcggttataacaacaatatcctcaaatttgcagaagagtatatgtccacctaccaaatggagcgtgtgtataccatcggcgccgtggcccatgagtatttttcacataaacatgtagatcatagcactgactttctgcgcgttatcgatcatcccgagctatacgaagcccgtaagctttcttttgacctgcttcgtctctttcttcgcggagaggtggatcagatcttcatcttttatacgcacttgatcaattccatgacctgtgagccgcgtgtgttgcgtctgctgcccctccgtcagtctgatttccctgaaatacagctgccggagcaactctatcccggctcgtttatctttgagccggacgcacaaaccgttttggaaaatctggtgcctcaatacatcgtaggccaagtgtatgcaacattgatccaggcctttgccagcgagcaatgtgcccgtatggcggccatggacgccgccacaaacaatgcggacgaaatgctgcataccctgaacctccaatataaccgtgcacgccaagatgccattacacaagaaatcaccgaaatcatgggcggcatggcagcaggaggagaataacatgaatgaatttggtaaattggtatctgtggtaggtcccgttgcggacgtatggtttgaaacgccgcctccgcagcatcaattgctatatgcactgtctgataaaaacaaacccgtaccccttgaggttgtctcccatcagggggatggcagggtacggtgtatcgcattgggggccacagaaggcatgtacgttggtcagccggtagaagatactggcggccccatcagcgttccggtcggcgaagccgtgcttgggcgtaccgtaaatgccttgggcgaacccattgacggcaaagggcccatccaagcggaacggcacagcatccatcaggccccgccaccgctggcagaccagacgccgtccacgcaaatgtttgaaactgggataaaggtcatcgatttgctggccccttatgccagaggcggcaaaatcggcctgttcggcggcgccggtgttggaaagaccgtactaattatggaactgatccataatgttgcttcttcgcatggcggtatgtccatctttgccggcgtaggggagcgctctcgcgaaggcaacgacctgatgcaggagatggagcgcaccggtgttttggaaaaaactgccctagcctttggccagatgaatgagccgccgggggcccgtatgcgtgtagcgttgactgggcttaccatggcagaatatttccgtgatgtgcagcaccaaaatatgctgttgtttatcgataacatcttccgttatgtgcaggccggctctgaggtttctgcgctgttgggccgccttccctctgcggtaggctatcagcccactctcgctaccgagctaggtgaattagaggagcgtatcacctctactacccaaggctctattacttccgtgcaggctgtgtatgtgccagccgatgacctaacagacccggctccagcgacgaccttcactcatctggatgctacgactgtgctttcccgccgcatcgtagaaatgggcatttatccttccgtggatcccttggaatccagctcacgcatcttggatcctcatattgtcggccaggagcactatcgcgtggcccgggaagtgcaaaggctattgcagcggtatcgtgaattgcaggatattttggccattctcggtatggatgagctcgctgaagaggatcgtatcgccattcatcgtgcacgtcgtatccaacgttttttatctcaaccgatgtttatggcagaggtgttcaccggcgtgcccggtcaatatgtgccaatcggcgataccattgagtcctttgctcagatcgtggacggcaagtgtgatgatctgcccgagcaagccttctatcaagccggtaatattgatgacgtacgcaaaaaagcacgcgatgaggagatggcgtaaatggccgatacctttttgttggagatcgtaacgccggaacgcgtttttatgcaggatcaggtggagatgatcattttcaataccagcgacggcgaaatgggtgtcatgccgcaccatgcggatttggctgctgccatcgtagcaggtcctcttcgaatacgtcgtcatggagaatggagcgaagtgtttatctccaatgggtttattgaaatctttctaggcgccgcacatatgctggtgcagacggcagaatggccggatgaaatagatcgaaggcgtgctgaagacgctctagagcgtgccaaacgcaggatgcagcatcaaaagagtcatcgggattttgttcgtgccaaagcctctattgcccgcgctctggcccgtatgcgtgtatttgacgatacacataaatcctaaaaaatttaagagcaagcagagcttgctctttttttgttttatgcactagacaacttgattttatattgttcacggcaatgtatccaatgtacagacccaataaggcgcatcaaaaaagggccctgcaacgctgcagggccctttgccgtccttacacttcttctccgatatgctcaatgatcttcatcggcaccttgctgaatagcgggcttacgctctccctattgttgatgcgcaacaccgtctctgcaaacagcggcgctacggaaatcagatgaatctttttacatttccgaataaacggattctctacgctatccgtagaaatcagcatttcaatagggctgttttcaatggcctgtacccctttttcgcgaatcaaaacatgcgataggcaggcataaatatgatttgcgcccttgctcttgagtgcttctgctatctctaccagcgttccgccggagatggtaaagtcgtctacaatcaggcaatccttaccctctacatggccaatgacatccaataccttggccttctcatcatgtgcatagcgcgttttatccccaatggccaccggcagccccaaataatcggcatagcctctggcatccttggcaaagcccgcatccggagaaaccaccaccaaattgtctgtgatgcccagcgacttaacatattcacacaacatgggtttggaatacagatgatcgctcggctttttgaaaaagccctgcacctgcggcgcatgaagatccatcgttaccacacgatccgccccagcctgctcaatggcatctgcgcagaccctggcacgaatggagacacggggctcgtcctttttatccccctttgcatacccaaaatagggaataactgccgtgaccgaatttgcgctcgcacgcttcatcgcatccatccaaaataaaatctctacaaactcgttgtttgggttcaagccgatcggttgtacaatgtatacgtccttgtcgcgtaccgtttccttgatccgaacaaaaatattaccgtctgaaaacgtaatgacctcgctatcgcctaactcacatccaatgtattcgcacatccggcgtgcaaaaggtcttcctgtcgagccagcaaaaatcttaacgtctccgtttgcgtgcattctcatcagcgcccttctctagcattataaacattgtaacatctaaacggttttcattcaaccaaacatacacgcatttctgcgtttttcgcgccattcaaaaaggcagccattctaaaatggctgcctttctttaagcttcaggcgtctggtcctgtttctcttcctcctgcgccgtcccttccgtaagcgcagctttatggttttgttcatcagcgcccgctgcttcgggcaattttccttccataatctgctcaaattcctcggcagtcagcttttctttcacgataagctgttctgccaattcctccatcttgtccttatgggtgcggatcaggctcaatgccgtttccatagcattgtccaagatgctgcgcacttcctcatcaatgtccgccgcaaccttttcggagtaagatttttgatgtccaaaatcacggcccaagaatacttcctggtcgctgtctccgtaaaataccgagccgatcttttcgctcatgccatattcgcgcaccattctgcgcgcattgctggtcgcatgctttagatcggaataggcgcccgtcgaaatttcgcccagcataatttcctcagctgcccggccgcccagcgccatggcgatatcatccagcaaatagcttttggtcacgtattttgtttcctcggtgggcagcgtcatggtatagccccccgcctgcccgcgcgggatgatggaaacctcatgcaccgggttacagtttggcagcaaatgcgccaccaacgcatggccggattcatgatatgccaccagctttttgtccttttcggtcaccacgctggattttttctccgggcccaccgtaacgcggttaatcgcttctaggatctcctgcatatggatctcggtttttcctttgcgcgctgttaaaatggcagcttcgttcatcacgttttccaagtccgcccctgtaaagtacggagtacgcttggctacagtatgcaagtccacatcctctgctatgggtttccccttgctgtgtaccgccaaaatctcttcacggcccttgatgtccggataattcaccgtgatctgcctatcaaaccgaccaggccgcagcagcgctggatccaaaatatccggccgattggtcgccgcaatgatgataatgccttcgttgggcgcaaagccgtccatctccaccaacagttggtttaaggtttgttccctttcatcatggccgccgcccatgccagcgccgcgatggcggcccactgcatcgatttcatcaatgaagatcatacacgggctgttcttcttcgctgtttcaaacaaatcacggacacggctagcccctacgccgacaaacatttctacaaagtcagacccgctgatggagtaaaatggaacacccgcttcccctgctactgccttggccagcagcgttttccccgtaccaggagggcctaccagcaatacgcctttgggaatccgcgcccccaaatcggcaaactttttagggttcttcaggaagtcgacaacttcttgcagctcttccttttcctcttccgcgcctgccacatcttcaaaggttttcttattcttttcatccaggtttaccttggcacgcgaacgtccaaagttcatcaccttgttgccgccctggccctgctggttcatcatataccagaggaagccgatcatcaaaatagaggtcagcaggtacggcagaatggaaaccagccagctctgctccggttttggcacaaaatccagcgtaatgccggcatcctgcgggtttgtaatgtccggatggtttaccgaaagcgctttttccagatcttccatgaacaccgggatactgggtaaatatgtttcaaaatcccaatattggtctgggaaacgttcgatctgctcctgtgtggcatcctgctttagcgcctttacctcgttttgcatgatctgtatgcgcccaatttgcccctgttctatttttttaataaatacagtgtattcgatctcctggcctattgtgcccgtcggagaaaacagcatcgttagcgccaggatacatgctagcaccaggataaatgctcccggtccacgcatcatttttttcaatggaataatcctcctatattcttacaaatagtactatttagaataccataatttggcgtaaacctcaatgttgcaatcgctatttatacaattcttccttcaatatgcaaacctccggcaaattacggtagaggttattataatccagcccatagccgacgacaaatttatccggaatggtaaagccgcaatagtccggcgtgatgtctacgcgacgccgttcgggcttatccagcagcgtaacaattttcagcgaggccgggtttctgacgcccagcatctgccgcaatcgggacagcgtaagcccggtatcgatgatatcctctaccaacagcacatgcttgcctgaaatatccacttcaaagtcctgtcggatctgcacattaccagtggtttccgtgccctttgcatagctggaggcagataaaaactcgatcgtcatcggcacatcgatatgccttgccaggtctgctgcgaaaataaacgaaccgcgcagaatacaggctaagatgatctccttcccatgataatcgctggtgatctgcctccccagctgtgttatcttttgttcaatctgctctttggataccaatacggattctatgtccgccctcaacatggctgttcctcctctaaagtataggtgaatcgcatagcaatcatgcgtttggtctggtttgtaatctttgccaatcggctgcgtgcaacgccaacggcccacaaaatctgcccatcgcattcaatgatgggaaaatggtcgcgcaaagccatcggcgttttttcatctgtgaataaatccgaaatgcttttttgtccgtacggcatagcgattttatcgcccggcttcctcatgcgcgcagtgcagggccagcgaatttcatcctcatcgaaatactgtatccgtgcctgcttcgatggatattgctctggccgctccgcaggtatgacttcaatacgccatggcccgatttttgtacagccctgcgcaaactggccggccatccggcagacgttgctgcgaaagatctctaaaaaccgcccgctttttacgcgccatccttgcgccagctcgcaaacgccgcgctcccttgtcagcctcataagcgtacgcaccatgcgttcctctgtacggatgcccagctttaccagcgtttgccccgcccaacggcttagcaccggcggcggcgccgcgcacaaaacgtctttatcataccacgcgcccaactctttttcttctccgatttttgcctttttctctaaattctccactatgggtgcaaaatacgcttcctcttcggccgcatactctgccagccgtgccaatgcacgtactacttgcggattgtatgcacggcacaaaagcggaagcagcgtattccgaatacggtttcgcaaataggcaggatccgcattgctctggtcttcacaatgtgcaattttgcatgcgtcaatatagcatcggatctcctcatggctaaccgccagcatcgggcgaacaatacgcccattttttgctgggatgccctgcagcccacgcaggcctgtcccctgtattgcgtgcatcagcactgtctctgctacatcgttctggtgatgggcggttacaatccattcctccggctctctctgccactccagcgcctggtagcgtagccgcctggccgccatttcaatgctctcccccttcatcctgtttgcatttacctgcaaatgctccacaatcaagggaattttccaggccctgcaggccttttctaccaacatcgcctcgtaccggctctgttttcgaagcccatggtcgatgtgaatagcacgcagtgtacatcctttttgcctagcttcctcagatagcgcatacaacagcgccatggaatcctttcctcccgaaacagccaccaccaaatgcggcgcagtctcgcctgtcagccggcatagtgtttgatacaatcgttgcggaagtccgattttttcatagtgttttggcataacgcatctcccagagcttggtcccaatctcaatctgctgctatacgccctcggaagaaaatccgtatttctcataaaatcttctggctcttctgttttcttccaacacccaaacgacagcagatcgatatcccatattctttaatctctgcaaacaaaataaaaaggcccagtttgtagcaggcgtaccccatacactgggatgcatataaaaagcgtagacctctccttcgtcctgtggtgccccctcttcatggctatgcgccagcatggcaaggccgtaaggctgtccatcgcaaaaaaacaaatagcattcctgtgtgcagcccggcaaaaaatccgaccatattttagcgcgctgctccggcgtgaaccgctgcctttccgctttcggcacaatcccctcataggctgcttgccaggacgctgcatgtatcctccccagaatatctgcctgcgcggccgtagcttgtcttgcttgaaattccatgcccatattgtacctttctcttcgacctttacgcaacctttgcatcaaaaaaagggcccgagggcccttttatcgctatcttccctgcatgcgaagcactacggcggtcatatcgtctcttccttccgcccgctcccgtgccatggccagcagcttttccgccgcaacagccgcactgggcgctctttccacctgtcccagccactgcggtaattcctctggcgtcatcaaatcggcgatgccgtcgctcaataatacaatggtgtcgcccggttctatgctgcgttcgatgatccccggccgcacattgtcaactatgccgatgggcaaggcaggcgccgtaatggattccgcaattccgttgcgtatgatccacgagggggcggcgcctgtcttgatcatctggcaatgtccctgcaccagatccaccaagcacaggtctaccgctgcaaacacctcctttgctctgaaagataagatccgatttaccatcgggataacctgattgggatcaaatcccgcctcaaaaaacaattcaatcagccgggaagcaagcgcagctgtctctgccgctgctgtgccgctccccatgccatcgcataagcaaatcagttcctgccctttgccaaggtggacggtagaaaatacatcgccgtttacctgttgccctttctttttggccgtggctacgccgccctctacattcatctcatttttcctggcaaactgcaggcagcagcgtccccgtccctgccctgcgcacacctggctttccaattccattggttcttgacagatggaggataccaacctttccagcgacgagcggcaattcttgatgccctggcagcgaaccgcttcgatacgcacgctttttcctttcccatgctgcacagctacgcctgcaatctccatgccgcgctgcgtcagtctctggcgaatcatacgctctgcggttgagtcaaaccatccgcgccgcgcttgcttggcgctgtcccgcagcgccttggccgcaagtcttaattccaagctgcccatcccttgcgggtcggtctccttgatcatctgcgctgtcatagacaatgcctccgataggcacaccagctgttttgtcagatcctgttgcaccaattccagcctgggcttttcctctctactcttcttttgtctgtggcgtaccgccagcttttccccaagctccttgggaatgctccaggccaatacagtgcctgctaaaagctctaagcaaacgatgccaagctgaggcctgtgcgttaaaaaaataaatgtgccaaagcataataggtaacaagccgttcccaatgggcggtttacccggctgccaaatgccccggccagcgcacccagacccagactgcccagcatcagcggatcaacagcgccgcaaagcatatcgcaaaaccctgtccaaagccctaggctggccgcattgctgggcagcatatacagcgcagtatacagcgatactgcacacgcaatcaccatgaaaagtgaaaggccgcaaaatgtccaggcgccaaatcccattagcacgccgctggcaaatacaaccaaagccagcttttgcgcctcgtccaatgtgccctttctttgataatcattttgaatttcacaaaaccattcaaacacgatggcaaataaaaagatcagcgccaggttgatcgtgccggaaataagcgcaaacatcgtatcccgctggaaaaaccataggcatgccatgcctgcaatggccatcgtccaaaaaatcatcgatctacttgtcttttgctgataaatatcccccagccccaccagtacacacagcgccgccggtatcaagaccgccggcatcggtacagtgggatattgcatcaatgcgcccaatatgcttccgatgcttgcaatgtacccattttttctctgtaaaaacagcgccgcgcaatacgctgccgcaaatggagccacggcgcccacaatctctgcctgcgccaataggatgcacaataggccgggcagcccgtttccaagcccctgtatttggaattttgctctcgtttggctgatctgcatatagaatctcctttaagcatacaatacagtttcactgattgcatcgtagcaccctctcactgcggatttcgtcgcctccccttgccgtatgttttttatgctgtgtttttttcagagatgttctccgattttgtcagatagtgtccttgtttaccatagcaaaaaaccgccgagagttttcggcggttttttcgcaacatcttatcttcgtttctcttaattcactgtcccacagcgtgttggctttgctgtgtattcttttcaaattgctgcatacattgacataattcttggatggattcgctctggctccccaacaaaaccgccgcgctttcctctgccacactgtttttcatctgcatgatcccggtgaaaaaatccagcatggtacggtactgtttggcatagcgttgggccatctctgcaccgatttccgtcatccggggcaatcccttttcatccagttcaatcaattgtctgtttttcagccgtcccagcatcctatgcacgctaggcttgctaacctgcaaacgcctggcgatttgccctaaccgcacgattggctgcaattcgtaaattaccaaaatatatttgatttgtgccgttgtcaattgcatcttgccctcgtttccatacaaaagcggagtgcggatccacgctccacactccgctgatttacattctatccatctcatccatctttcactatggattcaatgcttgtggcatattccagaagaggcacaatgatcacagccacagccgcaagaactttgcccctttcttctatccctgtacagctttaccactgccgctgccacaattgctaagaccgccaatcctactaggatcgtgcctccataagcttgcaaaaagcttcccatcattgctccctccttttgtcaatgttaagcgtttaccttattggcctttatagaaacctttaatgtgtcgctttctttatacggacggaacagcatatacaggataaacgctacgattgcaatcgctacgatagagcccagaacattgccctgtccggagaagagcatgcccagctggtataccaccaaggccatcgcataagcaaacccacactgataaccgatggcaaaccaggtccattttgcgctgttcatctcacgcttgattgcaccgatggccgcaaagcagggggcgcacaacaaattgaataccaggaatgaatatgcggacaacggtgtgaaggctgcctgcatgttggtccaaacctgccagccattttcagctacttcgcctgcgccaaacagtacgccgaaggtacctacaacgttttccttggcaatcaaaccagtcacggacgccaccgcgctctgccagttgccccaacccagggggttaaagatccaggcaatgccattgccgatggccgccaagatgctgtcgttcatatcgaccatgccaaatccttctgctccccaaccgaagttagaggtgaaccaaacaagaatggtggccagcaggatgatggtaccggcctttttgataaaggaccagccgcgttcccacatcgaacggagcacgttgcccaccgtcggccaatggtaagccggcaactccataacaaacggagccggatcacccgcaaacatctttgtctttttcagcataataccagagatgatgatggccgcaatgcctacaaagtatgcgctgggcgctacccaccatgcccctccaaacaaagcgcctgcaatcaaagcgatgatcggcagtttcgccccacaggggataaaggtagtcgtcataatcgtcatcttacggtcacggtcgttttcaattgtacgggaggccataacgcccggaacgccgcagcccgtgccaatgagcatcgggataaaggattttccggacagcccgaatttgcggaaaatacggtccatcacaaacgcgatacgcgccatatatccacaggattccaaaaatgccaacagcaaaaacaataccagcatctgcggcacaaagccaagcaccgcgcctacaccggccacgataccatccaagatcagaccttgcagccatggcgcacaatgaaccgcttccagcccgttttcaatcagcaccggaatgcctggcacccaggttccgtatgccgccgggtccggttcctccagagatgccgcttcttgataagaggcataggtaaccgggatggattcctctaggttgccctcatcatcatacatctctgccgttgctgtcaacgtcgttgcttctgcaggatctacgcctgcttcttcagcggcactttcaaaggcttctatcatcgctgctggtacggcatattcttcggcggcctcttcatacgcggcgcgcccatttccaaagagaaaccatccctctccaaacaggccgtcattggcccagtccgtagcccaagtacccaccgtcgaaacagacaggaagtacacgacaaacatgaccacagcaaagatcggcaaggccaaaaaacggttggttacgattttatcaatcttatcggaagtagacagcttgcccgcattctttttcttatagcagccttttataatagaggaaatataaacataccgttcgttggtaatgatgctctccgcatcatcttccagttctttttcggccgctgcaatatcctgttcgatatgggacaataccgaaggatccagctttagctgctccaataccttttcatcccgttcaaagattttgatcgcataccagcgttgctgctctgccggcatggtatgtacagccgcttcttcgatatgggcaatcgcatgctctaccacgccgctaaagctgtgttgcggcaccgtggtttcgccctgcgctgccctgacggcttcttccgccgcctgcatggtgccatgtcctttcaaagcagaaatctcaacaaccttgcagcccagctggcaggacaattcttcaatgttgatcttatctccgtttttctttacgatgtccatcatgttgaccgcaacgaccaccgggattcccagctctgtcagctgcgtggtcaggtacagattacgctccaggtttgtgccgtcgatgatgttcaaaatagcgtcgggccgctcattgatcaaatagtttctcgctataacctcttccagcgtataaggagacagggaataaatacccggaagatccgtgatggttacatcatgatgcttttttagcttaccttcctttttctccaccgtaacgccgggccagttccctacaaattggttcgcgcccgtcaacgcgttgaacagcgtcgttttaccgctgttcggattgcctgcaagcgcaattcttacgtttggcattttccattcttcctttcacatttgattagttggaactaacagtggggtaaaaaacaggggattaaccccttattctcattccacctcaatcatatcggcgtcggctttgcggatagaaagctcataccccctcaccgtaacctcgatcgggtcgcccaacggcgccaccttgcgcacatgcacctgaacaccctttgtgatgcccatgtccatgattcttcgctttacagcgccttccccatgcagcttgaccacagacacagtgcctccgacctttacttgccgcaacgtattcattgcatctcctccttaaaatatatcaatggatgttacaccatgattttactagccatttccttgctgattgccactctggattcctttacatttacaatcaaattgccacccatcgccgcaatcactgtaacaa

SEQ ID NO: 4352 - DNA, 5765 bp, Unknown
  16S sequences of unknown bacteria
catagcctcccttttttaaaagggaggtggcgcggcgcagccgtgacggagggattgacaaactgcaacacagccgtgccccgccaacttacaagatcgtccccttggtggaaggaatccgctcgcgaaagcgctcgtcgatttccaccgcctgggcgagcgcgcgggcgagcgccttgaacgcgccctcgatgatatggtggctgttttccccggccagcaggcgcaagtggattgccgcgcccagcgcacgggaaaatgcgagcatgaattccttcaccagctcggtatcgaaatcgcccactttctgcgcggggatgggcaaatcccagcccagtgcggggcggccggaaatgtccaccgcggcgagcaccagcgcctcgtccatgggcagaatcacgctgccatagcgccggatgccgcgccgctcgcccagcgcctgatcgaacgcgcgccccagcgcgatgccaatgtcttccgtggtgtggtggaaatccacatcggtatcgccttcgcaggcgagttccaaatcgaaattcccgtgccgggcgaacaactccagcatgtggttcaaaaagccgcagccggtattcaccgcgtatttcccctcgccatccagttccagggcgagcgcgatgcgcgtttccgccgtgttgcgctcaatcgttgcctttctcatgcccagcctcccgcaaaatctcgtccgtggcgcggatcagcgcttccatgtccgcgcgcgtgccgatgctgatgcgcacaaaatcccgcgtgcgcggggcggagaaccagcgcaccaggatcccgcgcgcgcgcagcgctgtaagatattcctggccgcccagcggccctttggcgaacaggaagttcgccttactctccaagaccgcaaaccctcgctcttgtagctgctggcgcgtccattcgcgattttcgatgatcgcgtcccggcagcgcgcaaagtacgcgcggtcgcgcatggcatattccgccgccagcaggctgagccggttgatgttgtagggattgaagctgaagcgcagcgcgttcaaatcggcggcgagcgcctcgctggccacggcgaagcccacgcgcgcaccggccagcgaacgcgacttggaaaacgtgcggacgaccagcaaattctcgcattccggcaatagcgccaccgcgctctcgccgccaaaatccacatacgcttcatccaccaccaccagccggtttttgtcctgttcaagcagtgcgcgtacggcgcacaggggcagagataaacccgtgggcgcgttcgggttggccaggaacaccgtctccctgcggcccgcgtaatcctccacgcgcacggaatagtcctcccgcaggggcacgacgcatgctttgacgtggaacatctcgcaaaacacgcggtagaacccataggtgatgtccgcgaaggcggcgccgttttcgcaaaagccatggaaggcaaaggccaacagctcgtcgctgccgttgcccagcgccacctgcgcgggtgaaacgcccacttcccgggcaatcgcctccgccgccgcgcggcaggtgggatcgggatacaggcgcagcttttcggcctcggcacggccgagcgcatccagcaccagcgggctgggcgggaacgggctttcgttggtgttgagcttgatcagccgctcttcgccgcgcggctgctcgcccggcacatacggcgttagcgccttcagcgaacggttcaaaaagcggctcatgcgttttcctcctcaaagcggctcagggcgctgcgcgcgtgcgcttccagcccttcggcgcgggcaaagcgcgccacatcgtccttcacggcggcaaacgcctcgcgcgaatagtaaatgtagctgctctttttcacaaaatcgtccaccgaaagcgggctggcaaaccgcgcggtgcccagcgtgggcagcgtgtggttcggcccggcgaagtaatcgcccagcgcctcgggcgcatagcggcccaggaaaatgctgcccgcgttcttcaccgcgcccagcagggcgaacgggtcgcgcacgcacagttccaaatgctcgggcgccagttcgttggcaatggcgacgccttcgcgcaggtcgtccgccacgatgatcttgccgtttttttcgatggaggcgcgcgcgatttcctcgcgcggcaagagggccagttgccgctcgatttccgccgccacagcctccgccaggaccatgctatcgcacaccaacacggcggaagagagccggtcgtgctcggcctggctgagcaggtccgcggccacgtgcgcggggttggcctccgcgtccgccaccaccaggatctcgctcggcccggcgatcatatcgatatccacctggccgtacacctgccgcttggccgtggccacgtagatgttgcccgggcccacgatcttatccacgcggggcacgctctgcgtgccataggccagggccgcgatcgcctgcgcgccgccggccttcacgatggtagtaacgcccgcgatcttcgccgccgccaaaatggccggggcgattttcccgtccgggccgggaggtgtggccatcacgatggtgggcacgcccgcgatcttcgccggaatcgcgttcatcagcacggtggacgggtaactggccgtgccgccgggcacgtacagccccgcgcgggcgatgggcaaaatccgctgccccagcacgatgccctcgcgctcgctggcgataaagccctcgcgcttctggcggcggtggaaggcctcgatgttctccttcgcgcgcgcgagcacgcccctgagcccctcgtccacggcggcatagccttcctcgatctcttcccgcgtggccagcagggcggtttgctggggcgcgccaaattttgcgttaaacgccatcaccgccgcgtcgccctccgcgcgcacggccgccaaaatttcgcgcacatcgcgctccacgctctcgggcacgcgcgcttccccgcgcgagaggatttcttcccgcgccgcctcatggctgcgcaaaatgcgaatcatacgattgcctccaatttcgccttgatttcgtcgatgaggggcgcgtggaactggtagctcgcgcggtttgcgatcaggcgcgcgctcgaaggcgcgatcacgctgaacacgctcaaatcgttttccttgagcgtggtaccggtttccacaatgtccacaatcacgtccgacaggcccaggatcggcgccagctcgatgctgccgttgagcttgatgatgtcgatctgccggttgagcgaaagataatagttctgcgcgatgttgacgtatttggtggccacgcgcaaaggcaggctcacgtcctccacccagccgttcttggcggccacggccaccacgcacttgccgaactttaggtcgagcagttcatacacatccggctcggtttccatcagcgtgtccttgcccgccacgccgatgtccgccgcgccgcgctccacgtaaatcgccacgtcggacggcttcaccaagagatagcgcacccggccgtccgggctttccaccaccagcttgcggctgtcctcgcccagggccagctcgccaaagccgatctgtgaaaacagcttgagcaccttatcgcccatgcgccccttgggcagcgcgatattaagcatgcagttccacctccatccggccgtcgctcaaaaggcggtagatccgccgcgcgcgcacgttttccggcatttcgcactccgcgcgcacgctgatgccctccttgagcagcgccgccgcggcctgcgccgccgcctcgggccgcgcgttgccatagagcaaaaccgcgtccacatcgtagggcttgacctcgcgcagcgcgcgctccaactcgtccagatacagggcgaagcccagcgcgttttgcggcttgttcagccggcgcatcatgttgtcgtagcgcccgccgctcatcaccgcgcgcgggatgcccttcacatacccctggaacaccagcccattgtaataatccagatcgttcaccacggaaaaatccacgcgcacgccgctcaaatcgtccagcacgccaagcgcgcccgccagcgccgccatttcgcccacggccgcttccatctccgcgtttttgcacagcgcgcgcagggcgggcagcgcctcgggcaggggctgggagaacgtggccagcgcgcacagcagggaagcatccccttcgtccacgccgttttgcgccaaaatcgccgccacgccgctgcggttcttttgccgcagtgcagaaagcagcccgtcacgcgcttccatggggagcgcagccgcgtccaatagcgccgtcacaaaccccatgtggctgatgttgagcacggtttcgccacccgtggcccgcaggctcttgttcgccagcgccaccacttccgcctccgcgtatcctgtgccgccgccgatgaattccagccccatctgccagatttcgccgtattcccggctgttcttttcccgccggaatacgttttcgtggtaatacagcttttgcgttttcacatccggcttggcgttttttacgatgctcaaggtcacgtccggtttgagcgccatcaacacgccattgggattggaaaaggtgatgatgttctcgccgcgcaggaaattcttattctcccggtacatatcatagggttcaaatttggccatccgatacagatggtagccatattgctcatatagcgcgcgcagcgtaaattgtagccgcacatcgcccggcagcgcgtccattgccgtggtcatccgcccacctcccgaaaacattggagacagtatagcacgctttagtgctttagtcaagtaaattgttagtgtgatgaatcagactcgcatataccccgtccattagcttgtcaaagagcccaggagagaacgcgagaaagccggggaacctcaatcctgcagctcgtgcagaaggacattcaggtagtctgtacgcgtatccagaacgcggagaatagaaacggtatccgttacctcgtagacgatcatgtacttcttgtgaatcaagaatctctcgtcgatctcgcggtgcaacttatggcgtagttcagggccaagcgacggctgatcttttagcagcgcacaggctgcagcgatgctagccatgagatttgccgctgcgtcaggggtgagcaacgtatccgcaatataggacttgatttcctccaggtcagctatcgcagcgggtgtatagcgcagtttcattcatctatccccaatttagcgcgcatctcttcttcagaaacccaatcactgtccgttttgacggaatcgcggcctttgcgaatctccgtcatcaactgagcaatggcgacatttcggagcgcctcctgggaattctgcgtaacaataaacggaagaccgcctacgttgatggattgctgcagaaagcagttaatcgcgtccgtaagggtaaggccgcttttctcgtaaatttgctcgacctgcgccttgatctccggattgatgcgcatttggaatgtgccggtcttgggcgcgttcataacgttcaggacttgcatacggatcgcctccttattcgcattatagcacgattctgaatatttgtcaatacaacgtaattacaaaatgcagaaatcaattttgagatttgtttataatcgacctgaagtttgtccgccgcaaaacttgccagaaaagcaattttgcggtacaatatataataataggtaagaagcaaaccgccaagaaggaggttgcgcagatggaaaacaagaagctgccggtgggc

SEQ ID NO: 4353 - DNA, 13151 bp, Unknown
  16S sequences of unknown bacteria
tagaggccgcagtggtggttgctgcacgccacgacgtcgccgggctgcggattgctgacggcgggcatcgcccagaagtcttctgcgacgtacgcatggccgtagctgccagtgagcgcgtagctgacgagaccggagcagtcgaaactgctcgggccggcggcaccgtagacgtacggcgcgccaaggcagttctgcgcacgcgagacggcgctgctgccgccgccgtacgtacgcccgctcgagctagacgacgactttgagctgctggaagaactggacttgctggagctgctcgagctcgaagagctgttggaagagctcgcggccggcgtgtaggcctgcgctgcggcggcctgcgcggcaagtgcctcttgctgctctttggcaacggcgtctgcaatctcggagctgaggctgtctttgcgcgcctgcagggccgcctgcttctgctcgaccgtctgcttgagctggcttgcctcgttcaaggcggactgcgccttgctctgctggtcgtcgagctccgccttcgcgctctcgagctcctgcttggccgtcttggtctcggcgacgaggttcgcgtcgtcggtgttgagggtgttcagggtatcccacaccgtcgcgaaatcgtcgaaggtgctcgagcccatcaggacggaaaggtacgaggtggcaccctggcggtacatcgccgaggcacgcgtctcgagctgggtctggaggttgctgatcttgccctgggcctcgtcgatcttggtctgggcctcttcgaccttggcggtggcctgctgatagtccctctgcgcgacgttgtagttctcggcggcggactcgacgtcgtcgctcatggcggtgagctctgccgcgacgcttgccgcctcagctttcaggtcggcagaagacggcgtcgcaaacgcctgcacggggctcatcgatgcggccagcagcacggaaacgccggcagctgcaaaggtcttgcggttcagcttgaaagtcatacgaaaataattcctttggtcggtttcatgtgacaaggttcgttcgtgctgcgtttttggcttcgtttattgctgcgggacaatcactgccccatcggattggttccctatggtagcaccgagcccgcgaatagtctagaaacgcaggcgcgcgccatcacaggttattcacatttctctatctgattgcgttgcaaaaggcgtcgagcaaaatgaccgccaagtgctgttcccacagctcaccggctattttgttgccgtcggaatccaccccgttcggggcgacctcgatcacgacgcggttgtgcttgcggctggccgtgtcgatggccgtacgcaggcgcttggagaagctgaagtcgttcgtgagctcgacgaccggcgtgccgtcctgcggcgccgagccgaactgccccaccccgagcttgagcatgctctcggcgggaacggtcccgagcgattccgcgctcacgacgatcgcatcgggggtcgtggcgagcgcgaggtttgccgcgcgcgaagacacttcgcggccgacgccgtcgagcccgtagaagcacgcctcgaccttcttgagcgcctcggccgcacgggcaaagcccatatggtcctcgttttcctcgctggcaggcgacttgccctcccatgcgtggcgcaggcgctcgatggcgtcgtaggtggtcgtgcccgcgatgccgtcggcctcgatgccgacgctcgtctggaagtcgcgcagcgcgtgctcggtatgggcgccgaagatgccgtcggggtctcccacgacaaatccgaggacctccaagatgttctggagcgtgcgcacgtcgtagccgtggaagtagggcatgcgcaggtagagcatgcggtcgcccagcgagaaggtcgcgtcgacgagcgccgaccaggtctgctggtcgatcacatcgcctgccggaagctcctcttctacacggaacttgcgcacggcctcttgcgtgcgcgtctggaactgcccgtccacggacagctcgaagcccagcatgcgaaggcgctgctgcacgtcctcaaccgcgggaccggaatcgttttttctgatgatgcgcatgaaaaacacctagctcagacggctcacgaagaagtcgcccatcgcgatgagctgcttgcgggacaggtttgcggggagcacgcgcttcaggtcctgctggtgctcgtgggcaagctcgagcgcacgggcgcgggcatactcgatggagccggcctcctgcatgatttccaccgcgcgctcgaggcgggcggggtcggtctcctttgtggagaggatctcgagcagctcgtcatggacagcgccagtcgtattggcaagcgcgtgcacggcaaccatggtgcgcttgccctcggtgatgtcgctcctgaagtccttcttggccgcctctttggtgccgatgaggttgagcaggtcgtcttggatctggaacgcgagccccgtggacatgccgtacgcgcggagcacttcgatctgctcctcggtgccgccgccgatgatcgcaccgacggccagcggcacaccgccggaatagaacgctgtcttgtgcgcggccatgacgaggtaatcgtcgaccgtgaggtcgaagcgctcgtcgcgggcccagccgatgtcaagagcctggccctcgatcgtgcgcgtggtcatgtcgacgagctcctgcagcacgcgcagcttcgtggagtcgtccaggttgctgtcgcccaagacggttcccgtgaccagcgagagggcgaggtcgcccatgttgatcgcaagcccttcgccctcggtgaggtgcaggcaaggctcgccgcggcgcagcgtcgactcgtcggcgatgtcgtcgtggatgagggcagccgtgtggaagtgctcgatagcagctcccgcggccttcgccttttcggggtctccgccaacagccttgcaggcgagcatgcagatgagcggcctatgccgcttgccgccgttctcggagaacttggcgagcggaccgtacaggtagcgcctcatgtccgcatgcgccctgtcctggaagaacgtggcgatgtagtcgtctatgctttttgtttgcgtgctcaggaagtcctgaaatatttggttagccatagcgcgtatcataccccagtttgaaggccagtccaccagcagtgcgaacatgcggcaacttcgcgaaaaatagaagagggatgcccagtggacatccctctgctcctgctatctgatgtggctagtggcccatgttcatgttcttgcggtacctcgtgtagctctcggcgcgggctgccgtctcgtcgagcgccgcgatgcgctccgagcggctcttgccgttctgctctttgccgacctcgtcgtagcgcgcatcgaagcggcgcttgccggcgatgatgacgcggcgcagctccggctcttcgccgtctttggggttggtgaagtagatctcgacgggaagcctgatcgtgcccttcgcgatcttgtggaactcggtctcttcgacatcccacttgacgcgctgcgcgccctcgagtgtgagcgggttttcggtaaggtgcttctcgagctgcagattagcgagcgcgataatctgatagtcttcgttagccatggccatcccacctttgttatcgaacacagggttatttcgtaaacagcacgtgaattatagcgtatcggacaacgggcgattgcctctttatgctgtggtaggggtgcaggggctcgaaccctgacgccttgcggcggcggattttaagtccgctgcgtctgccaattccgccacacccccgcttgcgtgcgtgcgcatgcctattctgacacgaaaaacaccgcatcgagcaaggaatagtaccaggtttgcggcgccttgatgctctccagatccggctgcgcgggcagctttgagcccgagccgttgtctcctgcgttcgtcacgagcgcggactggtcgcctttctcgacccagccgtactcggcgcgcgcctcggcctcgacgccctcgtcggtgttgagcgagtcgttttcggccgagatggcgtcgttatacgcctgcacggcgtcgacctgcgcctgcgtgcgctgctcgtcgcggatcgtctggtagtaggtccgcccgacggggtacaggatgacgatggcgagcaagacgacgatggccacgatggcgacaacgcgcttggcgcccgtgagcatgaagcgcccggcaagctcgcttgcgcccgacgcgacgtttgaggccgcattcgagacggccgacgcgacggcgcccgccgcctgctgggatgcctgcctcgcgcgcccctgctcctgctgcccgcgcgggcgggaagagttcgaggaacgtgtgcgggaggtgccatccggacgcgtgcgccctgccgagcgctcgctcctgtccgcgtgctgcctgctgtccgcgcgagatgcccccgaaatgcgcgtggcgtcgtcgccgcgtctggtgtgcgagccgctcgaagaccgggtgcgcgaagaagaggtcgtgggagcagcctggtgggtgcgccgtcctgcgcttgcgtcgcggcgcgcgtgttggctctggacacgctcgcggcgctggctggcagtcgccttcgcagcgcggtcgacccgtcgcctgagggatccacttgagtttggttttgcggtattcggcatcccggttatcgtcctggtacatacaaagctgcgcgggaggacgcacgacggcaccctcccgcgcagctagaggtcattatttgctgatgctgtagaacgcgtcgttgcccgcgtagtcggcggaagcgccgagctcttcctcgatgcggatgagctggttgtacttcgcgatgcggtcggtgcggcacggggcgcccgtcttgatctggccggagttgacggccacggacaggtcggcgatggtcgtgtcttccgactcgccggaacggtggctgactatgcaggtgtagttgttcttcttggcgagctcgatggtgtcgagcgtctcggtcaggctgccgatctggttgagcttgatgaggatagcgttggcgacgccgaggtcgatgcccttctgcaggcgctcggcgttggtgacgaacaggtcgtcccccacgagctggacgcggtcgccgatgcgctcggtgagcatcttccagccgtcccagtcctcttctgccatgccgtcttcgatcgagacgatcgggtacttggcgacgagcgcctcccagtagtcgaccatctgctcgctcgtgaacgacttgccctcgcccttgagctcatacatgccggtctcgggattgtagaactcggtcgaggccgggtccatggcgaagcggatctgctcgccgggggtgtagccggccttgaggcaggcctcggtgatcaactcgaagggctcggcgttggtcttgaggtcgggggcaaagccaccctcgtcgccgacacccgtggaaaggcccttctccttgaggacgttcttgagcgtgtggtagatctcggcgcaccagcgcaggccttccgcaaacgtggacgccccgacgggcatgatcatgaactcctggaagtcaacgctgttgtcggcgtgcacgccgccgttgaggatgttcatcatgggggtgggaagcagatgcgcgttggcaccgccgatgtagctgtagagcgtgagctcggtagactccgctgccgccttggcaacggccagagaagcaccgaggatggcgttggcgccgagcttgcccttgttgggcgtgccgtcgagctcgatgagcgtctggtcgatggcgcgttggtcggtggcctccatgccgatgagcgcatcggcaatctcttcgtttacgtggtcgacagcggtgagcacgcctttgccaaggtagcgagccgactcgggatccctcaactcgacggcctcgaactgtccggtcgaggcgccagaaggaaccgttgcgcggccgaaggagccatcgtccagcgcgacctcgacctcgaccgtgggattaccgcgagaatcgagaacttcgcgaccgtacacatcgatgatgacgctcattgttgatcctttctcagctcttctttagcttggtcccacagactttcgagtcgagtgcgcgggagcgtgtcaatccgctgcttatcgtcttcgtaagcatgctgctccataatagcccagcgcctgcggaattttgtgcagaccgtgcgaagagccgcctcggcgtcgatgtgctccttgcgcgccacattgacgagcgtgaacagcacgtcgccgaactcctcggccgcgtgcgcgctgccgggctcggcctcgagaaactcgccgacctcctcgtcgacctttgcccagacgtcctcgacgctgtcccactcgaaccccgcgttcaccgccttcttggagatcttctgcgcctgctgcaaagcgggcaggctgcggggcacatcgtcgagcagcgggcgcggcgcatcggggtcgagcccctgggcgagcgcctccttgcgcgcggcgccctgctcgagcttgcgctcgtgcgccttgatgtgctcccacatgtcgagcacgcgcccgggggtcgttgcctcctcgacctcgcgcggcgagaagcccgctgccgcaagcgaggtctccacgccaaagacgtgcgggtggcggcggaccatcttggactggatgtcggcgatgacgtcgtcgatggtgaactcgccgttgtcggcggctatctgcgcctggaggaccacctgcagcagcacgtcgccgagctcttcgcgcatatggcgcatatcgtcacgctcgatggcatcgaccgcctctgccgcctcctcgatcatgttgctcgcgatgctcgtatgcgtctgctccctgtcccacgggcagccgtcgggagcgcgcagcgcggcgatggtctcgcagaaatccacgaaggcctcccctgtagcagagaaggccccgtgtgcgttgttggtgtctggctgcatcgatcagactttgaggtagcggcgcatggcgatggcggagccgagcatgccgatggcgatgccggcgacgaccagcaccacgtagatgagcccgtaggtgctcgggtcgaccgagagcggcaggaagctcaccgcgtgctcgagcgagggcatgagcgtcgcgcgcatgatcgagatcacgatgatggcgagtatcgcgcccacgagcgcctgcagcgcgccctccatgaggaacggccctcggataaagccgttggtggcgccgacgagtcgcatgatcgaaatctccctgcgacgcgccagaatggccaggcggatcgtgttgttcaggaacacgagcgagatgaacacgagcagaacgaccgctacgacgcaggcgtacctgatcaggttcgtgacggcgaacaggcgctcgaccgtgccctgcccgtacttgacggaatcggacggatcctcggagttgtcggcgatcgacgtgaacgtgtcgctcgacaaaatcttgtcgacggtctcgtggaccttcttcgtgtcgacgagcgtgatgacgtaggtgcgcggcagcgggttgccgtcgagctggttgacgatatcggggttgttggtcgtctgattggtgaagtcctgcaggacctggtctttgttcctgaaatcgaccgacgcgatgttgccctcggtgttggtgagggtgcccaggtagtcgtcgagtgcctggatctgctcgtcggtcgcgttgtccgagatgtataggcgcacgttgacctcgtcttcgaaggactgggccaggttgccgatcatgaccgagaacacgatcgtgacgccgatcatgagcagggacaggaaaatcgtgatgatgccgccgatggtggttccgaggttacggcgagagctgatcagcgactctttgaagaagtagagaatcttagacatcgtaaccgtagactcccttcttctggtcgcggacgagcacgccgttttccaaggcgaggacgcgtcgacgcatctggtcgaccatctcgcggtcgtgcgtggctacgaggatcgtggtgcccgtgcggttgatgcgctcgagcaggcgcatgatgccgagcgaggtctgcgggtcgaggttgcccgtgggctcgtcgcagatgagcagcggcgggcggttgacgatggagcgcgcgatggagacgcgctgctgctcgccgccggagagctgatcgggcagctggtccatcttctcctcgaggccgacgaggcgcagaacctcggggacctgggtgttgatgacatgacgcgacttgccgatgacctcgagcgcgaacgcgacgttctcgaacgcggtcttgccagggagcagcttgaagtcctggaagacgcagccgacgttgcggcgcaggtacgggatgcgccagttcttgatggtgcggaggttctcgcccgcgacgatgagctcgccgctcgtgggaacgatttcgcggttgagcatacggatgaaggtcgactttccggagccggaatggccgaccaggaacaggaactcgcccgcacgcacgtcgagcgtgagtccgttgagggcaggacggtcgggttgcgtcgggtagaccttcgtgacgttgcgcagcgagatgaccaccgggccgagcttctgctgcacgccgtcttgctgggcaaggtcggcgtacgagccgacggcctcgtttgccggcgccatgtccgcgatgctcgggacggcctgcatgcgctgggacgcgccggggttgcccccacggcgctgctgctgttgctggacgggacgcatgcgctgggatgcacccggattgcccccacgggcatccacacggggcagccgcgcatccatctgctgcgggtttcgctggttggttctcgcgcgttgcgcaccttgctggggacggcgctggcctgctgcaggccgctgacctcctcgaggtgacgggccacccgaagaactgtgggtgccgcgcgacgatttgccgaattttggcacgttttactccgatcgtttattcgactgaatcgtacgacattctaacgaacatgctgttttagcccaagtttcgagccgaagcaacacaaagcgtccacgcgagacgacgcgccctgagatggggcacgccgtccttcgttttatttcctggcaaggaccgccttgaccttctcgacgatgcccgcggcatcgagcttgaactccgcgagcagctcgttggggtcgccgctcgtgccgaagctgtcgcgcacgccgacgcgctcgagcggcaccgggtagttctcgccgaggatatctgcgacggcagagccaaggccgcccaccgtcgaatgctcctcgcaggtgacgacgcagccggtcttcttcacgctggcgagcagcgtctccttgtcgaagggcttgatggagaacgcgtcgacgacctcggcgctgatgccctcggccgcaagaagctcctttgcctcgagcgcctgggccacctcgacgcccgccgcgatgacggtcacatcggtaccctcggacaatacgtaggacttgccgagctcgagcgtggtctgcgcgtcgtagacctcggggaccttggcccttcccaggcggacgtagaacgggccgggggttgccgcggcgatgcggatcgcctgctttgcggcccagtaatctgccgggacgagcacgttcatgcccggaagcccgcgcatgaggctgatgtcctcgagcatctggtggctgccgccatcgggcccgacggtgacgccggaatgggtcggcgcgaccttgacgtcgaggttcgcgtagcagacggtgttgcggatctggtcgtagcagcgccccgtgccgaatgcggcgaagctgccagtgaaggcgaccttgcccgcaagggagaggccggctgccacgtcgatcatgttctgctcggcgatgccgacgttcacgaggcgctcgggatacgcttcgccgagcttcttcgtcgtggtcgagccggagaggtctgcctcgacggccatgacgtccacgccctctgcggccagttcgacgagggtctcgccatagcccgcgcgcgttgcgatatcactcattgcctattcctctccttcgagctctgcgagtgcctgggcgacctgctcggcattgggtgccttgccatgccatccggcctggttttccatgaacgagacgcccttgcccttgaccgtgtgggcgacgatgcacaccgggacgtcttcgatgagcgtggctgccttgagcgcggtcagcacggcgtcgacgtcgttgccgtcgacttcgatggtctgccagccaaacgccttgaacttggcggcgatgtcctggagaccggcgaccgtcttgacgctgccgtcgatctgcagctcgttgttgtcgacgatggcgacgaggttgtcgagcttgtaatgggcggcaaacatcgcggcctcccacacctgcccctcttcgatctctccgtcgcccatgagcgtgaacaccttgtgcggctgggcatcaggcgccgcgttgagcttgagcccgagagcaaggccagcagagatggaaagcccctggcccagcgagcccgtggagacctcgacgccgggaaccttcttggaatcggggtgcccctgcaggcggctgtgcagcttgcgcagcgtgcccagctcttcttcggggatatagccgatttcggccagcgcggcgtacagcacgggcgcggcatgacccttcgacaggatgaagcggtcgcgctcggcgctttgcgggtcgtgctcgtcatagtccatgacgccgccgaagtagaggcaggcgacgatatcggccgcagagagcgaaccgccgggatggccgcttccggcctcgccgagcatcttgatgatgttggcgcgcatatgccgtgcggtttcttttatttccaaactgctctgggttatcacgcgggtacctttctcatgtcctcaccatggcaagcatggatacatcggggctagtgtaacgcctcgttaccttgcgagacgcgccaacggtgatatccgatgacaaattcgtcgatgtcgccgtcgagcacggcatcgacgttgctcgtctcgatgccgctgcgcaggtccttcaccatctggtacgggtacaagacgtagtttctgatctggttgccgaacgagatctcgtgcttggggccgcgcagctcgtcgagctcgtcttggcgcttctgcttctcgatctcgtagagcttcgagcgcaggatgcccatggccgttgcgcggttctggatctgggagcgctcgttttggcaggtgacgacgatgcccgtcggcaggtgcgtgatgcggactgcggaatcggtcgtgttgactccctggccgccgtggccggtcgagcggtagacgtcgacgcggaggtcgccctcgtcgatgtcgacctcgatgtcgtccgggatgacgggcagcacctccacgccggcaaacgtcgtctggcggcgcttcttctcgtcggtggggctgatcctgaccaggcggtgcacgccctgctcgctgcgcagcatgccgtaggcgttgtggccgctcaccgtgaagacggcgcggtcgatgccaatggcctcgcccggctgcaggtcgttgaccgtcaccttccagcccttgcgctcgcagtagcgtgtgtacatgcggaagagcatgtcggtccaatcctgcgcctcgaggcccccctggccggggttgatggagacgatcgcgtcgctcgagtcgagctcgtcgtcgaaccacgaggcgagctcgagggcgtccgcgcgcttgcccagcgcggcgatggcggaggcaacctcggcgtcgaggtcgtcgtcgtcttcctcgagcgcgagctcgtttgccacctcggcgtcttcgagggatgaaagcgccgcatcgtactcggctatctcgtcgcgcagcgccgatgccttgctcatggtcgcctgcgccttgtcctggtcgtcccagaagccgggcgccgcggacttcagctcgagatcggcaagctccggccgcttgcgctcgatgtgcaggtacgcgcccatcgtctcgatgcgctcgcgcagctttgccagctcctgctcgtgattaacagccatcactcaccctcggtatcgatcctgctcaaagggcaaccgactagcggttggcaccatggcacttcttgaacttcttgcccgagccgcaggggcacgggtcgttgcgcccgacgttggcgtagatgtcgtctttgtccttcaccacggtctgggtcttgccctgcgcgggagtgggcacctggccgacgctgttggcggcttggccggcgatgtcgcccgtcgcgaccgagcgcgtcgtgtcggggatgtcctcgtcgggggcggagtaggaaacgctgctcagggcgctttggtcttcggactcctcgggctcgtcgaccttgatgttgacctgcaggcgcaagatggtgcggatgaagtcctcgtagatgccggagaccagcacgccgaacgcgttgaacgcctcttccttgtactcgaccagcgggtcgcgctgaccgatggcgcgcaggccgatgccggcgcgcaggtagtccatctcggacaggtgcgccatccagcgcgtgtcgatgacgcgcagcatgacctggttctcgaccttcttgaagaggtcttcgggcacgagcgccttcttggcgtcgtacacaccctggaggtcttcgaccagtacctcggtcatgcgctgcgtctcctcctggtggtcaagcgtcgacaggtcgcgctcgacgcccgtcagctccttgtaccaggcgttgaggcccgccatgtcccactcgtcgtagacgacgcgggccgggcagaactcgttgacggcatcggagaccgtgtccgcgatgagctcgggcacccgctcgccgtagtccttgccatcgaggatgctgttgcgctccgcgtagatggtcttgcgctgctggtccatgacgtcgtcgtactcgaggacgtgcttacgggcgctgaaatgcatcgcctcgacctggcgttgcgcgctctcgatgcccttcgtgaccatcttggcctggatgggcatgtcgtcgtcgatggaggtgcgttgcatgagcgcgccgatcttgtccatgcggtcgccgccgaacaggcgcatgaggtcgtcttcgagcgacaggtagaactgggcagagcccgggtctccctgacggccggaacggccgcgcagctgggtgtcgataaggc

SEQ ID NO: 4354 - DNA, 32759 bp, Unknown
  16S sequences of unknown bacteria
gaagaccgacccgccgttaacaagctcgtccccgaaagcacggaagccgccgacaaagtttatctcctctctggcgtatctcgcgagatcagcgacgtgcgcgaagacctgtctgcctctcagagccagattccggcggcttatgtcaaggctcgacatcagaagatagctgcccgaggtcgtctgggtcaggttaatgatctgcctgacgtatcccggatccatgcccggtccgagcagaagcaggctcgactgtgtgagcgaaccgcccgacttgtgcatactgaccgccgccatatccgcgccagccgccatagccgataccggcatatcctcaccgaaatagaagtgcgtcccgtgcgcctcgtccgccagacagtacataccgtgcgagtgagccagagccacaatactcttaagatcgctgcaaatcccgtaatacgtcgggttgttgacgagaatcgccttcgctcccgggtgctccttcacggcgcgctcaacgtcagacagacgcattccgagagagatcccgaggtcaggctcgacgtccgggtttacgtagaccgggacggctccgttcaggacgagggcgtttatgacgctcctgtgcacgtttctcgggaggattatctcatccccgcgctttgtcaccgacagtaccatcgactgtacggcgctcgtcgttccgccgaccatgaagaaagcgctcgcggctccgaaagccgacgcggcgagctcctccgcctcctttatgacagatatcgggtggcacagattgtcgagcggcttcatgctgttcacgtctatctcgacgcatctctttccgaggaagtcgcagagctccgggtttcccttcccgtgcttgtgtccggggacatcgaagggtactacgcgggcgttcctgaactcctcgagcgcctcatataccggggcgcggttctggtcaggctgttcgtgtttcaatattccgtttcctttctttgatgagaataagaaaagctccgtgtcaggtgacacagagcctgtgaaaacatataattcttccgccgggaaaagtccacgaaagcacgcgggcaaacgttcacaccgggatacagacagaacatccgggcatccgcgctccggaataaaaatatgggcttattagagtctatacagcaatactacttttactacttttactactcttattgaccgtttcacaagttttgcgccgcatggcaccggttataaagtaaccaactcataaaattcgggcttctaacccgatcaataattgacgaatactcgtcatgacggttttaccgtccggcagtgaacccggctgtccgtatggcctcgacccgcggcttcaaagagataagcttaaagctgtgaactgaaagttctgcgccgccggtggttcaaaagtatggtagctatgataaactcatattttcccatcgcatatcctattttatcatatccggagcgttttgtcaatatccgattcacattgggcgcgaaaattatcagaccggaacgcgggaatttttgtgagattatacaagcgcagtcgaaatactatactttttgtcagaaatataacaatcattgatttatttcccgctttatgttatacttgaaatgaaccggaacgacattcccgccacttaatatatgcaggggaaagcaggaggtgcgatatgctgaccgaaatctatgtaaaggactggctcgcgaaggtattctatttcagcctgaaaaagaccgggaaccgggaggacgcggaagaactcgccgcggacatctctctcacggttctcgagtctctctcgggaaacccgccgcccgaacacttctcgtcatggctctggacaatcgcgtcgagaagattcgccagatggtgcgcaaaaaggcacaccgagcgcgagaacactatataccgttacgacatgaacgagcccgcggacgattcagggatagacgacaggctcctcgaaagcgagctttactcgtcactcaggcgtgagctggcattcatagcgcgggagcaccgggaactcatcgtcgcgcactacattaacagcgtcggcatatccgagctgtcagagcgtctgaacatcccctgcggcactgtcaagacccgcctcatgcgggcaagaaaaattctgaaagaaggaatggatatggcaagagaattcggcagacggagctacaatcctgaaaacatctcattcgtttcaagcggtagtcagccagacggtctcccgtggaaggcggtcggccggctaatcccgaaaaacattctgcttgaggcgggcgggaacccgtcgacaccggaagagctcgcgatggagctcggaatcgcgcttccgtacatggaggaagaaataaagctcctcaccgacgcgaccctgcttaaaaaggtcggaaacaagtacgtgacgaacttctggatcgccgggaaagaaactcaggtgaagatctggaagacagaacgctcaggctcaaaggaacgcgcggcactcatggcaaaggcgatagaggacaactatcccgagctgacagaacttctcgctcagacctgcgccgcggacgacctcaggtggtatctgtacatcatggcgatcaagagaatgacagacgacgtctgccgcgacggcttcggatataagttcacccgcccgaacggcgggacatggggcttcaccggcttcgagctgaacgacctgataccggaggacaattttatgaacgacgcgtcatggtatggcgacgggataaaatacgggcgatacgccgtccaccgcttcgggttcaccgacaacggatccttcatgtcttccgaggcgacgcttctcgcggacatacttataaacggacgcacgaccgattcactcagtgacgccgagaaacctgtatttgagactctgacagaaaagcgcttcattcacaccgacgggggcaggataatcttcgatatcgttgccctgaagcccggtattcccgacagcgcgtattcactcatcgcgtccaacccggcggcaaaggagctccggacaatgatacagacgctgtatgacgatatccgtgagattctgcgggacgacatggacaaagccctgcacgatatgctcgactactacgcggcgatgttcatgtgcgatatccgggcgatgctcatttccgacgaggcagaagccggcgtgctgagggttccggagaacagaacagcgggcacttatctcgtcatcgaaaaaccgtgaaaaagtagcgattttcaactaattccgccctttccgtccgataaagaaccaaacttccgccccggcgttgacaaagctccggggtttgctttataattatgtcagttaaaaccagaaaggatatcagcatgaaaccagtaaaagttatgctcgccggaatcggcgggtacggggacgggtatctgtgccgtctcttcggactctcggacaaaggcatggcggaggtcgcgggacttatcgagccgttccccgcctgctgtcagcggatggatgaagtcacacgccgcgggtggaagatcttcccatcgcttgatgaattctacaagaataacgattgcgagctcgccgtcatctcgacgcctatacagttccacacgcggatgataaagaaagcgctctccgaagggagcagcgttctctgcgaaaagcccctcaccggcgacgcgcgggacatcgacacgcttataaatgcccgcgacagagcgggtaagttcgtcatgatcggctaccagtggtcgcacagcgacgcgatactttcgatgaagcgcgacgttctctccggcgtctacgggaagcctgagttcctcaaaaccatcgttctctggcccagaaacaaaacctacttcaaacgcggaagcggctgggcgggaaagatatccgacgccgacggcacactgataaacgacagcgtggcaaataacgcgaccgcgcactacctgcacaacatcttcttcaccctcggaaaaaccctcgacacaagcctgactccggacaccgtaaaggctgagctccggcgcgcgaacccgattgaaaacttcgacacggcaatcattgagtgcggttttacaaacggcgcaaaatcactcttcatagcctcgcactcgaccgaaaagaacctcgagccatccttcgaataccgcttcacgaacggaacgatagagttcgacgaggcgagcggcggacacatcatcggcaagctgaacgacggcacatcgcgcgactacggaaaccccttcgctgaccagctgaacaagctcgacattgcgttcaacaacgtcatgaaagcccggaacggcgagaaagccttcgtcccctgcggaatagaaacggcctcagcacaaaccctctgcatcgccgagtgccagaaacaggaaataaagaacttcccggaagagagaaaacgcctcgcggaaggagaactcacatatatcgacggtctttacgacgagctgatatcacgatacaaaaaagcgtaaaaaagagcaggagctgcgataaagcggctcctgttttcttattgtcagtggtcgagcgaaagtatcttatccgcgttcttgtctatgatcttctcgcacgcggacttctttttctcaatcatcgaggcgaggtcggtcacgttctttatggcggcgctccgcatcgtgtcgtctatcggaagcccggagaacaccatcgcgaaggtcagatcgagacggatatccgagtagattatgtcgagcatcccgccggactcctcgtcgcgggacgccttgcccttgagcgttttctcgtagtatgccgggcgtatcgtcttatacgacatatatgccatgtccgtgagtatccttcccgcgaggtctgtgtcgccgcttgtcaccgggacgcagcaggtcgacgcgttgctcgtgtgcatatacgacgtgtaatttgcctggctgtcgtcatacttcggcatcgggagcagtccgaagtccgtgttcatgtcccggagctgcaagacgccgtagattatctctatccagaaaagcgccctgtcctcggtgaacatctttatcgacgcgttgccccatccgcccgcgtcctcgagctccggaaactgattgacgagtatggtcgaagagcggtcgttcagaagaccgattatctttcccatgacagccatattccgctcgcttccccacgcgaggtacggcttgtcgtccttgtccttctctataatcagcgaatccgtcccggcgaaaagcggctgccagcagaaggcgttacaggtcagaccgaacatatcgtccccgttcagcacagtgtcgccgtttacgtcgctcgtgacgcccttgcagtattccgagaacctgtctattgtccacttcccggcgcgtaccgtgtcgtagatatccgtgatgttcctctgcgccgcgaggtccttgttgaaatacacgacgccgacgtcgttcagggacgagagattcagatcgccgattatgaagtagttcctcccgcctatcgacacgtcctcgagtatcgactttctccaccacggcatctcagcgtcaatgtgaggtatgtcgttcacgttcaggaacagcccgtcaaggctcattgaaaaggcgtccgccaccatcgggaagacgaggtcatagtcgctgtccccggctgagatcgagcgtttcgcgcccgaggcgagctccgtgcgcttcagttccgtcacgttcagcctgagattgtacttatcctctatgtagcggttgcgctcgtacacggcgtcgtttatgatgtcgccgttctgctcctccgagtaaaactcgctgtacgggaaggtataaccgtcgatttcacggctcaggatgttgtactcttttcccccacaatccacaggctcgagcttcgggtcgggggatgtgtcggctgtcgtggtttcctcggcgatcgtttccgtgtccgtgttttcggttgtggtgtcaggattgtctgacgatccggcactcccgcaggatgtgagaagtatcgagagaagcaggatcacagatataatcgttctttgtctttgcatggcaagattcctccgtcaaatattgtatgacaatcgcgtgtacttattatagcacacaagcgggaatttgtcaatagtccagagaaaatttgtatgacgatttttaagttttgcgctgtatacggtatatatgcaggcaatattgtatgacaatcccgcttgttgtgttctcctgcaacttctgtcataatcccgttcatttattacaggtacgtgaacatccacagttttatccacattttccacaggcaagattgttgaaaaccccgacactttctgacactggttgacaagcggtgtcatgttctgccgcgctatataaggaaacactgatttatggttgctttcgctgaaacagcccataaatccaagacttttttctgcgaaaacccgatttattcagtgcatcataagaatatcctctcaaaaagcagctcacagtgagttaaaatattgtgtcagttacgatggttatgacggtataaacgccgcccccaccgcgatcaccagtcccggaagcagattcgctactcttattctcttgccgaaaaccagattcacgccgacgcagaatatcagtatcgagccgataagcgacaggttcgcgagtgccgcctcagtcatcagaggtttcagcagtctcgcggcaaacgtcatcagaccctccagcatcgccaccggaaccgctgagaacgcgcagcctattcccatcgagcaagtcatcgtcagcacgattatcaggtcgagcaccgacttcgttatcaacaccgacgggtcgccgtatatcccgtcctcaatcgaaccgacaaccgccatcgcgcctatgcacacggtcagcgacgccgtcacgaagccctcggtgaaccgattgtccccgccgttcccggtcctcaccttcagccactcgccgaatctctcgaagaagccctcgatattgatgatctccccgacaagcccgccgagcaccagacaaagcgtcacaaacatcgatcttcccgacccgatcgagcctccggcgatactcagcatcccttccattgtcccggcgacgccgatgcacagcacgctcaccccgcacgccatattcagcgtctctctgagcctttccttgaaaaaccgaccgaaaaagaaccccacagcgccgccgagagctatcccggcggtgtttactattgtcccgagaccgatcacgcttccaccccgagaatatttaagaacgccccagcggcatacggcatcaggtcgtccggatactcataccccgacgtgtgcagaggcggacagtcaacgcccgcgccgataccgaagaacgccccgcggcactttctgaggtaccacccgaagtcctcgctccagcgcataggctcgtcaaggagcgcgccgttacagcgctcaagcaccttttccgcgcatccgggttcattctcagtcgcgggaaatacgtcgcagaaatcacgttcaaagccgagatgatactcccccgcaagtcccgtagccatcgacacgatctcgtcgcggagcctgtcgagctcatcaccgtgctctcccctgagcgtcagcctcaccgtcgcgtcgccgcacatctcgccgaaagatgttccgcccatctgaacgcctatcaccgtgcagagtaccatgcccgaaaagttccccggagccgaaatctcaggcagagccgcgagcagtctcccgaccgcgtacgccggacagataccatccttcggataagccgcgtgcgaagtcttcccgttgaacctcatcgtcatcccgaacgacgccggagcgaagctcccgagcgtggtgtacacctgtccgaacctgaaccccggaagattgtgcagaccgtaaatctcgtctatatgctcgaggcggaagagctcacagcacccctcagcgccctctccagtctcctcggcgggctggaacaggaagaacacattcttgcctatcgtcttcccctcaagctccagagcagcgagacagagtcccgcagtgtgcccgtcatgcccgcagagatgcgcgcagaccggcttgtcgttctcactcttcgccgcctcaatcacgagagcgtcatagtcagccctgagagcgatcgattccttcgcgtccttctcgcggtgagcggcgtagaagcccttcccgcagtcgtgtatctcgagcgtcgtgtactcggcgaggaacgcctttatgagctgcgccgtctttatttctttcccggacggctcgggtatattgtgaagctcatgacgaagtatccgcgccagagcgatattttcgttgttcatttctctctcttttccaaaataagcgcggcggcatctatgtcagaaaaccgccgctgtgatcagtatcttgtctttgtcacgataacttccggattatagtaccggataaccctgagcgtcttttccgccgcctcgaagaacagaaccgtgtccccgcagaccgcgaagtaaacgtccggactgctcatcgacgagacgccgtaaacacgcttcccatcgatcctgtcggcttccttcctgtagtcccccgtgtaaggggcaatgcgcggcatggagcttatccgttccctcgcgagagtccggcagtaccggttcccgaagacctcgcgcatggtcatgaccccgccctctatcgtgtactcatactcgacgctcacaaagcaccacgtgaagtaaacgagcacccaggtcagaagcggcacgaaagcccccagcatcggaatcttcgtcagaacgagaatcaggaacagatagacgatatcgacgagtatgtagcccgcgaccatcagaatccgcgcgagcttatactttccttcgcgcttttttgtcacggcgtagctgacggacgtgtttctcgactcgtcgccggactccgcggctttacggtacttttcgagctttgccatcagagcctgacgattgtgtcggtgtggtcggccttgtaagcgttctcgaggagtcttgtcaggtcgatagcgtcgtcaatcgtgcagagcgccggagaagcggtcttgtttatgcaggcgtcgacaaactgcattatcggagccgggtcgcccgcgggcattgtcggtcttatccagtcgttcgtgaacggagcgagctttttcgacttgaccctgacgtcgtcgccgtgacggatgagcgttccctcggtgccgtaaatctcgaaaatctcgggcgagtcagaggacatgaagccggtctcggagatgccgatgatgccgttctcaaactccatgatggacacggcgttctcgtcaaccttactgccgagaggagagttgaacagagccgtgatgcgcttcaccttcccgccgaaataagcgagatcgtacataggatggcagccgagatccatcatagctccgcccgcggcgtctttttcctcgaaccagtactcggggagccagtgcccggagacaccggagtgagccttgcggcggcggatagtcgaaatctgaccgaaagcgccgatgtcaacgaggctcttcgcgagcttgaaaatcgggatgaatctctcggggaaggagatagtgaagatgaccccggcgtcctcgacggccttcttgacctcgaggcagtccgcgacggtcgggcagagcgccttctcggtgaagatgtgctttccggccttagcggcggcgatgattatgtccttgtgagcggtggtgggagcgtcacagaaaacagcctcgatatcgtctctcgcgaggagcttcgcgaggtccggctcaaactcagcgccgagttcctttgcccaggcggagccgcgcgcggtgtcgtcgtcccagacggcctttatatcgacctttccggagcttttcagcatattcgcgtaaccgggcgcgtgtacgtgccatttcgagagcattgctgcgtttaacatgatttttgtgtcctttcttgtgtccgcctctggcggtaaatttgactcaggtgtattatatcacgttccgggggaaaatgcaagagtttttttgcgaattaataatataacgttgaaaccgtcaccctggtgtggtataatggagaaaaaaagagcacgccccacaaaaaggcatgccgaatggagatacaatcatgaaataccaactagcgatattcgaccttgacggaaccctgctgaacacactcgacgaccttgcagacgccgcgaaccatgtccttgccgacgcgggtttcccggtcagaaccaccgacgaagtgcgccgctttgtgggcaacggataccgcaaactgatagagcgcgccgtacccgccggaacgggcgaagagaagataaacgaggtcctctccgccttccagtcgtactatgtgaatcactgcgccgtcagaaccgcgccgtaccccggcgtgcgcgaaatgcttgaaacgctgacgagaaacggcataaaggtcgcgatagtctcgaacaagggcgacgccgcggtcaaggaactgaatgagctctatttcggaggtcttgtcccgttcgctcagggagaatgtgagggagtccgccgcaagcccgcgcccgacaccgtgaaccgcgtactcgaaaaatacgccacggaccggaaagacgccgtatatgtaggagactcagacgtcgacgtcgagaccggaaagaatgccggtatggactgcatcagcgtcctctggggcttccgcgacgaagagtttctgaaagcccacggcgcgacgatcttcgcgagggacacggacgagctgacaaaacttattctcggttgatctcggcgacgaatgacgcctcaccgacgtggcggataaccttcttatatatccggtggaagaagaacaacgtcagcccgacgctcgcgatctccgctatcgggaaggacagccacacaaggtcaagattccccgtgagagacatcagatacgcgaccggtagaagcacgcacagctgacgcgtcgccgacacaaccatactgtaaaccccgtttccgagcgcctgaaacaccgaaccgacagtgatgcagaaccccgcgaaaatgaagctgatacagattatccgcagcgccggcacgccgatctccaccatatgctccgacgcctcgaagaaaccgagcagcacctccgggaataactccatcaccgccataccgacaagcattatagagaccgcccatatgcacccgacctttatggtccgcatcatgcggtcttttttctgcgccccgtagttatacgcgataatcggcacaagaccgttgttgagcccgaacaccggcatgaagatgatactctggagcttgaagtacaccccgaacaccgcctgcgccgtcgacgaaaacgtataaagtatcttattcatcccgaccgtcatgaccgaaccgatcgactgcatgatgatagacgggacgccgatagcgtaaatatgcccgatagttctgaggtcaggacgatacttcaccgggttgacgctgatctccttattgaacacctgattcaggataacgccgagcacagccgcgacaatctgtccgataattgtagcgtaagccgcccccgcgataccgagcgccggacacccgagcagaccgaaaatcatcaccgggtcgagaacaatattgatgagcgcgccgataccctgagttatcatagcgataacagtacgcccggtagactgcacaagccgctccatgataatctgagcgcaaagcccgaacgaaccgcacatcactatccggagatacgtaatacccccgtcaacaatcgtctgagtgtcgttctgaagcctgaaaaacggctccgccacaaacaaaccggcaagcagaaacaacacataactgaacgccgccagatacacgccgttattcgcgaccctgttcgccccgtcgctgtccttcatgccgagccttttcgagagcaaagcgttcacgccgacccccgtaccggtacacacagcaatcatgaaattctgcataggaaacgccagagacaccgccgtcaacgcgtcctcgcctatcttcgccacaaacacactgtcgacaacattatacagcgcctgcactatcatcgatatcatcataggtaaactcatactgaacacaagcttacctatgcccatcgtgcccatcttattctcttccatctttacctcgtataatcgtttacttgcagggggagaaagacccctttgaaaaggggtctccctccccctgcacccccttccttccggaaacttcatacacacaaacgcacaaccgagggggatcggctgtgcgttcatattcagactataaatcagacagtgtgaatcttattcgccgcgtcggagtgctcagcgtcgatgccgtactgctggttctttctccactcgaagaacttcgtcgccacctgctcgaacagcgcgtaggacagaacatcctcatcctggacagcccacggcttaaccttctcgcggagctcgtcaagctccggcttcagatcgtccgccggacggtaagtgatcggcttcacatcgccgagaatctgcttctggaactccggctttataggcataggagtcttgccgtactcaccgcggacaagtcccttgaactccttggtcacgttcttatagcgctcgcccatgatgacattgaacacagcctgagtaccgacaatctggctggacggcgtgacaagcggcggataacccgcgtcagcgcggacgcgcggaacctcagcgagaacctcgtcaagcttatccgacttgcccgcctgcttcagctgggaaacaaggttcgacagcattccgcccggaacctgatacagcagagcgttgacgtcaaccttaagcaccttcgggtcaagcagaccggacgctatatacttctctctcagaggagtaaaatacttagcgatcttatcgagctgcttcagatcaagtccggtatcgtactcagtgcccgcgagggaagccacaagcggctctgtaggcggctgggaagtacccatagccatcggagaaatagcggtatcgacaatgtccacgccagcctcgatagccttgatgcaggtcatggaagccacgccggcagtgtagtgagtgtgaagctgaatcggtatcttcacggtctccttgagcgccttgatgagatcgtacgcgtcgtacggcttcaggagtcccgccatatccttcaggcagatggaatcagcgcccatctcctcgagctgctttgcgtagttggtgaaatactcggtcgtgtaaaccggaccggtggtgtagctgatcgccgcctgaacatgaccgccttcctttttggtcgcgtttatagcggtcttaaggtttctcgggtcgttgagagcgtcgaaaattctcaggatatcgatgccgttcgcgatcgacttctggacgaagtactcaaccacgtcgtcagcgtagtgacggtagccgaggatattctgcccacggaagagcatctggagcttcgtgttcttgaccttagcgcggatctttctgagtctctcccacggatcctcgttaaggaatctcatgcaggcgtcgaaagtagcgccgccccaagcctcgagcgaatgatagccgaccttatcgagctcatcgaggataggcagcatctcgtcggtcgtcatacgcgtcgcgatcaaagactgatgcgagtcacgcaggacggtctcggtaattttaacctttgccatttatttatgataacctccgtaatttgttgaacgaacgcgggggcgggaaaagccgcgccctcacgcaaacgatttatcagcccttgaacattgacaggaacacgcccgccgcgacagccgaaccgatgactccggcgacgttcggacccatggcgtgcatgagaaggaagttcgcggggttggccttcgtgccctcgatctgggcaacgcgcgccgccataggaacggcggagacgcccgcggaaccgataagcggattgatcttgcccttggtcacgatgcacatgatcttcgcggtgatgagtccgccgcaggtggagatcgagaaagcgacaagtccgaggatgatgatcttgatggtgtcagccttcaggaagttctcagcgctcgcggtagctccgacagagacgccgaggaagatagtgacgatattcataagctcgttctgagcggtcttcgaaagtctctcggtgacgccgcagacattgagcagatttccgaacataaggaagccgataagcggagccgcgtccggaaggattatcgaaacgacgattgtgacgagaaccgggaacacgagcttctcggtctgggaaaccggtctcagcgcggtcattgttatctcgcgctccttcttggaggtgagcatacgcatgaacggaggctggattatcggtatcagcgccatgtacgagtaagccgcgatagcgatagcgccgaggagcgccggagcgagagttttcgtgacaaggatagccgtaggaccgtccgcgccgccgatgataccgatggacgccgcctcgttcgggctgaacccgagcagaagcgctccgaagaacgcaacgaaaacgccgagctgcgcgcccgcgcccataagaaggctcttcgggttggagatgagcgcagtgaagtcggtcattgctccgacacccatgaatatgagcgacggatagatgccgagcttgactcccatgtagaggaagtcgataagaccgccgttattgaggatatctccccactcgatgtgcttctcgaggaaccagtcaaggtgcatgaggttagcgcccggaaggttagcgagcagcattccgaaagcaatcggaagcaggagcagcggctcaaatttcttcttgatcgcgagatagagcagcacgacgacgatgacgtacatgatgatcgtcttgacgagcatcaccggatcgttcacgagcttcgagactccggtcgaatcaaggaagttcagaaatgtctttaacatcttgtacctctttcttttcgaggtctatcagttaagagtgacaagaacgtcgccggaattgacggtagcgcccttctggacattgaccgacgcgacagtgccgtcctgcgggcaggggatgtcgttctccatcttcattgcctcgagtatgcagagcacgtcgcccttcgagaccttctgaccgacctcgacgttgaccttgaggatattgccgggcataggagccgtgaccttcacagcgcccgccttgcctgcgggagcagccgccttgggagctgccttaggtgctgccggagcagccttgggagccgccggagcgaccggtgcggccgcggcaacaggagcggaggcgcctgcctcgacttcctcgatttcgacttcatatgcgtttccgtttacggttacgttgaactttctcattttatatatctcctgttctcaaattatttcgatgccgtgcgtctgaacgacacgactctgaaggaagtctgcggcttgtcgagcatgagagccaccgccgcggttatagcggcgacgacctccgcctcgtcggcttccggctcttcaatggtttccggtaccggttcgggttcgggagcggcttccttgacgggagctgtctcgacgggctttgccggcgccttcttcttgttcgggatgtcgtagaagatcacccggaacagcacgaggattccccagatgagtatcagcaccgagaaaacgaccgccataccgaagagaagcacctgaagacccattgttacgcgctcgcccatagtcagcgcctgatcagcggcggcggcgagcatcattcctgttaactgcatatttttgtccctcccggcgattacagaggaaggttgtcgtgacgcttgatgagatctatcgaattctttgcgccgagcatctcgaaagcggcggaaacgcgctgacgaagctcatcggacgagattatgtcgtcgatctcccctgccttagccgcggcgaccggagacgccatgacggaatcccactcagcctcgaccgcgcctctcttggcgttgtcggtgaccttgtcgttccaagcgaaagcgaccgcgcttgcggtgggcatagcgctgatcttcgcgctgtcgagagcgagagaaatatccgcgccgatcgacttcgagcccatgatggtgtaagccgcgccgtaagcctttccgagcacgacagtaaccttcgcgttctcgcttgcggcataagcgctcgcgagcttcgcgagagccgcgccgtagtttgccttctcagcctcggcggaaacctcgtagccctcggtgtcgacgagagtcagcaccggaatatcgaagcagtcgcagaaagaaacgaaacgagccgccttcttcgccgcgtcagcggtgatctttccaccgtcgacagcgggctggttcgcgacaacgccggcgaccatgccgttgagagtgacgaacccggtgagcatcgacttcgcaaactcagcgccgagctcaaggaacttagcgtcgtccgaaatcgcgccgatgacgtcagccatcgagtacttgtccgcggagattatcgagtcaacgtcgacgaggcggttgatctcatcgttcgaggaagagtaagccgtgccgtccgcgctgttctgcgggatataggagaggagagtgcgcacgaaagcgagcgccgaagtatcgtcctcagagacgacctgtaccgcgccctcctttgcggcggtgctgatctttccgagttcagcgcccttttcgaggttattcgtgatgaacggcggattgacatataagctaccggtcttctcggcgccgatgactatatcaaacatagaagcgatggtagccgccgcgccgccgcagacaccggcgataaccgcgatctgcgggataacgccggacgcctcggagaccttcttcatgatctttccgtacccggcgagagcctcgactccttccatgacaaaagctcccgcgctgtcgaacacaccgataaccggcgcgccgtttctgatcgcgagatcatagagttcacagatcttcttagcgtgaacggcgccaagagcgcccttcattctcgacggatcctgaacgaaagcgaaaacgagtctgccgtcgaccgcgccgaagccggtgatgacaccctcaaactcacatccgtcgccgccaagctcggatgagatcctgtgtgcgaaggcgccggtctcagagaaggtgccctcgtcgaaaagcgcgcgtatgcgctcgcgcgcggcggacgcctcgtccgtcactgccatgcgcagttcggacgcgctcttcagcttcaccggagaaatcccggtttgcgttttcttgtccatgtattgacctccaaataatattgtaaacttttttggtataagcagtacgtaatctgcccggaaaacagacaaaataacataaacactattctaccccattataattatattataaaccatatcgccggattttgcaatatgcaatacgctttttattcgccctttttttgatttttttgtaggcattatgaccatacgcaaaatattcaccgcgctgtaatcgtccggaaacaagtaagtggtagaattataggtaaatctaaggaaaaaaaagaaggcatacacgaaaatgaaacacaaagtaagcatctcaatcggagaattacaggaacagcacggagaccgcgaggcgctgcgtctcgcgaaagaaatgggggccgacgcggtcgacttcaacacctgcggtcggaaatgggactaccgcaaccccgactcggtatactcgaagagcgacgacgaaatctgctcctactacgcggatctcagaaaatacgcggactcgataggacttgagataggtcagacgcacggacagataaagggtttcatagacaagaccgaggacgacgaggcgctcatcgcgaacggaagaatcgactgcatggcggcgtccgcactcggcgcgccttatgtcatcatgcacagcgtgacgacaatattcatgggtccggactgcccgccggaaaaaatgcgaaacctcaacgctgatatgttctgccgcctcatcccgttcgcgaagaagtatggggtgaagatcgcgagcgagaccttcggcgacgcgaccggactcggatgctgtgatttcttcggcaacataaacgagttcataaagtcgttcaaccgcgtccgcgccatcggggacaacgccgactggctcacgacatgcgtcgatacaggtcactcgaacaaggcgacaagatataacgtgaatccgtcccccgcggacgtaatccgccttctcggtccgaacgtcagcgcgctgcacctcaacgacaatgacactctgaccgaccagcacaagattccgatgaccggaacgatcgactggaacgatgtcttcgacgccctcgacgagataaattatcagggcacgtacaacatggagctcaacctttgccacttcggaaagaagttcgcggtcgagacggcggctttcgcggtgaaggtgatgcgtttcatgctcgatgagcgctacggaaagaactgaggaaacaatatggtcatagatttccacacccacgtgttcccggacgagctcgcgaaaaaggcgatcccgaagctcgccgcaaacggtaacatagcgaacgtcggcgacggcacggtaagatctctcctcgccgaaatgggcagaagtggcgtcgaccgcgccgtgatactcaacatagcgacaaacgcgaaacagcagacgaacgtcaacaacttcgcgatagcgacaaaaaacacatacccgcgcctctacactctcggctcgatacacccggacagcgagaacatcgagtcggaggcaaagcgcctgaaggacgccggaatacgcgggataaagatacacccggactacatctcaacattcatagacgaccctaagatggatcgcgtgtacgccgcctgtgtcgcgaatgatctttttgtcgcctcgcactccgggtgggactttgtctcgccggatgtcatacactgtacgccggagaggatagtgaacgtccttgacaggttcccgacactgcgcttcgtcgcggtgcatatgggcgcgaacacgctctgggacgacaccgagagactgcttatcgggcggaagaacttatggattgacacgtcgctcgcgtctcctttcaagctcgataagaagcaggcggagcggatgctgctcggtcacgacccggatcatatcctgttcggcagtgatttcccgtggttcagtgagaaagactcgctcgattaccttgattcgctgaatatcccggaatcgctgaaaaagaagatacgcggagaaaacgccctcgcattgatggattgatggaaggataagacgatgaagaagccgaacatactcgtgatagacggacagggcggaaagatcggctccgccatgctcgacgcgctgaaaacatcgctcgccgcgggaagcatcgacgcggagctgacggcggtcggcacaaactcgatcgctaccgcgaatatgctgaagagcagccccgacgccgccgcgacaggcgagaacccggtcgtcgtgaactgccggtacgctgactatataacaggtccggtcggaatagtgatagccgattccctgaatggcgaggtaacggcgaagatggcggcggcggtcggagagagcactgcaatgcgtgtcctcatcccggtgaacagatgccggagcatgatagcgggcgtcggaagccagactttagcggcgctgatacgcgacgccgtcggaatcataatttcggacttgacaaacaatacctgagtgtgatataataatatgtgacggcacaagctgtttccaccgacttttgtcaagcgaaagtcatacttacgttccgaaacggacgataaaacataaaacaaagaaataaaccaatgtcacgaagacgcaaggcggcgaccgaagtcaccgccctgtgtcttgttctcttttacaagaaaggaaacaccaatgaacaaaagtcagaaaaaactcataaggacgctcaccctcgcggcaatgtgtctcgctctcgcgattgtgcttccgtttctcacgatgcagattccgcagataggacaggccctgtcgcccatgcacattccggcgctgctctgcgggttcatctgcgggccgttctggggcgcggcggtcggatttgtcgctccgcttctcaggcatctcatgttcgggatgcctccgctcatgacggctatcgcgatggcgttcgagcttgcggcatatggttttttcgccgggctgttctacaaaatacttccgaagaagattccgtatatctatgtctcgctcgtcggcgcgatgatcgtcgggcgtatcgtctggggaatcgttaaattctttatctctatcgctcaggcaagcgagttcaccttcgcggcgttcatcgcgggggctgtcaccggtgctataccgggcatcatctgccacataatcctcgtaccgctcatagtcatcgcgcttaagaaggcgcgccttgtgccggaggacactctcgcgaccgcatgaacaacgatatgaaacaggcaatgaaggccattatagccgcagaagcggcaaagcgtcccttcgcggaaccgacggacatagtaaagctcatctaccagagcgtcttcggcaacgcgcacatgataaacgacgagaaagcggcgttcggcagactgaagaaagaggcggaaacgctcgccccgagagacgacatacgccgctgtgagagcctcggagcctccgtgaggataaacctgtccgccgacgggaaactcctgtctgatggctccctgcgtctcctcgcgcggctgttttgcctgtccgcgaagagattcccgtccggctatgagagcgccgacgaggataaacaacaggagtttcttgacgcacttgatatcgccgctggaatggcgtcggagggcacgcttccgttcagcgcgggcgaattctcggattatatctcaaaataccgtgagatgggtttcccggcggtcagccacagcgacagataccgtgaagcgtatcgcccggcgtaccgtgtcgtcgacgcaaggctcgcaaggatattcccgcttgtgtgtatggtcgacgagctcatgaagaacagcggcagaccattcgtcctcgcaatagacgggagagccgcgtccgggaagaccacagccgccgcggatatagccgaattcttcggcgacactgagatagttcacatggacgatttcttccttccgggagagctcaggacgaaggagcgcctgtccgaggcaggcgggaacctccaccgcgagcggttttcagatgaggtcgtgtcacacatccgaggcggcgggttcgactaccgggtgttcgactgcggaacgttcgactataagaaggagccaaggcatatcggcgagtgctcactgatcatctgtgagggcgcgtactcgctccacccggcgttcgggaaatactacgacctcgcggcattttcggacgtcgacccggaagaacagcgcgcgcggatactcaggcgcaacggaaaagaaatgcttgagcgctttgagtcaaggtggataccgatggaggagaaatacttcgataacttcggaacgcgcggcagctgcgacatcacgatatgaaaaaggacgccgaccggcgcccttttgttatgtatttattcagccgttcactctcagttcagacatatcgatgacgttgcggctcagcgcgtcgttcaggtactcgttgaagtagccagccttcgtcagatatacataaggattcacatagaatatcgcgagaagaccgaaggtcagaccgctcagcagataccagccgatgaagctgagatcgacgacgaagagatccatcttcctgccgttcatgatgcgcatcgagagcttcagagcctctttcgcgggaacgttcggatacttcgcgagtatgtagggggtcatggcgtaggaatacatcttgacaatgcctgggatgacgaagagcatactccagagccactcaaagagagccatccacagcataccgccgagcttcctgccgaagttctcctggaacgcgctcgagaacatgacgtcgatcgtcgacgcctcgcccctccagagattgatatagacaagcgtcataccgacgacaagcgggagcgtgatgataaatccgagaccgaacgtgacgcccgaggcgaccgccgcgatgagaagatataacagccccggaagtaacgcgccgctatagttgccgccgattatcgacttcgcctgagccttgatttcctgacgtgttttcatggttgtaaccatcctttataaaattttttgttttcagaacccgaatctgtcctcgagcgacagaccgtcatacgcgacgtccagcttatacggcagggtcagcccggatatatagcgggcaagctccgcgtgcgtcgagcctatcggcgcgatatgcgtgaaccagacctcggtggtatccgagatcgtcccctgctcataaagtctctcaaacgtcctgagcgccgtatggagcgtcatgtgccacggacagttcttgccgtcgtcctcgagtatcggcatcgtgcactcgcttatcagaaggtcgatcttcctgtccttcagcgcctcgaacgtttcctcgagataatacccgctgtcgagcgcgtagtacatcgtcttgccgttcggaagagttatcaggtagttcgccgagttcttctcgaaaaccgtcctgtggttcccgcggagcggcgtcaccttcaggttcccgatctcatattcctttccgaactccagcttcacgaaattcacgttgtcgggtccggtgtacgactccctgccctcggtcaccggggaagtcattatgaacttctctatgacactgtaagcgtcctcagagaaatagacgttcatcggcttgtcgggcttcttgcgcgcgaccgagcgggtccagagaaccatgtagttgaagtgatcctcatgcgtgtgcgtatagagtatattctcgatgtcgtagagcgattcgcccatattctgcgcctcggcggcgaaatccgcgccgacgtcgattatcgtcttctcgtcaatccggaaggaagacctgagccgcagctctctgccgcccttctccctcgcgttctgacatatccggcactcacagaacggagtcggggtagcctccccggcgctcgtgccccagaacctcattttctttaccatcagacaccttcactttcaagcgtgtgccctcacacgccgtttttctttaattgtacaccatacagctcattttgtcaatacttttcgacgcaaaacttcacaggaacacaaaaatcacccgtcctcatgtgaaaacgggtgatgcgattcattatccggttatcttcgcgagagccgcctcgaggagttcgtttatcttcacagggttgcccttgccgccggtcttcgccatgatcttgcccatcagagccttcgcggcgttcgttctgcccgcctttacagcggcgaccgtcttcgggtcggaggctatcgcctcgtcgacgtattttccgagtatctccgggtcgctaatctgcgcgaggtcgttctccttcacgatgatctccgggtcggcgtccttctcaaagagcgtcttcacgagcttcttcgcggtggacgagtttatagtgccgtcgccggacatggtcgcgaccgacgcgagatgcgcgccgtctatcggtatcacgacgtcgtcaccgtcctgctcgagcagagagaacagctctccggtcatcaggttcgcgagcagcttcggatatgcggtcagctttgccgccgcctcgaagtagtcagctatatacttgttcgcgatgagctgttcggcgtcgtgcgcggacagaccgtactctccgacatacttcttctttctcgcgtccgggagctccggaacggcgtcgccgagcatctttatcaccgtgtcggtcaggattatcggcggaagatccgggtcggggaagtaacggtaatcgttcgcatcctccttctttctcattgagaaggtctttccgctgacagaatcgtagcgtctcgtctcctggactatcgtctcgcccgcttctatcgcctcgacctgacgcttgtactcatattctatcgccttctggatgaacacgaacgagttgatgttcttcatctcggttctcgtgccgaacttctcctcgccgcgctttctgaccgacaggttgacgtcgcacctgagcgagccctcgttcatccggcagtcggacacgcccgtgtagagcattatggcgcgcagcttcctgacatacgcgacagcctcctcggcggtgcgtatatccggctccgagacgatctcgatgagcggcacgccgcagcggttgcagtcgatcatagtgccgtgcgtgtcgtcgtgcgtgagctttccggcgtcctcctcgatgtgtatgcgggtgatgccgatcttcttcgtgccgttgtctgtctctatctcgagccagccgtgctcacagagcgggagatcgtactgggatatctgatacgccttcgggaggtcgggatagaaatagttctttctgtcctccttcgagtagcgcgcgatctcacagtttgtcgcgatgccagccttgaccgcgtaatccacaacctgcttgttgagcaccggaagggttccaggcatacccgtgcagaccgggcagcactgcgtgttcggctcggcgccgaaggtcgtcgggcaggagcagaatatcttggtcttcgtcgcgagctcgacgtgcacctcgagtccgcagaccatctcgtaatcctttatgaactgcatttacttttcctcccttgagatatggtagcaccctgtctcggtctcgtacgcgtttcctgccctgtagagcgtcgcctcgtcgaaagcctttccgatgagctgcattccgaccgggagtccctttgagtcggttccgcaggggagagacagcgacgggataccggctatgttgaccggaaccgtgtagatatcgcccatgtacatctcgagcgggttcgaggtcttctcgccgagcttatacgcagtcgtcggcgcgaccggggaaaggatgaagtcgcaggtctcgaatatcttcgagaaatccttcatgacgagcgttctgacctgcaatgccttcttgtaataagcgtcataataaccggaagagagcgcgaacgtgccaagcattatacggcgcttgacctccgcgccgaaaccctcgctgcgggaattcttgtagagatcgactatgtcctcatacttctcgcttctgtaaccgtagcgcacgccgtcaaacctcgcgaggttagatgacgcctcggcgctggaaatgacataatacgcgggaagagcgtgagatatcgtcttcatggagaccggaacaagcgtcgcgccgagcttttcgtagaccttcgcggcggcgaggacatgatccttcacctcttcgtttattccctctccgaagaactcgtccgggatgcctatcttcatgcctttgacgcccatgtcgagccgcgccgtatagtctccatactcgcggtcgaccgaggtcgcgtcgcgcctgtcgtgaccggctatggcgttcagtatcacggcgttgtcgcggacattcttcgtcagcggccctatctgatcaagcgaggacgcgaaggcgacaagaccgtatctcgagacgcttccataggtcggcttcataccgacgacgccgcagaacgcggcgggctgtcttatcgatccgccggtgtccgaaccgagcgagaacggagcctcgtcagccgcgacagcggcagccgaaccgccggagcttccgcccggcacataatcggtatttctcgggttgtgcgtcttcttgaaatacgagttctcagtggtggagcccatcgcgaactcgtccatgttcagctttccgagtgtcacgattcccgccgcggcgagcttctcgacgacagtcgcgtcgtacgggggaatgaagttttcaagcatccttgacgcgcaggtcgtgcgcgttccctttgtgcacatattgtcctttattccgaccgggataccggcgaggggagacaactcctcacccttcgcgcggcgctcgtcgatctttttcgcgttgtccatcgcctcatcagcggagacggtcaggtacgcgccgatctccggctccttctccgctatcctgtcaaggtaagcgccggttatctccgcgcccgacagctcgcgcgacgcgagctttccggaaagctcggtgaccgtaagtttcagtatatcgttcatttatcgcttttcctttcagttattctcgaccacacgcggcacagtgaagcatccgtcagcctttgtcggcgcgttcgcgagcagctcgtcgcgatccgggcggttctcaaccctgtcctcgcggaagacgttggatatcggaacgacgtgggcggttatctccacattctctgtgtcaagctccgagagctggttcgcaaaaccgattatcgcttccatttccttcggcatctccgccttctccttgtcggtcagcgaaagtctcgcgaggttcgcgacgttttccacgtttatcgccggggtcgccttcttcttcggcttcgcggctgtgccggcgggtctctcagcctcgtctccgacgtatatgccaaggaccttcagctgttcctcgtcgacgaaatccggggcgtttgtcatcagctccgacgcgtccttgatcttcgggaacgcgattacctctctcagcgactcgacgtcgagcagctgcatcgtcagtctgtcaagtccgaacgcgaatccggcgtgcggaggcgttccgtatctgaacgcgttgaccatgaacccgaaccgctcctcaatctgcgcgtctgtgaacccgagcgcctcgaacatcttcgtctggatatcctgacggtgaattctgaccgaaccgcttccgagctcaatgccgttcagcacgacgtcgtacgcctgcgcgcgcaccctgcccgggtcggtgaagagatactgcaaatcctcctcatacggcatagtgaacggatggtgagtcgcgacatatctcttctcgtcctcagaccactcaaactgcgggaagtcggtgacgaacaggaacttatactcgcccgtgtcgcgtatgccaagcatctcggcgatatctattctcaggtttccgaggcagcggcggacagtcgcgagcttatccgcgcagaacaggatgaaatctccctcgtgcgcgtgcatcttcgctataatctcgtctatctcctcgactttgaaatactttgtcaggatggagtatatctctccgccgggtcttatcgctatccacgccatgcccttcgcgccgtagctctgggacttcgcggtcagatcctctatctgcgagcgtgtgagatcggctccgcccggaatgtttatcgcgcgcacgacgcctcccttgtcgacgacactgcggaacaccgagaacgagcatctgccggcaagctcggtcagatcgattatcttaagatcgaatctcagatccggcttatcagaaccgtaggaatccatagcctcgttccaggtcagtctgaggaacggtccgacaatatcctcgtgcatcagcgtcttcattatatatttgaacagcgtctcgaggtgctggagaacatcctcctgattgacaaacgacatctccatatccacctgagtgaactccggctgcctgtccgctctcagatcctcgtcgcggaagcacctcgccacctgataatacttatcgatcccgccgaccatcaggagctgcttataaatctgcggcgactgcggcagagcgtagaacttgcccggatgcacacggctcggcacaagataatctctcgcgccctccggcgtagacttcatcatcataggcgtctcaacctcgaggaacccgtgctcatcgagataatccctcgtcaccttcacaagatcatgtctgaacttaagattcctgtacatctgcggacgtctgaggtcgaggaaacgatacttaagtctcagatcctccctgacctccgcgctgtcgtcaagcgcgaacggtatcgtctccgcggaggaaagcagcgttatcttcttagccgcgagctcaatcgtacccgtcttcagcttagggttatatgtctcctcgccgcgcttacgcataagcccggtaacctcaatgacagactgattcttcagtccgtccgccagcctgaactcctccggcgtcatattcccggcgtcaaacaccacctgcaacgttccttccctgtctcgcaggtcaatgaacaccacgccgcccatgtctctcttcgtcagcacccagccgcacaccgtcacttcacgcccgatctccgattctgtcaggagaccgcaataatgtgttctgttcatagttacatcctttcgtttgcttgcgggggagggaaaacctttcgagaaaggttttccctcccccgcccccctccttttctaaagcttcatactctataaggggtttatatatatcaataaaacaaaaagccgcacgtccagattctgtctctgggacgaacgactatagtccgcggtaccacccgttttgcctttatggctctcaaccatatcttgacgccggtcatcaccgacaacgcaatatgccccggtaataacgctccggacgcgcccgaatctactcaagatgccgcgtgacactctttcggtcggaagctcagggatgttcttcccccgccttcggacaccggattctcaccatccccggctctctttatgtcctacccggcgggatactcttcccgtctctgcctttattcctattatacgctattttttcccgcttgtcaagaggttacgcgaaactttgttgatttttgccaacacacagcgaaaatacaacccgtcatctcacgccgcgacattctcccgcgccaaaacatcctccccggtcccggcaagcctccaagcggcgaccgtcacacaaagcataagcgcggatatcacaccgcccgtcaccgaacagaaatccatccccataagcagcggcatcccggacgtcgcgaccgcacccagccccacagccataacaaacctgaaatacccccgtctcgcctcgaacaccgccccgacaagccacagcccgagcagcacacatgacagcaccgccgtcataagcggtccgaaattcgcgtacccgaacggcagcgggtcaaaatacgaatacgtctcccggacacgcccctccggactccccggcgccccggcaaacacacagaccgctccccaaggcagcagctcaagaaccaccgtcaccgccgtgcatataattcccgcgatcctcatcctgtcgaacttcatgacatatccctccgtttccgcgaagctctgaacttcatgtctgtttgacggacgggaaagagaaaagttccgcaaaaaataaaatttcccacaaaaaagagaccgccgcatcgcggcaatctccttttcagacttccgatctcagaacacgacgacaagcatcatcttgaagcgctcctcaccgtaaacggcgtgcggatgcccggcgggcatgactatcgactcaccctcacggaggatatactcctcatcgtcaatcgtgatcttcccgacgccgtcaaggcaggtgacaaacgcgtcgccgcccgacttatgcgagctgatctcctcgcccttatcgaacgagaacaacgtcacgctcaccgccggattctgcgccagcgtccggctcacgacctgtccctcctgatacgcgacctgatcgcgcagggcgacaacctcggatttcggaatgttcttgatacgctcgcgctttacggtggttatttttttcgcggttattatgtctttcattgcgggttcctttccacatggttaatgcgtatacttatattatatcgcaaaaaacgtggaaattatgttgttacggcaacatttcacgtgagtttacggaaattttacttttggcactatccgtatatcaaaccttgttccccatgctgtctacccacactttattttccggatcggtgcagatcaggagcttgccaagatcgctgtcaaacaaccgctgaccgtatgtcggataataactgagccgctccgccgtcgtgcacacagccttatggcaattgttcctggtaactatcccgcgtcccgagccatcgttctcccaaagtttgaaatccggagcgttcgtatgacaccaagccggctgtgccgtgaaaccgatatttcccttccagagcccaggtctcacctcacgcatgacatcaccaagctttcctcccggagtcttatcggcgagccgctcaatgttgaagcttatcatggttatttcctgttcgccgggaagctctccgttcgcgtcatgatccccgcagaaattgaaaagcggcagattgatattcctctcatcaagacaatttatcatggttatcggatggttgctgccgcaacttgtctcgtaattaccgaacgtatatccgtaatttccgatagccgcgccgcagttgacgcagaccacatgctctccaccgacctgtatgccctcgtcgaagccccatgtctgcacgtttatgtaattactgtagtcataattgctgccgtcagtcattgtcagaccgatacatcccttcgcgggaaccggaggcggtgtaccaagccccatattgctgtcctcagcaatcaatcctccatatgagacaagagaaaggttcttcacttcaacgcggtcggtgcgcctgagatcaacgcatctcaccggatgctgattgtcgttgagaattatcgcgatattctcgagtctcagcgacgaaccgttctgtatcccggcgggagtccatttcccacggatcacgtcgacagtcctgccgccgatactctcaagcgcctccgcggaaacgcaaagaacaacaccgttatcgtatctcctctgaaacccatactcatgattctgacccatgatcgtgatctcacggtgtgtgttcggtatgcttaccgccgtcgccggtccgccgtcgtctctttcgtgaaacgcgtctatatgatagattccgttcagaagaagcagattcttattccgctccacacaagcgtttatcgccctctcgatcgtcacctcgtcgtttttgccgccgcagacaaggtccgcggcgagctttttctcctggtcggctccggacggcgcgactatgatttcagttatactgttcattcagattgattatcctctctgaccatttcagctgttcacggtgaacgcctcattgatcttttcgatctgtgataaagcttttgcctcgtatttcgcgtacatcgagctgaaatcagtcccgggtctgcggaatatatccatgatccgctcgttatagccgccgaccgcaagataccagcccgcgtcatagacacgtgttgagaacaagatatcaagtgtatcccggctctcatcgtccctgatgtattttccgacaagcaccttgtcataatatgccggacgaactatctcctgtgaggcatatccgagcatatcgagcacagttccgatcatctccgggtcgccgacatttgaaggaaccgcaaggaataccgcgggatatgaagcgacattcgtataatatctgtcctgcgcctcgtcatatttcgggtaaggaagaatcccaaagtctgtctccatattccggaaactcgagatcgtgtcgatcaaagtcaggtcaaagagcgatctgttgtcaataaacatattatcggctacagcctgattgtcgccggaaagcctctggtacgcgaaacaccttgtcttgtctgtcacgatagaaagatatttcgacacagtgttgagtgtgcgctcggtattaagtgtcagctcaaccctcccgtcaatcaccgtacagcatttttcaccgacagcgttcaccgccgccatcatgctgtcgtcccagatgagcgcgccgtatctgtcattcttgtcatactcgccgtttccgtcaaggtcgctcgcgacaaccgcgcacatctcaccgaacttgtcgaatgtccagccgctgtttctcacaagatcatatgggtcgtcgaggctgaaatcaccgacgagctttttattgaagagcatcacgcaggtactgtcgttgatgatcgtactgatatctccggtcagcatgaagttgtgcccgccgaacgtgaggtcattcaccgctcccgcgtcccaccagctgtgagtcatatcaagagagccgaccgttccgaggtcaaggagataattctcctgcgcaagactgaaggtgtcatacgcccgcgatatcatcgccgaataggtattgtcgcccgccagaaccatctttgatatcgtattataaccggcgctgccctgactgtcggtcttcgtgttgattattcttacgttcagagcctcttcaactctgcggttgcggtcataataggcgtcgttgagaacgtctccattctgctctccggtaccgaggtcgttcttgtaatcccactgaataacagtgtcaatcataaaattgatctccgcgccgccgaaatccgcctgtgtcgtcgccggtgtttccttcggcgcctcagtttccacagtggtcgtatctgtatcgccctgaccggatgtcacctcgcctgactgatcgctgccgcacgcctgaagaagtcccgccgccataatgagaagcgtcatacccgaaatgtatcgttttgcttttttcatgtcaatgccctgccctttcaccagaatatgtttatattataccagag

SEQ ID NO: 4355 - DNA, 18119 bp, Unknown
  16S sequences of unknown bacteria
cttaatatttcctgccagggggcttttttgtactgtccgcacaagatggggcagttcaaacatcagggcatggtcttttttataatcagcccattaaccgcacttcagctgcaaacggagcttgtcggcgatcatggagataaattcgctgtttgtgggcttccctttgatttgggagacagtgtacccgaagtaactttgcagcacttcaatatctccccgatcccaggccacctcaatggcgtggcggatggcccgttccacccgggagctggtggtgttgtatttcttggccaccgagggatagagcactttggtgacagcattgaccacatcgatgttctcaatggtcatcataatggcatcccgaagatattgatagcctttgatgtgtgcaggcacgccgatgtcgtgaatcacttcggtgacccggatttccatgtccaccgccgggtccagtgcccggactgtgggattttgcatgggcacaggaaggtttttatagctgcagatccgctcggccaaagcagagatgttgcagggtttcatcatgaaatagctgacgcccagggctgcggcttcggcggccatctggttgctggaaaaggaagaaaggacgaaaaacacaggtttctttccggaagaggcgctggtgatgcggcggatggcggccaggccatccagtttggacagcacagtatcggtgaggatgatatcgggggagagctgggaagaaagctgtaccagttcttctccatcgccggcggcccctaccacctgaatctcagggtgttcctccagatttttttgcaaaagagcacgaaactccccgctgtcatcggccaataataggcgtattttggtattcatagctcacaactccgttatttgacaaattggtgtgttaccagcgctgtaactataaaataccacaatagatggggcctttcaagatggaacgaccggaaatattgcaatttatttttacaacaaactccggttttgttcacaaaatgcggtgattttacaactttcgtggcgtttcgagcattctctcggatggatggattttatgaaatcacaaagcgggtcataagtccgatgaggatgcacactgcaccggccagccaggaggtcaagcgcccttttttggcgtccatctgctctggatagaccggatgcacgatccacagcagaccgtagatgacccaggcaatgttggaaaacaggccctgatgaagggcaaaagccagaatgtttgccagaatcactagaataacacccagcaggatctgttttttaaatgcggtcatgggaaatccccctttgccatatgaattgaatttattgtaccatatggctttttgtttgtcagcaggttctgggaaaaatagaaaagggcagccaggaaggctgccctttgggtgtggctgtgttattgcaggctgtaagcagtatccagcatattttcaatgaaaatgccgtagccccgggtggggtcgttcatcagcacatgggtgacggccccgatgagtttgccgttttgcacaatgggactgccgctcatgccctggacaattccgccggttttgcggagcagctctttgtcggtgactttgatcatcatgttccggttgctttcatcgtcatcgtcgggatataccttcaggatctccacatcgtagtaagcggtgtcatctccatctacattggcgatgatctgggctttgccttccttgacctgggatttgggagcggtctccagggcctgccgtccttcataaagggagggatcggtgatcttgccgtagataccgctgtcggtgttctggtaaaggacaccctggtcacgggtcaggtcgtattcgcccaccagttcgccaggggagccaacttcacctttttccacaccggccacctgggagggcatcagactgccgccgccaatgggcatcagttcaccggtatcctgatcggctacgccgtggcccaaagcgccaaaagcgccgttttccgggtctacaaaggtgatggtgccgatgccggccagactatcccgcacaaaagcgccgatgcgataggtgccgctggcttcatcctttaccggctttacctggagggtcttttcctcttcacctcgcttgaaatgaatggtgagctgggctccttggctgctttccacggcctgggccatggattcgttgctgtctacaggggtgtcattgactttgataatcaggtcacccaaacgcagtccggccttttcagccggagagctttgggaagaagcgtctaccggagcaaagcccaccaccatggccccttgggaaaagagcttgatgccggtggtgtggccaagagggatgaggcgggtgctctccggacgaacgatctcgccggagtcggttttggatacattgatgctgtcgatttgagcagagacggcggctaaagcgtcttcgccgcccagaggaaacagggtcagagcggcagcaagaaccagggacaacgccccggcgcctttgccgatccggccccagataggattgggtttgtgatttttgtccatgggatttcactcctttctgccacgcctattagcattcccgccgctatggttgatactttgcaagaataatggtattctgtttataatctgctaagggaaaaaacggttcttgcaaaagaaacggagggaaaaggctgtgaaactggccattgtgggctcccggaccatgggagaggaattttatgaattgctggagaaaaatgttcccaatggagtgaccaccattctcagcggcggggccaaaggggccgacagcctggccaggcgcgtagcccaagagcggaagattcccctggaggagatcctgcccaattataaaattttcggaaaaatggcccccattgtgcgcaatcgggaaatcgtgcagaaagccgatctggtgctttgtctgtgggatggaatatccccgggcacacggaatgtgatttcactgtgtatggagctgaataagccctttcagctgctggagccggaactttaaaaagaaaatttcattctatcagaatttttccccgatttttcatgaaatctccgtgagaaaccggggttttacttgttttgaggagaaaaatgtggtacaatagaataaattaggaaagcgaaaaggaaaatttttgttcaaattgatggcctgatggctgaaaaagaaaaatggatatataggtgacactgtatggcggcttaaagaaggaggcggcgtgatgtatacagtgggcgagaaggtggcgcatcccatgcatggcgcgggagtgatcgagcagatcctaccccgggaagaaggggggaaagagcgccttttttaccttttgcgcctctgtgtaggctccatgacgctgcttttgccctgcgatagctgcggggccgtggggctgcgccccaccgtttcccgggaagaagcccagaaccttctggacaggctgggagagatccccgtgtgtcaggagggaaattggaaccagcgctataaagacaacatgcagcgtatccgcagcggcgacctggagcaggtggccgtggtcatccgcagcctgcggcggcgggatggccagaagaatctatccaccggtgagcggaaaatgctttccagcgccaaaaaaatcctggtttcggaactggctttggtgctggagcaggattatgggcagatcgagcatatcgtggaaaaaacattggtatagtaataaagggcagccggtcctctggagtggctgagagggaggggatcggatttgctacaacagttgcgttctttgctgaaaaagaaggagcggccctataccgctgcggtggtggccgccggcggcagcgcccgccggatggaaggcgtggataaactcctggccgagatccatggcgtgccggtgatcgcctatactctgctggcgttggaaaaaagttcctgcgtggatgaaatcgtggtagcggcttcggaagggaattttctgcccattaccgaggtctgccgggagtttggcatcagcaaggtgttcaaagtggtgcggggcggtcaggagcgggccgacagcgtgtataaggcgttgtgcgaatgcagcccgcagaccaagtttgtattggtgcaggatggggcgcggccattgctcacccccgatcttgcggaaaaggtgtgtcagaaagcctatgaagcccggtgcgccacagcggccgtgccggtgaaagacaccattaaagtggtggaaaacggccttgtgcagcaaacgccggacagggcttttttgtatgcggtgcaaacgcctcaggtcaccgatatcgaccttttgaaaggggctttgtgcaaggcggcccaggatggggaaaaggtgaccgacgactgcgctgccgtggagaagctgggcattcgtccggccattgtcatgggctcctatgacaatatcaagatcaccacgccggaagatctggacattgcccaggttcttttggagcggatgggaacagaacaagggaggaacaacctttgaagatacgagtgggaaacggatacgatgtgcaccggctggaagaaggccgcaaactgattttgtgcggggtggaagtgccccatgacaagggccttttgggccacagcgatgccgatgtggccacccatgcgctgattgatgctttgctgggcgccgcgggattgggggatatcggaagccattttcccgataccgatccggcttacaaaggcatctacagcattcagcttttggaacacacggcggctcttctgaaaaaagagggctacggcatagaaaatgtggatctgatcatcgtggcccaaaagcccaaattgctgccttattttccggccatgcgggaaaaactggctcaggctctggaaatcggaccggagcaggtgaacatcaaaggcaaaaccgaagagaaactgggctttaccggccggatggaagggatgaaagcctacgccgtagccttgcttttaggccagtgaaaaggggagcagtatgggcgcttattttggcaatgtaatggtgcttttgccggagaggcagtccttggaggagattccccgtctgctgcatcaggcggggctgcggctggatgatacctttgtctgtccccaggaagaaatttgggaagaggagaatgtggtggccgcagcacttccgccggatacccgctggctcacctgctgggacccggtgtgccgccagggctttgatcccgacttggcggaagagctggcccagatctatggtacggtatttcacgccccggccctttccttttcggtagaagatggggagcttttgctcatgggctgctttcttcccgcccggcgtttttcccgctggtatgccaggggaagcaagggaatcctgaaagagtacggcatttcatcccaggccggagcctttcctcaagaggtttcccgcttgctgcccacgccccgcatttttccctttcatcgggtgtggagcgcgccggggatcggccaggaagaagagcggctgatggatatggccgccctatttggttttgctcctgtgagtctggatgaggggattccccctccggtgaaatcccggtttttccgggtgccctatggcatataagaatgaaaaaaggcgtttgccggttttccggcaaacgcctttttctatgaaatggtcagttgtttttttcctgggcttcacggagagagatcttccgccaaaagcgaatgaccaggggaagggtcagaatggcggtgagcagatcggcaatgggctgggccagctgcacacccagaatgctgtcaaagagggagggcagcagcaggatcagcggaaggaaaaacagcccctggcgtgagatggccagaagagtggcttctttggcctggccggtggattggaagagcatattggagatgaccaccagggcctggaagggaagcagggcacattggagccggaaagcccgggagccgatggcgatgaccagaggatcgtcccgacggaagatagccatgatgtccggggcgaaaataaagccaatggccgccatgataaagagtcccaccacgcctactttcaggcagaagaaataggcctggcgcagccggtcatagcggcgggcgccgtagttgtagccggccaccggctgaaagccctggccaaagcccagaagagcagagaggatgaacatgaatacccggcccaccaccgacatggcggcgatggctgcatcgccataaagtccggcggcccggttgagcattaccgaagccacactggccaggccctggcggaagaaagaaggcgcgccggtgcgcagaatctcccaatagacggccctctggcgggatacccaccggagccggatgcgtacggcactgcgcccccggatatagtgggaaatcagaatggcaaagctgacgacctggctgagcacggtggcgatggcggcgccctggatgcccatatcaaaggtaaagataaataccgggtccagcaccatgttgagaaggccgccgaagccgatgcccagcatggccagcacggcccggccttcggcccgcagatcgttgttcatcacaaaggaggtgcacataaaaggtgctcccagcaaaatcacctgggcatactcctccgcatagggcaaaatggtttcggtggcacccaaagcccgcatcaatgtatccagaaaaagggtgccgaacaaggtgatggcgatacccagcatggcggcggtaaagaaggcggaagaggccacttcattggccttttcattttgcttttggcccagaagccgggagatatagccgccggaccccatgcccagcataaagcccacggcctggatgatggccatcagggaaaacaccacgcccaccgcgccggtggcactggtgcccagtttgctgacgaaaaaggtatccgccagattataaatggaagtgatcatcatgctgacaatggtgggcacggccagcttgccgatgagttttgggataggggtttcggtcattcggatgaattgagcgtcggccgccgatggggaaggagtcataaaaccaccgctttcttttttgattttcccacagtatcgttaggatgctaatgatagtataccaaaagacgaaccgggatgcaaaacaatttaggggcttgacagatggagcgaaaccattcagaataaaaagataagggcggaatggattccgtcttgcttttttgccggcaaggccggcctatcccctcggaaagaaggatgatttttcccatgcaggacagcgaaaagacccgattgtttgagcagacgcccattcccagggcggtggctcagctggccattcccaccatactcagcgcgctggtgatggtgctttacaatctggccgatacttatttcgtgggtatgctcaatgagcccattgaaaatgccgccgtgaccctggcggcgccggtgcttctggctttcaatgccgtcaacaaccttttcggcgtgggcggttccagtatgatgagccgggctctggggcgaaaggactatgagacggtgtaccgcagctcggcctttgctttttattgctccattggtgcaggattgcttttttcccttttgtgtaccgtgttcaaagggcctttgctcactttgctgggcgccagcacggaaacggccgcggccacttctggctacttgctgtggacggtgaattttggtgcggcccccgccattctgaatgtggtgatggcctatctggtgcggtcggagggctcggcccttcatgccagcgtgggcaccatgagcggctgcttgctcaacattctgctggaccccatttttgttctgccctgggggctggatatgggagccgagggcgccggtctggccaccttcatttccaactgcgtggcttgcctgtatttcttcgtgctgctttataaaaaaagagggcatacctatgtgtgtgtctctccgaaaaaattcagcatggaaaagcaaatcgtctggggcgtgtgcgttgtgggcatccccgcttccatccagaacctgctcaatgttaccggcatgaccatcctcaacaactttacttcggcttttggagccaatgccgtggcggccatgggcatcacccagaagatcaacacggttcccatgaacatctccatgggtctgtcccagggcattatgcccctgatcagctacaactatgcttcgggcaatatgaagcggatgaagggtacattgctctttgccgttaagctctctctgggctttatccttaccatgtccgccatctatttcctggcggccggtcctctggtgcagatgtttatggacaatcaggccatcatcgattatggcacccggtttctccggggcttctgcctgggtctgcctttcctctgtgtggactttctggctgtgggcgttttccaggccaccggcttgggcggatgggctttccttttcgccatcatgcggaagatcgtgctggagatccctgccctgtatatcctcaacaagctgttccccctgtacggtctggcctatgcccagctcaccgctgaagtggttctggccgtggcagccgtggtggtgcttgctcgcttgttccgtaaactgcaacagcagcacccggaaaaagaaaattgattcaaaatcataaaaaatcccctctggttttgccagaggggatttttcgttaaggcagccgcacatcaaagcagaactgtgcttcgtatacggtgttttgaacgggatgggagaaggaagcggtgatggtatagcgggcgctgtaaggggccagcggcagcgtgtttccttccagctcatccagagagagggagtatgtccgcgctccctccagctccttcaccagaatggtgccgccgggcagaaggggaagggagaaatccagccgcacttcttttgcggggaaacctgcgatgccgctggggtccccctcccactgccaatagggccgctcttcctgcaagacgccgttccggctttcactgaggatggtgcgggatgcggaaaggggattttgccccagttccggatggtcaaagaacagatccagagtgggaggtgtgggatcggggtcgggatcgggggccgaaggatccaggaaggaaaagagggcttctttgtccaaaggctcggtgagtttgtaatagatggcccctttgttgtcatagggcagataagctgtgagaaaatcccgggaaagcgtgagccgggtggctctctggtcgtcggaaaaggtgatatagatttcccaatcttcttccggcagggaggtggtgagcaaaggctccacagaaagccctttgagatagtcggtcagtccctcttcttcccaggcgtagatggattggtaagaagaaaatccgtctttttgcgaaatggcggtaagctggctgcgggaggggatgctctgaaagatcagctcatcggcggtccgggccggctgggacagggcgatggagccataactcatcatcatcaagaaggtgctcagtcccaggaggagggcgccggagagctttttgccgggatgaagtacccggcgcaggcggtagcgcagcgtgcggccgctggcggagaggcaggaggtcagccccaggctgcttccggcggtgtgcagcagcaaagcagcgtatttgtgccgggttttgtcatcccggcgatacagcactccttcatcacaactcagctctaaatcctgggccactttgtagcaggccagccagatcaggggattgaaccaacccagggccagggagaagaaaaggaaggccttggttttgatgtcctcattgcggatatggaccacctcgtggcagaagatcagctccagttcttccagggtgtattcccgctggggcaaaaccaaccgcagggtgcggtcaaacagccccagagtgaggggtgttgcaagcacgggagaacggagcagaaggatctcccggcggcagccgctgcgggtctggcactcccgccaaaggcgaagagtctcttcttccgttgccataggagtgctgcggggcaaaaagtgaccggagaaggggagaaactgtttccggcggtttgcaggcctctcttgggcttcctgccacaggcggaggcctttttcatcggtcaccaggacggcgtctttcagcacccggcggcgaaagcgcaggtgggttaccgtttgccatagaagcatcagtacaaagccgcccaaccatacaacgaccatccagggccgaaaggcaaaggggagaggcaggatgatgcgcggggcgaacattctgtccaggttgaaaagcagatagagcaggttgggcagaagccataggctggcgcaggccttggcagaaaagaagcggcgcagcaggggcagaaggagcagaagcagggcaaaatacaagctgagataccccagaaggatcagggcaatgggggacaaaaaatcggccgagggcaaaaagagctggaaacaaaggagcaacagaagaaaacagggcagaagcagaggaaagagcagcacggttttccgtccttttttcagcggtttccagaacagatcctgctcttcctgctgccgggcggaaaagccccaggcagcggcaaaagcaaaaatcagactgaggatcagcttcatggtcatcacagttcaccttcctccaaaagacggcgcagttccatcagatccttttgggtcaggccgccggcggaaagggcggcagccagaatgcctatgttcccctggcatacatcctggacgaaatgctggccctggcgggccaggtagctttcctgggaaaccaggggggtgtagcggttctggcggccttccttctcgatgcggacaaaccccttttctcccagccgggtgaggtgggtcaaaagggtggtcatggccggacggcgctgaaaacgcttttgaaaatgctcttcgatctccccacgggaagcgggaacagtgcagttccacagggcctgcatcacttccagctccccatcgggcagacggcggatggtagtcatggcactcacctctacaaatgtagtagtatagttttattctacatttgtagagatgttttgtcaagaaaaatcccggcaggtttcctgccgggggacagacgatggaaaagtcaatatggtgaagggaatggtttgccctatctttcatcaattcgcaaaaaacggcgacctgtgcgccggtttttgcacttctcaaggggcaagtgtgggccatcggctgcacgcagccccttgcaaaaactcgaaaaagtggcttttgccactttttcgaagcgacccatcccggcggaaaacccgccgggatgggaaagctcttattgttttttgccgtgggagatcaggtagtagccgccgcccaccaccagggcaccgcctaccaggttgcccaggccggagaccaagatgttccaaaagaagccactcagggaaatggcggcctcctggccggacagcaacgcagaagagagcagagtcatgttggccacacagtgctcaaagcctggagtgatgaacatgacgatgccccagaagaccattagcagcttggcactttcgctttgcagcttgaaagagcaccacaccggcaggcaaaccaggatgttgcacagaatacctgcgatgaaaagagtggggaaggagctgttcattttggtttcggcgctttggaggataaactccatggcttcttttccaaacagattgccccagcgcatcagcagggaaaggagaagggcccccaggagatttccgatgtagctgaacaaaagaacatagacacactgcttccaggaaaccttcttttccagagcccctaccgtcatagtcatggtgttgccggtgaacagatcggccccggccatgagtacaaagctcagcgccccgccgaacaacagtcccataatcagcttggtatagggggaaccggcggcggaaagagtgccgcctacggtaaagaccagaatcacgccaaagccgatataggctccggccagcatagtggaaatgagcgcgcccaagggatggcgggaaaaaagacgggcctttttctccgctccctgagccactgccgtgagtgcgtcctgatacacgatgatccatcctccttttcaaaaaaagaaaggggtacgcctttggccggcgtgccccttggggtttttcagttcaaaccggcttgtttcatggcggcccggaccacatgctgggccaggcagctggtagttaccatgcccacaccaccgggaaccggggtgaggcgggctaccacattttctacggcggcctgatccacatcgccgcacagtttgccgttttcatccacattgatccccacatcaatgaccacctgacccggggaaacatgatcccgggagatcattttggctttgccggcgcaagccaccagaatatcggcctcccgggtacgggcggggagatcctgggtgcgggtatggcagatggtgacggtggcgtttttggccagcatcatcatactgaggggtttgcccaccaccatgctgcggcccacaatggttacccgtttgccggaaagctccacgccgaagtggctgagaagctccatcaccgcttccggggtgcaggggggatacccggaaggatcggcggcaaacaccttggccagattgtccgggttcatggcgtccatatccttttccggggagaggacatatttaatgactccctcatccagctgggagggcagggggcggaacaccagcaccccgtggatgctgtcgtctgcgttgagcttctccagttcctgaatgaaagagggctggtcgatgtcctggggcagctccaccacccgcaggccgatgcccaggccggaaaagcgcttgatggctccggcttcataggacaggtcatccggccgtgcgccgcagcggacgatggccatctggggatgcactcccgcttcttccagtttgttcacctgctggagcagccgctttttcatggcggccacaacttctttgcctttcagcagttcagccatgttgcatcctcctccttatttgcggatggagcctttgacggcttccaccacttgatcggcccggggcagccactctttcagcatggcgtcggctgcttcttcccactgggcggcagtttcccggtcctgcatcagcttggtgttgatgtatacattcaggctggcgccatccaaagcggcccggcagaaggcagcccccacacccacatcggacagggcgatgcgggaacctttttccgccagttcctccagaagggcgatggccttggtgcaggcttccataatgcgcaacggcacctggcaggcgtctttcagacatttttccatcacttcctgccggtgagccagctcttccggagtatttttgggcagaccataggcctgggacagaggctcaaaggcgtcggcatcggcctgtaccagattttgcagatggagacgcagctcttccccttccttcagaatgcgcaggatgtcttcttccacggcggcgtatttctttttgccccgggtaaggttgcagaccatgctgcccagggccacgcctaaagcgccgcacaaagcggaagcaccgccgccgccgggcaccggctgtttttgggaaagctgggtgagaaattcctcgcaggtcaaatgaagcatggcttcttctcctttgtttgataagataaaatagacccaagtttcaaacagtgaaaaacaatacagcaaaaacaactgtttgccctgccccttatcaattcataaaaaccggcgacctgtgcgtcggtttttatacttatcaaggggcaagtgtggcctattggccacttttagcggtcaataggctgcatacagacccttgcaaaaactcgaaaaagtggtcttgaccactttttcgatgcgcttaagtctgcccgcagccatggctgcgggcagaccggcagaaaaacattagaacaggccggagatcttgccggcttcgtccacatcgatgtgttcggcggccgggactttgggcaggccaggcaaagtcatgatatcgccggtaagggccacggcaaagccggctccggcggagatcttcacattgcgtaccgtgatcttgaatccctggggacggccctttttcttctggtcgtcggagagggaatattgggtcttggccatgcacaccggtacatgggaaaatcccatttcttcgatctggcggatctgctttttggcggcggggagaatgtccactccgtcggcgccgtagatggttttggcgatggtctcgatcttctcagcgatgcccatttcatcgggataagtgaattggaagcgggagggatcggcggtttcgatgagattgagcacttcccgggccagcttttcgccgccttcgccgcccttggcccacacctgggacagggccacatggacgcccatctcccggcatttctgttccaccagttccagctctttctgggtatcggtggggaaggcgttgatggccaccacagcaggcaggttccagaccttggtcacattttcaatgtgcttgagcaggttgggcaggcccttttccagagcttccagattttcttcgttcagatcggccttgtccacgccgccgtggctcttcagggcccggacagtggccacgatgaccacgcaggagggaacaaagccggccatacggcacttgatatccaggaacttctccgcacccaggtcggcgccgaagccggcttcggtgacggcgtaatcgcccagtttcaaagccatgcgggtagcggtgatgctgttgcagccgtgggcgatgttggcaaaggggccgccgtggataaaggcgggggtcttttccagagtctgcaccaggttgggcttgagggcgtctttcaacagagcggtcatggcaccttcgaccttcagatcatgggcggtgacagcctgtccggagtaggtgtagccgatgatgatccggcccagccgggctttcagatccagaatgtcagaggacaggcacagagcggccatcacttccgaggccacggtgatgtcatagccgtcttcacggggcatgccgttggctttgccgcccaggccgtcggtgatgaagcgaagctgccggtcgttcatatccacgcagcggcgccaggtgatccggcgggggtcgatctgcagggcattgccctggtaaatgtggttgtcgatcatagcggccagcaggttgttggccgcaccgatggcgtggaagtcgccggtgaagtggaggttgatgtcctccatgggcaccacctgagcataaccgccgccggcagcgccgcctttcacgccgaacacaggccccagagaaggctcacgcagggcgataaccacctttttgcccaggcgatgaagagcgtcgcccagaccaacggtggtagtggttttgccttcgccagccggggtggggttgatggcggtaaccaaaatcagcttgccattgggggtatctttatatttggtcttcagaaggttgtaatccaccttcgctttgtattttccgtaatactccagctcgtcttcggtcaggccgatggatgcggcgatctgcccgatgggagccatagtggtcgcttgtgcgatttcgatgtcgcttttgaaagccattgcagtttcctcctcaaaatcggatttgtgtcagttgccgcacaggatcggtgtcctgtgcaaattgcctatttccactttgtattatatactattttgggaagtgacggaacaaaaaactccgttaaaacgctcacaaatttgcttttttattttttgagaatggaacgacaggtaaaaattgagagatttgcataaaaaaggtttcttagtattatatgatttcacgaagaaaaacagagaattggctggggaaaagcccattatttttggaaaaaggcaaaatgaacaaaaatatcgaaaaaaattcggcgaatcggcaaatcgacgaaaaaataacggaaaagccgaaggaaaatatttaaaagccgtacaaactttagacataaatgccaggtatactaaaaccatcgacaggaaagccagccaaaggcttttacatagagactacggaaaggaaaggaggcgaggccgtgtagaagaacgagtccgaaatgaaacaccatccacaaagataattcctcttacaaacataaatcaattccattgcatgaaagcatggacagcgcagcctgattgcgctttataaattaaataccactgtctgttcgccgggtggacggaataccggcccggcgagcgagacagatcaaaaaaggaagcagtccggctgattgacagcgcgggcttttttgttgccgggccgggcggcgagccgccgcaggcatcctctccctggcttgctgggctgcgggcctgggtactccggctccgccggaaggaatcagggggaaacagcccggcgagcgagacagagcaaaaaagaagcagtccggctgattgacagcgcgggcttttttgttgccgggccgggcggcgagccgccgcaggcatcctctccctggcttgctgggctgcgggcctgggtactccggctccgccggaaggaatcagggtgaaacagtctggcgagcgagacagatcaaaaaaggaagcagtccggctggttgtcagcgcaggattttttgttgcctgtatgaaaaaaatgcttgcttgtgacccagcgtcatgatttatactgcatgcaggaggtggaagaatggaaatggaaaaagccattcccacagggtatatgacagtgggacaggtggcaagaaaaatggatgtgaccgtgcgcactttgcagcactatgaccgggaggggcttttgtcgcctaccgccatcagcgctggaggccgccggctttatacagacaaagacatcgtgctgctgcatcagatcctggccatgcggcatttggggttttccttaaaagatatcaaagatcgattgccgaaactggagacaccagagcaggtggcctgcgcgttggaggagcaagcgggggagattgagcaaaagatccgcagcctcggccaggcgcttcaggaaatccaggccctgcgccaggaagtgctgcaaatgggcaaagtggattttgaaaaatacgccgatattgtggtcaaccttcaaatgggaaatgagttttactggctcatcaagcattttgatcaggatacattggggcatatccgcaatcgttttgatcaaaaaagcggtctggaatttatccaaaccttccttaccctccaggaacgggcggtgaagctgggaaaacaaggggtcgcgccccaaagcccggaaggtcaggcttttgccagagaatattgggacatgatcacccgttttaccggtggggactggagccttttgcccaagctggaacagatggggcacctggaaggggccgacccggcctggaaggaacggcaggaacaggccaataaatttgtggagccggcactggaggcctatttttctgccttgggtgtggatccctttgcacacacaggagaaaaagcatgaaggccatccaagtggaaaagctgcggaaaagctatggggcccatgaagtgcttcgagggctggatctggcggtggagcagggggaagtttttgctctgctgggggtgaacggagccggaaaaaccacggctttggagtgcatccaaggtctgcgttcctatgagaaagggcaggtttcagtgaatgggcggatgggtgttcagctgcaatcggccagcctgccgttttccatccgggccatggaggccctttcattgtttgcccggtggaatggaacaagagtggagccgggactgctggaaacactgggcatccatgagctgggaaagcagctctatggcaaactgtctccaggacaaaaacaacgactgcatctggccttggcgctggtagggaacccggacattctttttctggatgaacccacagcagggctggatgtgcaggattgacggggagaatgggaagctgatgaaaaattgttggagaatatggagaagatgcgccagccgtggaatgtg

SEQ ID NO: 4356 - DNA, 8719 bp, Unknown
  16S sequences of unknown bacteria
cgattttatataattgcatttgctaatgcaattattcagtagacattaattattaacaaaaatttaatttttaaaatgtggtattgactttccctgattttcgattataatgtatattaaacaagagagaggaagaatattccggtactttaccggttgcctttttctcacccttaatattgtttggaggaatcagatatgaaaattaaacctttggccgataatgtcgtcataaaggcgaccgaagcggaagaaaccacaaaaagcggcattgttttaacatccgccgcaaaggaaaagccgcaggttgcggttgttgtagccgtaggcccgggcggcacggttgacggtaaagaagttaaaatgtccgttaaagagggcgataaggtaatcgccgctaaatactcgggcacggatattaaaattgacggcgaggaatatacaattctccaccagtcggatattttggcaatagttgaataatcggaggtaatttattatggctaaaaatattgttttcggcgaagaagcaagaaaatcgcttcaggcaggcgttgataaactggcagacgccgtaaaggtaaccttaggacctaagggcagaaatgttgttctcgataaaaaatacggctcgccacttatcactaacgacggtgtgactatagcaaaggaaatagagcttgacgacccgtttgagaatatgggtgcgcagcttgttaaggaagtttccgttaagactaacgacgctgcgggcgacggtaccaccaccgctaccgttttggcacaggctcttattaaagagggcatgaagaatgttgccgcgggcgctaacccgatggttgtaaagaagggcataaagaccgctgttgacaccgctatcgatacggttgtcaggaattccaagaaggtaagcggcaacgatgatatcgcgcgtgttgcaaccgtttcttcgggcgacgaggtcataggcaagcttattgccgaggctatgagcaaggttactgccgacggcgttatcaccgttgaagaatcaaagaccgccgaaacatactccgaggttgttgagggtatgcagttcgaccgcggatacatcaccccctatatggtgaccgattccgataagatggaggctgtgcttgacgacgctcttatccttataaccgataagaagatatccaacattcaggagattctgccgctgctcgagcagattgtccaggcgggcaagaagctgcttataatcgcagaggatattgagggcgaggctctttcaacccttatcgttaacaagctgcgcggcacatttacctgcgttgcggttaaggctccgggcttcggtgacagacgcaaggaaatgctccgcgatatagctattctcaccggcggtgaggttatctccgaggagctcggacttgagcttaaggacaccaccatggagcagctcggcaaggcgcgtcaggttaaggttacaaaggaaaacaccattattgttgacggtgcaggcgattctgccgcaattaaggacagagtagcccagataagaaatgagctggcagttaccacctctgatttcgataaggaaaagcttcaggaaagacttgccaagcttgcgggcggcgtagccgtaatcaaggtcggtgctgctaccgaaattgaaatgaaggataaaaagctccgcattgaggacgctctttcagccactaaggctgctgttgaagagggcattgttgcgggcggcggcgtagcgcttattaacgctattcctgatgttaaggcgctgcttgataccgtttccggtgatgaaaaaacaggcgttaatatcgtgcttaaggctcttgaggctccgattaagcagattgcgttcaacgcaggtcttgaaggctctgtaattatagataagatcgtaaacagcggcaaggtgaactacggctttgacgcttataacgagacctataccgatatgatagaagcgggcattgttgacccgaccaaggttacacgctctgctcttgaaaacgcggcttccgttgcggcaatggttcttactaccgagagccttgttgccgataagaaggaggatgcagccgctgcaaacgcagccgcagccgctgccgcacagaccggcggaatgtattaatccgcagcacggttaaggcaaagaataatagtttagagcaaagaaaaaatccttcccgatattcggggaggattttttgcgtatatgtattttcaatatctgcaagcggtcaaggctttatattaatctttagtctctgacaatccctcagccgctgaccgcggcagctccctttacacaagggagccaaggtgtgtgcaaaaaatcgcctccccggcgtttggggaggtgtcatgcgcagctatagcggaggggttgttagaggcttgaattaatatattaaaactatgtttttcatattcaacatttaatttgcaaatagatttcggttgctgacaatccctcagccgctgaccgcggcagctccctttacacaagggagcctttggtttatattgctaagctgaaaattttcgaagcgagtatttgattggatatatcgcttttaaatataatttctatgcccgtcacatacgaagaatattccttgtataaggcaaactgtttcctaaagaagtcggaattatcgttgatatgcttttgaaatttttcttttgggcttttaatgtcgcaaggactgaattgcaccctgtatatgtaggacaatctttttttaataccgtcgccgccgagctcaaaaattaatcagctgtgaacggtttattataattataggctgaactttttataaccgagtgcccttgaaagggagaggggtgcagatttgccgcaggaggggcagcgctgcaattcgttgctgtattcgtgattgcagcttttacaggttatccatttaacggagctgtggattgccataagaaccgcacccttttataaatgaatttttattaaagaccgagcattttttcgattgcgtcgccgaagacctttgccatgcatgcaaagccgaggtcgttcgggtggcagccgtctaccgtgcagctgtccgccggggcggagagtgtaagcgcctttgaaaagacggtcgcaccgtcaatgaaaattacatttcggtcgccgcgctttacggcgttttcataggtctcgtacactaccgctcggtgcgcagcattgctttcttcggctgcgggcgaacgcggtatatcggtttttgtcgccatgataacaggcagatcgggattcttttcgcgaatgttcaaaaagaagctttcatgatgcgcctttaaatgctcggcgttcgggctgttgtggtcaaaatcaaggaagaaaagcgacatgggaagagctgctatgtaatccgccatggttttttcgccgagtgcgctgcctgaaaagccgaaattaaaataatcaatattaaagcggcgggaaataagcgcctggtaggaattgccggggcgtgaagcacagcctccctgcgttatcgatgagccgtagaaaactatgggctttttatccgtatagccgtcgctgcatgacaaaagagcgccctcctctaagcctatgcgaacagttttaacgctgttgtaaagcggaaagtttattgttatatcccgcacggagttatcataaagcgtgatttccgatttaaaggaatccttgcagtcgatcggcggaataaaggagccggcatatgagtaagcgccgcccgcaaaaatatacatatcaaagcccgtagagcctgtaagcggcatatgcggcatgggggagattccgtcatattcaacctgcagcacaatacgccttgaggttgttttaaaacgcactcttccgccggcggtattgcggcaaagccccgtgacgcccgggttcaccgtttccgctatttcaagcggcagtcggaaaaacggggttgtagggagcagtccgtgaagtgaaaagggggaggataagcaattgcggaaaattaatccgtctgttgcggtgacttcgtttacggcaaggtttttgtcaatttctgaaatattgttcatgacttatgtcctttcgtaatcagcgcgattttttaccctttgctgaagcggaatattcataatttctatagtagcttttgtaatcctttttttgcttacccgtaatatcgttaagaattacgccgaggatcttgcagccgctcttatcaagctgatccttgacccggagggattcggaataggttataacgccgggggtaataacgattattgttccgtcgcaggcgggtgccattaccgcagcgtctataaccgagccgagcgggggagagtcaattatcacataatcatagatgccgcgcatgctttgaagcaacgatgaaaattgtacgctgccgagcagctcaacgggattcggcgggaaatgaccgctgaaaataacatcaaaatcggggtcctgcgtgttgtaaatgacctcgttcaattcagcctgacccgaaagaaactccgaaagacccatatagctatgctgctttgaattgcgcggttgaagcatggatttgcgcatatccgcatcgataaacagggtctttttattcgcttccgcgagattcttcgcaagctcgggcgaaattgtgcttttgccttcattttcacgggagcttgtgagcataatgaccttcatatcccttccacagaaaaagaggttggtacgaagtgctttgaaattttcctttgtgaggtagttgctcgcggaggaggtattgaaattgaccctgcctgcgcccaatgttcctatatttgaaatcaaatcattctgtgttgtttcttctacaaacatttatattctccatttcgacgaggtttgtttagaaagttttattttgaacgccgccttgtgctgttgcagggaatatttccgagaacggtgagccctaagcatttttcaacatcggcagcgtccctaattttatcgttaaaataaaacgcaactaaaacgattgcggcatatgtgaagcaggaaagtaaaaatgccaccgcaatatttattgttttgttcggaaccgacggtgaggtcgctaccgtaccctcgcggattgtggtgacgcgatcgacccccaaaagctcggtaatcttttcctgcgcaacggtgcagacagtatcgacgattatctttgaatcattcgcactggcggttctgacgctgatttctataaagcgggtattctccggattatttacggtaatggcgttcttcagttcgcttaccgaatactttttcccgagcttatctgaaacatcacttaaaaccgcggcgtccgcaatcaggtttgtgcaatctcttgcaagataggtggaagccgatatctccgcagaggttaaggtttctttatttattatgtagatctttcccgcagaatcgtaaagcggggttgccaataagtaagagtaaattgccgccgcgccgacaaacaaaaccgcgagagcggcaaaaattttccatttggtcaaaacagaatgaaacagatcctttaaattaatattattatttttataactatccgacattttaacactccaaaattgctgtattgcggctgccaggcaaaaacgatatccgccgcagccgaaaaattacaaacatattttaacatatcctgtctgttatttcaagccctctgcgcattttttatcggaaaatgcaggaaaccgtctgatttgcgttcagtcgtttctcgaacatttctccgcatctatcgcaagcacaagcataagcgcgcagagcgcgtcgctcgtatcagcgacttctataacatatgtatctgtccagcggaaaagctcctttgaaacggttgccacaaccgagccgccggcaccatataccgtgtaatcccattccgggaagctgccgtctatatgccagccgttgaaatcgatattaaaggacggcctgaaaaaggtgaattcttttttgatgcagcctatatagctgctgccgatataaagctcgaatttcggcaaaaaggtgaatactctttccttaaccgtaccaagctcctcgccggaggcgccgaatattttaaggcaatgaccccacgaaagctgaccctttacggtataaagcgtgtttccggactcatcgtaaatatcatagctgtcaaaccaggaaaaaaggcgctgcttaaaaagcattttcataaaaacacctactcaatatttatcggtatgccgttgacctcaatttcctcgtcggcgcggatgagtatgtacttaacaccgtcgataacctgcgtcttaacaagctcgccgcgttccggatttatttttatgcttatatccgcatttttaagctcaaggcgcttcgtttcaacaagattctgcggatcaagccgcgttttttcgccgaagctttcgttaaagcctttcctgaagccctctattttttcatctttgacatcggatgaggaaagaatatcgcagatatcatcgcaggataccgtcagccgctcacgctcgcggctttccttgtgctctgtaatcatatcgccgatttcatcgcggaaatttttgattatttcgagattactttcgtccgcggtggcttcctttaaaagcgagctgaaaacctcatgctgctctgcggcgggcatgggcggctctgccttgaaaagcctgtcgataatttcggaattatcgcttgaagcgtccttggtataaaaaagcgtattgtagatattcgccgctcggtcgtcaaatgagggaaacataaatccgatcagaggagccgacacgaccgaatttgcaacaatatttttaaatgtattttcaaatgcggtaaagcttaactgcggctttgaggttttaacggggaagattccgcatacaaaataattgaacagctcggtggaatcctcgtccttttttccgtcctcgcggtatgtgaaaacatcataatgatccacagccgaaagaatcagatagctgccctctactctcacggtttcggttatatcggcgcagagactcttcagtgccgcctcatcgtcaagtgaggaatcgcgcagtcttaaaaggcgcttgtgttcttctccgtgaagcacctgctcgtttgtaaattcgatatctataagatttttactcggtgtgccggaaagcagctttttaagcaccgaaagcaccgcctcggtttcatcctgcgtaagggttgccagcggaagagtgaattccgcgattatttcgcggcggtcgtttacaaagctgccgtgaatgctcgtaatgttggttttttgcgggttaaagcgccgtctgatttcggcaatttctttttcgttcaattgtctgcctcatttcaaaataataggtctgttaattatatcaaacatacagcctgttttcaagacaaaaaagaaaaattatcaccctgaagaatagagatgctctatcgataacaataaagcttttgattttttgtttaatatttttgttgaaataatcagaaaattgtgtataatcattttaggtggaggagagtattatgatgaaaaggatcataattatttcggttgcggctttggtttcggtatcgttatcgctcggggcggtatttcttttgccgaaatttttgggaagcgtttcagaaatcggcgtaaaaaagaacgatacggtgtccggcggtcgggtaagccgggcggacagcacagatgccgaaggtgccgcggaggaaagcgccggtgtgccgtcgctttcacaggcacaacagtctcgggtcacgaagaatgaagaaccgtcgatatcatcgaaggcgccgcagcaaagcagctctgcctcaaagtccgtacgtaaagaaaatgtaacaaagctgtttaagccggcaaaggaagcggtatgcagcagcgctgaccttacggaaaagcatttttatgacagcaaaagcggcaagacactgccgtacagaatttatataccgaaaaatctgcaaaaggataagaaaacacctattctccttcttttgcacggtgccggggaacgcggggaggataacctcacgcagattcgcaatttcaaaggcatgttcaacgctgcgggcgatattatatcgggcagcataatattagcaccgcaatgtccgagcggcggccggtggaacctcgatgaggatggcagcggtgatgaaaagggctggctcggcgctgcatggcggcttttggaaagtgttaaaagcgaatacggcggagatcccgacagaatatatataacagggctttcaatgggcggaatagccacatgggcgcttattgacagatatcccgagcaatttgcggcggcagttccggtgtgcggtagaggcaactcctattctgcgtataatctgacaggtatcccgataaaaatataccatgggacggctgataccacgataggctgcggcgcctcggatgagatgtataacgcgattttaagtgcgggcgggaaaatggtcgattacaaaagactttacggcgttggtcataacgcatgggacacggcatattccgaccgtgatatgttctgctggatgttttcgcagaccagacccaaagcccgcacgggcgacgacagctatacctataaggaaaaaataaagcttgtttctccgcggaataccgaaattttcggcacttcggaaatttttgtgtaaaaaggaatccaaacagataagaaaatagat

SEQ ID NO: 4357 - DNA, 4380 bp, Unknown
  16S sequences of unknown bacteria
ggcctcgtccttgacggcgaagcgcagccgccgcttcaaaaggaccccttgagcttgcaacaaaccgtgagcttgtggttggaatgaatgcctttttcaaaaaaatcggcattgaaaaaccgatttttatcggcgcaagcgacggcggtatggtagctcagatatatgttcaaaactatccccgcgacgtcggcggaatgattttgatttccaccggcggtatggatgaaaacacccttaagtcactcaaaagaaaataccgtcttgccccggtcatgctttggtatatgaaacattgcaactatgaaaagctgaaaccgaggctcattaagctcggcatgggtcacattcgcaacgaaagccccgaggaaatcgcctatgcgcgggatatgtttgaaacgatattcaaggactataaacagcaaaaggacgtgcatatttccggacttctcgccgaccttatgaaccaaacgcccgttacggcggcggattttgcggcacttaaaggaaaaattcttcttatcctgcccgacagggatttcttttctgaaaaaatgcagcaggatcttatcaagcttatgcacgaccctgaaatttcttacgtttcgggagggcatttgtcgacggttctcaagacagacgattacatcggcgtcattcgcggctttttaaacaaacggtgagagtatgaaaaaattcaactattgcccaaaccacaaggcggatgaagcatatatggcaaagatgtgtcacaagggctttgcggcaaaaagccttgtggaaggcgtttggacttttgagccctgcgagccggacgaatatacctttcgcgtgtgctacctgcgcggaaaaagcgacgcggaaagcgatttggccgcaaagcaaatcgaatttgtgtcccgatactccttttgggctattttccgcagcaaacgcgattttcgactttataccgaggagcaggagcttgaaatctgccgtgcaatacgccgcccgatggttttcggaagcttattgtgtccgattgtctttgggctccttgtgctgtcggcggcaaagctgtgcgaatggctctttattcccgccgccgtctttgcggcatacggagcaatgtgcatttttctttgcacctcatatacccgtttaatcaaaaaactcacagacaaaagaaaggaaggataaaatgaaaaacaacatatccgaaatgcagaaaaaaatcaaggtcggaacccacggagaggactacggcagctggatgtcaaatcccgtgttctacgctttcggcgcaggtatactgcttgctgcggcgctgaccgtgctgtcctttgccgtgtttaaaatcaccgtgctcggaattattttcgccgtcgccgttgccgttttgcttgtcatgaccggctggatggcatggattcgccgtcagtatgccttcggaaagggcggtatgatggaacaggttcacaaaaccattctcagcaatcttgattttgacggacaaggaaagctgttggaggtcggctgcggctcgggcgcaatgtccgtgcgcgcagcactcacctggccgaacgcacaaatcacgggactcgactattggggcgcaatgtataattacagcaaggccgtctgcgaaaagaacgccgagtcggaaggggtcggcagccgctgcacctttgttcacggcgacgcaaacaagcttgattttcccgacgaaagctttgacgcggttatcagcaattatgtttatcataatattatgggagcaaacaaacaggatctgctgcttgagagcctgcgcgtactgaaaaaaggcggcgtgttcctgctgcacgacaacatgaaaccggccatgtacggtgacatgaacgcctttgcggaaaagctccgcggcatgggattttccgacgttcgatatgtagaaacggccgaaccgattttcggttcaaaaaagcgcgccgcagcgatgatgctcggcgattcggcaatgatcgtcggcaaaaaataaatcggaaaatcgaaagttattaaatcccgttgcattttgcggcggcaggcattataatatgcccatggacgccgtgaggagtgcaagtgcgcttttgcctgttgctttccgtaagaaaccgacaggcatttcggcagacaaggcatattacgggataaagaggttattcatatgagtgaaacaaaagacaccgcagccctccccgcctgccccgttgaaacaacactgacacttataggcgacaaatggaaggtgctgattttgcgtgaccttctgcccggcaaaaaaagattcggagaattaaaaaagtctgtgggaaatgtttcgcaaaaggtgctgacggctcagctgcgcgacatggaaaaaagcggactcgttcaccgagaggtctttgccgaggtgccgccgagggtggaatactcgctgaccgagcttggacaaagtctccgccccattcttgacgccatgcttttgtggggaaaagaatataaaagcagccatgaaaaggcatgaaacgtaaaaccgcatcggccttgtgcatcctcttttgcttgacagaggcttttataaattatataattagatgcgataagcgatttttccaaaggaggcatataggtgagaacctttaaaagagcgattttcggaggatataaaagagccgccgttgacgatgaaatgcgggaattaaacggccgcatagaagaacttgaaagagaaaaggaaaaaagcgaattaaaggccgagcttgcacaggaaaaaatcggacagcttgaaaatcgggtggcgatcgttgaacgcagcgtcgtccgtctcaagaccgaaaacgattcccttgcggccgaaaacgaggccctgacgcaaaaaaacggcgaaaccgaagagctttacggcgacattgccaaaatctacggcagagcatacggcgcaggcagagaaatcgtgtgcgattccaaggaaaccgccgaaaaaatgctcggcgatcttgaccgtcggtttgaccttgccctgtcctcctccaaggaaattctcgcaagatatgaagaaatcgaaagaaacataaatctttcctttgcggctttgcaaaacgacataagcgccgttgcccattcggcaaaaacggccatgataaacgcaaaaagcttttgcggcatttatgaagacatgaaacgcggtgtgcaagaggtacgccttgacggcgaaagacttttgtgcgaatatgaaaaacagtcgtcggaatttgcggccggcagcaaggagactttctcgggaaagctcccgacagaagatccctcctccgaggaaggcctttcggacagcattgtggcgatggtctcgggagaggaacaaaaaatcatttcccctgccgcagagcagccgaccgaaaaaaaagccgcaccacgcgtaagaccgtcttccccttccgacagggtcagagtctcaaaaggcggttcaaaagccgcagtacaaagggacgtcggaaattatgggagataccgagcaaaaaaggatttttcctctaagacggaagcaaaaaaagaaaagattaaataagatttttaaacccgaaggcaacggtatttcgctgctttcgggtttttatttttgtttatggagaataaattgtaatttctttaaattttatctcattttataccaaaattataccgaaaaacattgcaaaaaaagtaaaagtatgctaatataacatagattatggcactaaaattttaaagggcgtggatcaatgaccggaaacaactattttttaaacattctttcccgttattgcgatagtctttgggagtataacatcgccgacgaaagcatattcgtccactttgacagggcggcctcctcccttgaagggcaggcatattcggtggatgagcttgtgagaatatttaaagacgaatgtaagtttgacgcaagcgaatataactggacccactatctcaacaaaagctatctcggcgaatttttgaaaagcggaaagaattccgaacattttcagctcagattcaagataaacggctccgagcttatgtggtacaacataaccgttgagcgcgttgattccaatcggctttacatttccggcaaaaacatctacaacgaaataaaattctcctccctttataaatcgatacagaattcctttgacaacattctgaacatcgacagcgaaaccggcacctatataatagttttttccagccgcatgaaaaaaccgcccgtcgaggaatttgactataactgtcagatggagcgtttcttttcaaaacacctcgccatggaggactcgaaatacattgtcgaccgtatgcgccttgaaaatgttgtgagtgccctcgagcatcaggacgagtataaagtgt

SEQ ID NO: 4358 - DNA, 8311 bp, Unknown
  16S sequences of unknown bacteria
cctgccgcaagagcagcgcagaatacaggccggcatattccgccggcgatatgcttcgctctccgccctctttcgcggtgcggaacgtgacgagcagcgggcatcgcacacgctggcgaagaagatctgccgccgcgcagaccgtgtcgatcccgccttcatcaaagcagtccagccgccattcgagcatatccgcctgctgcgccgccacttccacgtcaaggcatagctgactcgtccgtgccgaagtcagcggaatgcagatcttcggcatgccctctccgatgcgaaggccgcggacatttaccggttgcatacgcatccctcactttctctctcacctgtccggaagtattgtaacacttttcagccgtattgaaaacattttgaaaaaaatgcagcaaatctcttgcattttcatggattacgctgtatcctagtaccatcaggagtgattgaaatgacgataacggcagcgaccatctttgattattttaccttttgacagcctcggaatctccaagttcgcatcatgaatacttggcttttttccgaggcattttcaaagcatccgacttccagcgctgatgcttttttttgttgccgttcctcactgctggtgaaactgaaaggaacttgattatgaaaacgtatggtttgatcggagaacatctctcccacagcttttctaaggagatccatgaatcgatcgcggattaccgctatgatctgatcccgctggataaggaagccttttgttcctttatggaagatcgtgactttgcggctgtcaatgtcacgatcccatataagaaagcggtcatcccctatctggatgaactggacgaggcagcccaggcgatcggggcggtcaacacggtggtcaaccgcgatggaaagctgtatggctacaacacagattacaccggtttccaatatatggtcagaaaacacggtgtgcgcatgaatggaaaaaaggtgctgatcatcggcaacggcggggcttccgcagcggtgcaggcggtcgtccgtcacgaaggcgccgcacagatggtcatcgtcgatatcgttgaaggtaacggtgcgatcagctatgaggaatgttaccgcagccacctggacgcgcaggtcatcatcaacacttccccggtcggcatgtatccccacggcgatgccgccccggtagacctggagcgctttgcccgatgtgaagcggtcatggatgtcatctataacccgctgatgaccaggttatgccagcaggcccgcaagcgagggctcgtgcatgtcaacggcctggaaatgctggtggcccaggcaaagcaggccgtggagcactttttggacaagccggtgaacgatgaggggatcgatgagatctatcgccggctgattgccgagcgctgcaacatcgtgctcatcggcatgccgagcgctggaaagacgagcatcgcctctctgacggctgcgcgatgcggaaaacgctacatcgatatggatgatgtcatcgtcgagacggcgggcagatccatcccggagatctttgccgaagagggcgaagaaggcttccgccagcgtgagcgcgacgcggccgcccagctgggcacggccaacggaacgatcatcagctgcggaggcggcgtgatcaagaatgaggcgaacatggatgcgctgcggcaaaacggcgtggtcttcttcatcgaccgcgacctctctcagctcatcagcacggacagcaaccgtccgctctccagcagcaaagaagcgctcgcagagatgtatgcgcagcgcatcggcctttaccgccgatacgccgatgtgatcgtggacaacaacggcgatatcgagaccgccgcagaagcgatcgctgcccagtatgcacaggccatccaccgggcattgtcagaataaagaaagaataagaagaaaggaagataagatatgatcatcaccatcaaaaagaacgccgaccaaagagaggtcgacacgctcatctccagcctggaggcaaaaggcgtcaaggctgtcgaaatcaaaggttcggaattcaatgtctatggcttgaccggagatacatccatcatcgacgaaaaatccatcaaggcatatcactgcgtggaaaacgtcgtccgcgtcgctgccaaatataagctggccaaccgcatgttccatccggaagatacggtgatcgatgtcaacggcatccgcatcggcggtcaggagaacatcgtcgtgatcggcggcccatgcgcggtcgagaaccatgacatgatcgttcgcctggcacaggaagtaaaggatgccggcgccaagatgctgcgcggcggcgcatacaaaccgcggacgagcccgtactccttccagggcatgcgcactgagggcatcctggccatggtcgacgcaagggaaaagagcgggctgccgatcgtgaccgagctgatgggcgaagcgcagatcgaggaattcgaacagtatgtggacatcatccagatcggcgcgcggaacatgcagaacttcgagctgctcaaggaagtcggaaagcgcaccaccaagccgatcctgctcaagcgcggcttctgcaacacgatcgacgaatggatcatgagcgcggagtacatcatggccaacggcaacccgaacgtcatcttctgtgagcgcgggatccgcacgttcgagacagagacccgcaacacgctcgatctcagcgtcatcccgatcatcaaggaaaagacgcatctgccgatcatcatcgacccttctcatgcgaccggagactggaagctggtcgaatccgcttccctggcagccatcgccgccggcgcggacggactgatcatcgaggtgcatgataatccggaatgtgcgctgagcgacggcgcacagtgcctgaagccaaagaaattcaagcagctgatcgacaaggcgagacagattgccaacgtcctcggccgcgatatctaaaaaagagcgtattgcctagttcctctgggacatggcgatacgctctttataatccggcatgtatttctcgatgagcgcataaaacgcacgggaatgattcggatgcacgaaatgggcaaattcatgcaggatgacatattcgatgaattccaccggatagtggatgagccgcttgttcagggtgatgaccttctgcgctggcttgcagtttccccactgcgatttcatcgtccgcagccggatcgtcggcatctccagatgatattccttcatccgccggcaggtcagctgcgcgatatcgctgaagatgtcccggcacagctgatcgaggtatttcgtgatgagcgtctcacactgctcgatgcgctgatattgcacataaaaagtatccgcactgtaatagaccagcgggtgtgccgccttgactctgcggatcttcaatgtattccccagcaggacgatccggtcttcttcgcgcatctcctgctcgctgtgcacatgcttcagccgttcgcggatccattccgcgcggctgtcgacaaattcatcgatctgcggcaagggaacgaaaggattggcgctgaccctcacggcgccctcgcgcgtgatcctcaagttgatgtttttgacctgtttgatctcaagggtgtatgtaatcttgttcctgctgctgataagaacctttgcttccctgaccatggtttcgttcaactccctgtgtttgtgtttcattttcgtgacctttattttaacataaagtttacaaaaacaaaacctgcgttttacaaaaaaacaccttgctgtcatgaacgatgcagatatccgctccatgtgttaaaatgattgcggtgagcatagatgaaaaagaacaatcctttcccttattctgatgacaataagcgttatcatacgtggaaccattacctgcgtcatcgatttcatcgcaaggtggcgaaagtgccgctggatgcgggctttacctgtcctaaccgcgatgggacaaagagcactggcggctgtctgttctgtacgccgcatggcagcggggactgtgtcgtcgctgcgccatcgctgatggaacagtatgagcgaggcctgcagacgatgcgcagaaaatggccggactgcgcttccatcgcgtattttcaggcctataccaacacatacggcccgctctccaggatccgcgagtgcatcgaaccatttctgcagagagaagaggtcaaggccatcgcgctggcgacacgcgccgattgcctggatgacgaaaaggtcgcctatcttcagtcactgagcgatcagcgggagatctgggtcgaactgggcctgcaaagcgtgcatgatcagacggccgaggcgatgaaccgcgcgcattcctatgcggaattcgaggactgtgtccggcggctgagcaagagcgatcttcggatctgtgtgcatctgatcgattccttgcctggtgagagccaggagatgatgatcgaatctgcccggcgcatcgctcagctgccgatacatgccgtcaagatccacatgctgcatctgatgcgcggcacccggctggcccagcttcatgagcagcatccgctgcgcttgcagacgatggaggaatatgtggacaccgtcatccgccagctggaggtgcttcccgcagagatgatcatccagcggctgaccggagacgggctcgctgatgatctgatcgcgccgcagtggacgagaaagaaagtgtgtgtccttaacgagatcgacaaagaaatggccagacgggacacatggcagtcgcgaaaataccgatcgcgcatagattaagacaggtgatcggttgaacaaattagctgtcatgtgcaggctggagacgctggagcagaacgagcgctggttcttgaaccgggcgctgtgtgatgcgctcctccccttgcctatcgtcctgatcccgctcgtcgagtgcaccaaggtgcaggagatcgtcccgctgtgcagcggcttgctgctgccaggaggaaacgatgcgctcccctgctattacggtgaacagacggacggattctctcaatattatgacgcgcccatggacctgtgggagctcaccgtgctggatgccttcgtcaaggccaaaaagccggtgctgggcatctgccggggcatgcagatgatccagctgtatcatggaggcgcgctggaagcacagtttgatgtcctgcatcaccagcaggaccatctgcacccgatccatctttccgcagacagcgcgctgcgcagactgatgcaggatggtcagctggtgaacagcttccatcatcagcgcatcgtcaggctgcatccctgcctgcgcgtagatgcggtgacagcggatgggagcatcgaggcgttccatcatgaatcactgcctgtctatggggtgcagtggcatcccgaacggatgcgcgatgaccgcatcctcccctattttgtctcgctgctctccgcggcataataacgccccttgatccacttgatcatcccccagatgaggatgatcgcgcagagcaggttgccatagacctgaaaatcgatgaggtcggcggcgcggctgatggaatacccgatcagcaagctgcgcagaaagcgcgatatcccatcgctcagggtaaatgccaggaagttcatccgggtgaatccggccagatacggcaggatgaaatccggaataggggtgattccgccgatgaagacggccaggatgccatagcgctgcatgagccggcatcctttttccatctgctgcggggtgatgagcgatcgagcgatccgtccagcgagacgccgcgcgagcagatagccgatcaatccgcccgcacatgtgcccacagcgccctccagcgcatagcgaagatagcttgccggctcttgtacgcagagcgggatgagcagcacttcaagcgagggcagcggcaagaatgccttgagcatcgcataaagcatgaagccaatgtctttccaggccagcagcagatccatccctcttccctcctgacactgtatatgcgggagggcgtttatttataccggcgcgcgtagatcagggtcagcgccagcgggatcaggcagaaggcggcgatgccatacagcgtgacatcgtggcccagatgttccaccagcggcgcgcagatcagcggggtgagcaatgcgctgatgccgacgaagacggccatggcgaacatctgtgcgctgccggcgacggcttccgcgctcacttccttgatcaaaaacttgctgctcaacaggaccatcggcatcgtgaccaactgcagcgatgcgcacgccacgatccacagcggctcctgcgcaaaggcatacagcgcgaatttcaccgcatacatcaggatgccgaagcccaagagcgtcagcggcttcaccttggacagcagccatccgcccgctaagaacagcggaaattcacagaacgactggatgctccatttccacccgacatccgctgtgcttccgccgatctgcagcagcttgtcgaccgtatactgatccgcggtgcctgccatgtaaatgagcagaaagatcagcacgagcagcagataacggcggttggaaagcaagtccttgagatcatccttcaagttggaagacttctctttttttacgtccttgcagcgtcccaaaaggacgaggatgagcgcagaaagggcgagaaatgcccacatgaggctgcggtaagacatcatctgggcgatatatccggcgatcgggctgccggcggtcagccccagcgcgccagctgcgcgcagccgcccataatgatcggcatctgccaacagcatccatgtctcattcagcccgctcaccaccttgacgaggccgctgctcaaggcgatgctgaacagatgataccagaacagctgatcctcgcggatgagcatgaggcaggtccctgccacgaacgagatatacgcgatcagaaagaaccgcttcatcgaatgataacgatcgcacagatatccgaagagaaactgccctatgatcgcgatgagcgcattggcggccaggatcacgctttgctgcatgagcgaatagcccaccgccttcatatacgggatcatcacggtattcaccatggccaaggccgcaaagacgagaaaattacagatatagtacagatgacgctgtcgtttggacataccatcactcccggcttatagtatggaccgttttctcccggataaaactatggtaaaataaacgggaggtgaacatcagatggtatatcagacagaacattttgagaaccgcgccggcggaaagggatggatccacatcgaacacttgcttccagaagaagaaaaaggaatggtcaagatgtatgcgcgagtgaccatcgatccgcatgcgagcatcggctttcaccggcatgaaggagacggcgaaagctattatatcgtcagcggaaagggcgcatacaacgacaatggacagatctatgaggtgcatgccgcggacagtacatggacgccttccggatcatcacatggcatcgagaacattgccgatgagcccctcgtcctgatcgccttggtcatccgcaaaccgtgagcgatcatcagcggcagaccaaaaaaagaccagcttttgtgtgactgaacacaaatcagctggtctttttttatctgaatgatcatatcttcgcatctcagcggatcgcaaaggcgtcctgcagccggcgcagccagcgttcatccggcatagcggcggcgtgcacctctgccagcgcttctccgctgcggaccatatcgcctttcttatgcttcaggacgatcccgacgcgcggatcgatgtgtgcctgcagatcccggcggcctgcgccaagctccatcgccagcgtaccgacagccagcgcatgcacttgctggatcgtgccgctcttgcggctgtacagcggacagatgcagggggcctgtgcaaagcgttgcggctcatcgatgaagcggacatctccgccttgcgcgatcaccatttcacggaaacggcgcaggccgctgccatcgcggatcgcgctgcggatcatcgctctgccgctttgctcgtctgcggcgatatgtgcctgcatgagcatgatcgcgccttcttcctcacacagctcttgcagatcctgcggaccttctccccgcagcgtcatgatcgcttctttcacttccaagatattgccgatggcatttcccagcggatcgttcatgtcgctaagcacggtctggacatcacggccgaagtgtcttccgatttccttcatgcaggcgcacagctcttctgcctgcgccctttcgcgcatgaacgcgccttctccgtatttgacatcgagcag

SEQ ID NO: 4359 - DNA, 4128 bp, Unknown
  16S sequences of unknown bacteria
taccaggcaaacttgcgcgtgcatccgtgccctggtagccggtgggcagaccgcttgccgcttcgctgtagcttacgcactgccggagtgacttggggatggcgtagttggaagcctttggcatcgaacggtggtcacgctgcgcgcgggcgcttgcagcggtgtgtgttcgggcgcgaagtgcggttgggtgcttggcgcggcgtgcaaggcaaaggaactcttgggtgcgtgcgtttactcagaatgctcacaaaaaatttcttctcctcttcatcatcccatcgcccctgcgcttgcgcgggggcttctcttatctatcctaaactagactaaactttacttatcttacctatcctatactgtgtaaacagagcaaccccagaaaaccgcatgatcatgcgattttttcccttccatttttgcaatccgttgcaaacggatgtcaatcggttgcaatcggatgcgtttcgcgtgcaattggatgcgtttcggcgtcacttcgttgcgtcccgcatgcaattggatgcgcggcggatgcgatggggaatttgcagaacatagcccagaccagtttcccggtccgggctatgttctattcttttttccagtgcttcaggttgggcacgacggcttccatatgggcgcggacctgttcggggggccattgctcgtttgccatgtgggcgacgcagaagtcgatcagctgcgcagggctggtgtaacggaattcgccgccgtcgtagcaccacttgcagtagtcctcgttgaacgtgccgtccggctccttgctggtggtggcgtcctccagcggcatgccgcagcattggcagaccaactgcctgggcgcgcccaggagcgtattgatcgagacgttaaagagctgagagagcagcttcagggtctcgacattcggggtcgtctcgcccgtttcccagcgagagatggcctgccttgtcacaaagacccgctccgccagctcctcctgtgacaggccgtgcttcgtccgcaaaccgtgtaaaatctctttggtatccatgcagcgcacctccttgccgtcactgtatcacaaaacggcccggcagacaagcaacttgcggttgcatcgccgtatttttccgtttctcaggacggctcctgcgcagcgtcgggctgggggatctcgttgagttggcggttgagggccagaagctcgtcttttgtgacggtgacgcccatggtgcccagcatgctgcacaggcgcagcagcgtgaagccgggcagcagggccgtcatggcgtcgctggcgtcgaagcccgcaggcccggcagcgtggtcgatgcgcgcccggagctgaccaaggactcggcggcccgccggcgtttccaggatgcggctgatcttatcgtgcaggctcaagcggcccgccggggcggtgatctcgaaccagttgacgatgccgttctcccgcagccggtagtgctccgggaattctgccacccggcgcaggcggctctcatcgcggcagctgcccgccgtggcaatcagaacggtctccccctcgttgggaacatcaaaatagaaaaagtgggtctcagaccgctgcagctgcagcagctgaccgttggcatagagcgaaacggcgggctggttagaatagaccgtcacccgggtcaccgcctcggcccggtccggataacgcttgccgcacagatggacgaagggctcgtcggagagccaggctttataggcatagaacgcgtctttcttatagcaccggtcgaatgtcacaaggcccttgtgattctgcccgttctcgccgccctcgctccgggcgtcggcgccgaagtcgaacatattccagacataggtgcaccagagatagggccgggagaagaactgcaggatgagcgattcatggtaccgggcttggtactcctccgtgtaatccccctgaaccgggtcggatgcgtgccagtccagcccctcgcagccgtattcgctgcagccgatgggcgtttggggatagcgggcgtggaagcggtcgaaccaggggccgttctgctccggctcgccgccgtaccagccgaagtagtggttataggccaccaggtccggcaggtggacatagggcgcgtccggcgggcaggtgctcaggcaggcgacggcggtcagccgcgtcgggtccagccggtgggccagatcgttgagcaggacgtgggtgtcgtagacatcgccggggtctccgccgatggtgatctcgttggacaggccccagacggcgatggacgggtgatggcggctctggatgataagctcccgcagctgctgggcggcgttttcccgggccgccgggctgtggcgggagatataggggatctccgcccagacaaccagaccgcgccggtcgcacaggtcgtagaaatactggtcgtgctggtaatgggccaggcggacgctcgtcgcgcccagctcacagataaggtccatatcctgccggtggtgctccggcagcagggcgttgccccggccccagcggtcctggtggcgggagacgccccgcaggggatagggctttccgttgagcaaaaacccccgctcggggtcgacggcgatggtccggcagccaaagggcaggctgacctggtccaggcatttgccgccacagtgcagcgtggcctcggcccggtagcaataggggtctgccttgccctgccacagatgcaccgggtccagggtcagtgtcgctgtgcgcgcgctgccggttgtctccgccgcgatggccccggcagcgtcatagagccggaacgtaatctcgcaatcgtcgtgcctgccggtaacggcggcctccagatggacgcgggcggtatcgccctgcacctccggtgtgatgaccaggccggggccgccgtgatcatctagggtaaagtggaccgggtcgacgcagagcagctggaccgcccggtacagtccgccgtagaacgtgaaatcggccatctgggggtaaacggcgtcgctatcaccgttgtcgacggcgatgaccaggagattctccgccgccagggcgggcgtcagctcgacgcgccaggtgctgtagccgccgtgatggcagcccaggcaccggccattcagataggcggtcgccgtggcgttggccccctgcagctccaggtagcagcggcaggcgtccggcaggcttgcacgggggaaggtcttggcgtagtagccggtgccccggtcgtagtcgttgccgccgtcctggccgtccagagcattccaggtgtggggcaggtcgaccagaggccaggtctggggcatctgcgtcggcggtacgtccgcctgccgggtaaaagcccagcctttgttcaggggaatgatcttgcgcacggggattcctccttaaaaagtgtaaagtaagatagcgcgccttacgcgtcgccgtgcttttcccgcagggcggcgacattggcttccacctgcgccttgcgcagcggataccagaatgccagaacgagcgagagggcgagaaagccgaaaaacggcaccagtgtcgagatattgaacatgcccgccaggacctgggacggctgcggctgcccggcctgcgcggcggcggtgctgtagccaatgcgctgcagcagccagccggagagcccggcggccagggattggccgaccttccgggcgaaggagtagagagcgtagaccgtcccgtcctcccgaacgccgtttttcagctccgcatagtcgatgacatcggtgataagcgcccagttgaccatggagaacagccccagccccagccagcagagcatctgcagcacgcagtagacccagacgctgcccggccgcaggaaaaacgtccccaagcacacggcggcggcaaaaaagcccccggcggcggagagttccgctttgccgaagcgctgtgccaggggcttggccgtgagggcagccagggccatgcccacgagcatcagggccatcgaggccgattgggcggcggcgctgccgtaataatcggggtagatatacgagctcatgttctgcatcgtcagctgggcaaggagcataagcgttgaggcggcgatgatggccagcagcggccggttctccagcgctgagcgccagagggccccgaagggcaga

SEQ ID NO: 4360 - DNA, 6924 bp, Unknown
  16S sequences of unknown bacteria
gaatactccccgcgtctttactgaatgacctgcaaaacggagaaacggcatagcccgaaagctacgccgtttcccgaaaacatttctaatactgtcttatgagtgccgccctaagggcatcttttttatcattctgtggattctccgtattgtacaccgaattgcgccattgcagcctgatgttcttcgtatgtggccgaataatggttttcattatcattgccaaagaagaaatataaatagtctgtctgagttggattttttgctgcattgattgcatctgctcccggactgcaaattggtcctgcgggtaatgcggcgcatttataggtgttgtatagttctgcgtattttgatgtattccccagtaaagggttgcctgtcacatagtcattgatatattctctggtggaatccatttgcagctgcattccttgttccaaacgattgtaaataatgcctgcaatcatagacatatgttccggactgcgggtttccatttgtacaatagaagctacaatcagttcggtatccgttacatttccgccggtgttattgcggtaggcatttaacatctctatgagtacatcttccgcattggaatttttttggaaggtataggttgcgggatataaatatccttccattttaaatggacgattttcatcaatcggaatgctgaaagattttggactgtaattttgacaagcctgataaaagtcttcggcagaacaaatttcattggcttccaaacgttttgcaattaagtcccatgtaaaaccttcgggaatggtgaccgtaactgtctccgacacggaattggtaacttgcgaggaagtattggtgctggatgaagcaccagatgaagtaccggaagaagactgtcggctgacggtttgtgaagtgctttccgtttcactggatgtttgctgttcagaaccgcagccggccaaagcaaaagaaagaacaaagacagaaccgacaatcatcattgcaattttttgtttcatagcagtaatcctcctttgtatctacttttatgatacaagattctacaaatggttgcaatctttttgccggattctttgaaatatctttacatattgaaaaaagatagtatttaatttttatttctaaaagaaaattctcacaagtaataatagagaggaatatactgtaaaagggatgaaaaaagtaacgtaagtaacctgtgcgaaaaaggagcgaatcgtattatgaaagattcttttcggcatacgccatttagaagggaacaaccgccaaatgcacaacgcggcagtatggaactatggttgtcttacatagaaaaatctccaagaaatcaaacaccgtttatgttttatgtcgtagatgctgatacaggatatggattaaaaggagctgaattttcattgtttcagcgcgacgagttggtattcggaagttattccaaccgttccggtgctgtatggtttccgccgctgcgggagggactgtatcaattaaaagaagcaaagccaccaaaacaatatgtaccggaaaaagaagcatttcagatgtatgtagattataacggaaacatttgtattgaaggtgtccctgcagcaagatttcaagtatttcataaacgcagttcagaacagaaagcgtcgttctcagtgattaagtatgacatcagaaccggaaaacggctggaaggagctgtattccagttgtgccaaaatcatgttcccgttgcaaccagcacatcagatgcagagggttttgtgcaattttatggactgtcagaaggcgtttatcaactaaatgaactatgtccgccggaaggatatatgaaagtttcggatacacatattgttgtggttgcaaacgatggtaccgttaccatagacggatatgcggcagaatatgcttccattggaaacaaacctattttatacgacattttctttcagaaacaagatgaattgacaggagaaccgctggaaggagctgtctttgacctgcttcatggaggaattgtactgtataccgccatatccaatgaaaagggagaaattaattttggcagttttgcaccgggaacttatacattaaaagaacaaaaaccaccttcgggatatcacatcaatgaacatgaatacacggttgtggttgcacaggacggtatggtaaccattgatgatatgcctgtagaatatgccagaatccgtgataaaaaagagcaagaacagattacggtacgtaaatatgtacaaagattagaacctgaacgcggcgttacatttcaattaagtcagaataatgtaatggtagcttgtgcagatacaaatgaacagggagaagcttattttcatgatatgaaaccgggaacatacatgttgatacaattaacacatgatggtcaatctacgggagaaaaacatacggtgatgatagaggaaagcggaacgataatcattgacaatcaggtcacgaatatattagatattcagtaaaatacttctttataaaaaaggaactacagtatgatgtagttcctttttgttatactgcatgggcagttttaaacttaaatttaatacggttataagattccagccaataggccatatctgttaatgtatctttcatggaacgcggatgatagccaagttcttgtgtggctttttcgtgtgaaaaattcccattgctttccaatgtatataaggagtaggaagtataaagcggaggttgacgaagcattttataccaaacttctgcaagaggagctgtcaatttggcaaaccataacggaagtacactttttaatctgcgcttgccggtaatttcatgtaagtcgtccaatacctcttgaattgtgtaaaactgattgctcaaaatatagcattcgcccgcccgtccgttttccacgcaggaaataattccgtctgccacatcacgtacatctacaaaatcatatccgccgttgacacatgctgtcagtgtaccgtttaaataactgataaccaattgtgttaaatgagtacgaccgtaatcgccgggaccaataatgccggaaggatgaacgatagatgcatttaatccttgtttgactgcgtttaatacaatttgagaggcagcagcttttgttttggcatacaaaccatgtaccgatttggggtcaaattcagaaacttccgtaatggtttctccatgagatttttcaggaatggcatgaacagaactggtatgaaccaatttttttactttatgacgcaaacataattctacaatatttttggtaccgtttacattcacatccaccacttttttatccactttagatgagatggatacaatcgctgcagtatgaatgacaattaactctgtatcgggattatgagagaaaaaagatgtcaaactgtctttgtcgcgaacatcgccatggacaatttccacatttggttgtgtatacgaaatggtattgtcatttggcagagcaagtccgcgaattaattttccttgggcagccagtttagaaataatggtattgcctaaataacccattgcaccggttacaagatataatgttttagacacaaaaatcccttcttatctcattattaaaattcttatatatagtataaaccatttgaataccagattatgaataaagcataaaattttttcgcataacctgtaaagtttctaacgcaatttgaagataaattttatggataaaaaatttttgtccattttagaaaactatgattatttttctatactttggtaaatcctaactatgaggtgaaatttgtgaattctatttgggaaaaagaaactgttttaccacagtatgaatcattaaaacaagacttgactgttgatgttgccgttatcggcgcaggcatagcaggtattcttacagcatacctgctgcaaaagcagggtgtgaacgtagttgtgttagaggcaaagaccataggcagtggtcaaacaggaaaaacaacagctaaagttacatcacagcataatttaatctaccataaattagtcagttcacttggcacagaacaggctaaattatatgccgatgcaaatcaagaagcaatcggaatgtatcgtaatttagccaaacgttgtacggacgcggtagcatttgaagaaaaggaaaatatcctttatgccgtacaaaatgctgatgcaattgaaaaagaagtaaaggcaatgcagcagttgggcttaaaagcagatttgattacacagacagaattgccttttcccgttgcagcggctgtttctcttgagggacaagcacaatttcagccattggcttttttaaaagaaatttcttccgatttaacgatatttgaacatactatggtgcaaaatatcgaggaccagattgtcaagaccaaacaggggaatatcactgcaaagcgtattgtcattgccactcattatccgtttattaatattccgggttattattttctgcgtcagcatcaggaacgttcgtatgttctggctttaaaaaatgcaccgcaatatcgcggcatgtatttgggggtggatgagccatcttattctttccgcaatgcaggcgaatatttgctgtttggcggagcgtcacacagaacgggagaaaatcgttgcggcggtcactacgatacattaagaaaagctgcacatcagttttatcccaatgcgcaggagaccgcctgttggtcggctcaagactgtatgaccatagaccatattccgtatattggtccgtatgcatttggcatggaaggcgtctatgtggccacaggatttcaaaaatggggtatgacatcgtctatggtttcggctatgattctcagtgacttgattttagaaaaggataatccctatttgcctgtatttacgccccatagaatgcatatcggattgtccgtcaaacaagcagtcaaagataccgtccattcgatacgggggttgacagcgggatttatggcacctccgagagcaatggtagaacagcttcccaaagggcacggcggcattgtagaagtcgagaataaaaaagttggcgtttataaagatgaaaatggaacgtcacatatcgtacaagccaggtgtacccatttgggctgccaattggaatggaatccggatgaaaaaagctgggaatgcccatgtcatggctctcgttttgactatatgggacatgtgattgataatccaacaatggaggatttaaagtatgattcaattacggaatatgaataagaggaaagcacggtttgaaggttggtatttcaaacatcagaatgcacatcatacggttgcgtttattccgggataccatgtagatgaaagcgggaacgcgtccgcttttatccaagtgataacagaaaatgcttcccatcaatttcaatttgcagaaaaagagttttctatagacagaacacatttggtcattaaaattggagaaaatatattcactccgaaagggattaccgtacacttggaaaacgaaaacctttctattcacggcagtctaagatatcaaaacaggatacccttgaaatatgatattatgggaccgttttcttatttacccatgcagtgtaaacatcggattatcagtatgtgtcatactctgtacggcatcttgaaaataaatggggaagcggtttcttttgaaaacggaatcggttatattgagtcggacagaggcacgtctttccccaagtcctatatttggacacagtgcagcataccgaaagagcagcccagcagcattgttgcggcagtcgctgatattccgttgggtcccattcattttaatggttgtatttgctgtatttatcatcgcggcaaacagtatcggctgtccacatattccggcgccaaggtagtacgctgtacagaaaatgaacttgtactggtacagggaaggtatttttttaaagtaagtttactcaaagaaaatccattgccgttaaaagcgccgcagaaaggtgctatggctcgaatgattcatgaaagcgctgcatgtaaagtgcagtatcgtttttatgaaagaggaaaaaaggtgttcgactataccagtaaacaagctgcatttgaatttgtgccgggatgtatgcccgtatatgataaaaaacaagcaataaaagcggctctttcataaaaaaactgctgtgtgtgaacacagcagttttttatggaataaaatttgtagtatctgcttttggcgagacagcatgttttttatgaagagagtatattctatgtttgggtggatgagttttatttctgaaaatcaagataggaagtaccataaagaagattaagccaatcattgattgtacaggataccaaatcagcgtctctgcagaaaacagaaaaggcagtgtgaccaaagagcctgccgcagcaaatggaaactgaatcaattccattagaacacatagacaaaccagtgcgcagggaaatgtaatataggtaggaatcggtgtataaacagataaatatctccaaacagttccaatccacggagccaatgccataacggcatagactttcagcggttttttccttgcgggacttgtcacctcagccatttcaacaaatgtaataattaagggaggaaccataaaataaatactgtgggttactgtaggataaatggataatacagagaaaataatcagcaaaatgcaccaatggaacagttcgtttttccattgaaaagaagtatgtgaggatactgttttttgggtcagtcccgttttttgatagagtgtttgtactgcaatgattactccaatatatcctataaccagtaggggaaataaccaagagtctgattgcaataaaataggaagcataaatgcagaaacaaccggtgcaaacgatgtttttgtcaccagcaatgaaatacataccaga

SEQ ID NO: 4361 - DNA, 2311 bp, Unknown
  16S sequences of unknown bacteria
cggagggatcgggaggtgtcacggcgtaagccgtgacggagggatcgggaggtgtctcgccgcagccgtgacggagggattgacgcggttcgcagacaaacaatcgaaatcccgcccgcaaaccgcgggtttatcaacgatccgcctgccaaaggccttcgggatacaggccgctcgcggtgaggcggctgagcgcctcgcgcacgatgggcagatcttcccggtaggtcatgccataccagcggtcgtggctcttaagcactttcacgctgcccttgccttcgtggatcaagcaatccggcacatagggcaggaaatattcgcacttgagcggattggtgggcaggttcgcgcgcaggaagggctcgaaccgcgcctccagctcgtccatcatgctcgcaccaaagccccacaggttgagcgaaacgatggtgccctcgggcaggacggtgtcctcccccgcctcggtgaacacgatgcgcccgtccgccttgcgctcgatgctggtgcgctcgacgatctccgtaaggtagccctcttcgttggccgcgcacacgccgcgcgccacggtgccattgtccgtgagcgtgttttccacgcggtagcccgccatgcaatgctccgtcgatccgtggtgcagcaggaaatcgtacaccagcttaaagccttccacgccgtaataatcgtccgcgttcacggcggagaaggggccgttcaccagcggcttggcgcacagggtggcgtgcgccgtgccccaaggcttcgcgcgctccgcgggcatggcaagcccttgcggccagaaggcgtccatggtttggaaggcgtatttcagttccacgtgtccgcgcacgcgcttgccgatgatctcgtcaaagtccttttccatgccgggcttgatcaccaaaatcacggtttcaaagcccgcgcgcgccgcgtcgaaaatcgtatagtccatcataatgtggcccgcgttgtccactggcgcgacctgcttcagtccgccgccgccaaaacgactgccaacgcccgccgccatgatgattaaaaccggttttgtcattgtgcatcccatccttgcctatatttccaaatatatgataccggcaagcgtcaaaattgtcaatcgggaattttgcataagaattgtcgaaacatgcaaaaaaccggcgcgtgcgagacaggggcattgtcaacggcgcgaaaacgtggtatcataaggccataaacgatgcgaaattgggaggcgatggcatgaatatgcgagatgtgctcgcgcagttgcgcttgagcggcattgcgctggaaatcgcgggcgaagaaccctaccggtgcggcggaacgcgctttggcggcaggccggatgtgccgcctggctttgtgtggccctattttgagggagtcggcctggaagacggcgaaaagaagcgccggccgctcgccttcctagcgcaatttgcgctggaagaaatgcagccgttcgacgcggaacatcttttgcccgctcatggtgtgctctcttttttctacgaggtggaaagccagccctgggggttcgatccccaagatgcgggttgtgcgcgggtgttctggtttgaggatgcggctacgctcgccccggcggaatatccgccggatctgtcgcaggaagcgcgctttcccgccctgcacatggacgcgcagcaggcgttcttctatccggaatgggaagattttgaactggcctggccggatgctgatgtggatgattttgaggaaacgcgcgacctgctgaacgaggaagcggaggacggctcccgcctgctgggctggccggagattttgcaaaacaacatgaccagggagtgcgagctggttactcagggatattatctgggcgacaactggggcgatgtgccggacgaggtctaccggcgcgctaagcaaacttcgctggccaagtggcggctgctgttccaactggggccggttgcaagcggggatttcgagctgatgtttggcgatggcggcaatctgtatttctacatttccaaagaggatttgctggcgcggcgctttgagcgcgcgtggttgatttcgcaatgcggctaaagcggcggcggcaacgggaattccgcctggaggcctgatggcattttgcggctgtgaagaaactttggttgttctttcacagtcccgcagactgtcaaaaactccaggagagcgcgagagagccgaaaacctttcgcattaaaatcgtccccggcggcgtgtacggcgggggcgcacgaaggccgcgcgcagtgcgcgaaacaggccgaagtaagcccaatga

SEQ ID NO: 4362 - DNA, 20915 bp, Unknown
  16S sequences of unknown bacteria
gggcggccgcctgcgcggcctttagcagaaacgcatcggcggacatccggccttcatattcctcccccgcctccacttccagcgcggtcggccccgcataacctgtccgggcgatccgcgaagagagcgctttccagtcgatcccgccgtcaaaagggacggcgtggctgtcccgtgtcccgtcgttgtcgtggaggtggagggcaaacagccgggacccgtattcgaagagccaatccgtttcccggccccacccatgatggtggccgctgtcgtaacatagaccgacggccgggctgtcgaaggtatcgagtacccgcttcaaatgcagcggatggcgcagattttcgaatgccagccggacgccccgccgctcggccgtctcgacaacgggacgaaggcgtagggggccgagcggcgagcaaggcggcggggccgcgccgtcggtcagatggacgacaagcgtcttcacctcggccgctgcgcagtcctcgacgcaggcgatcagctccccggccgccgcacgcgccctctcttctccgggcagccataaatcgttacagcggtcatacggggcatgtgcgttttccacctcgagcccgttccggcgggcgagcgccgcttggtcgatccgagataacccgtcgagcccgtcgctccaccataggagaaccgcatcgaagccggcggcccggatttttccgagagattcggccaggggcagcgcgtaaccgaaccaggcgaagatgctcagagggaatcctctgtccttttccatcgttcatcccccgctttcccgtttagcaaatcttaacatgaaagacggattttatcaattgttttccccggccggacagggtatactgatatcgttgccgattctaaaagaagggaggattttccaaaatgccaaggtatgcggtccgtttccgccgggcgctctgccgggcgggatgcctggtgttcacctgtctgctcatacttcctagtatggccggctgccgcaaaaaaacacctgaaggaaaagccttccggtttctgctggacagcgatccccgccagctcgatccgcaggtctccaccgaccgctcttcggtcacgatggcggcggccctgtttgagggcctcgcccgcctggatgaaaacggcgaggccgagcccgccgccgcgacctggacagtctccgaggaccggcggacctacaccttcaccctgcgggaatccagttggagcgtccagacgtccagaagcgacgacaatctgtggaaaagtcctacccccgtaaccgcgcaggatttcgtcttcggtatgcagcgggccgtcctgcccgagacaggttccgctttggcacaggagctgtatggcatcgagcacgccgaagagatcaaccgtggggaacgccccgtctctgatctgggtgtaagggccgtcgacgagaacaccctggtcatcaccctcgtggaaccggatgacgatttcccgaagaaaacggcctccactccctacatgccctgcaacgaggctttttttgagcataccgggggccggtacgggctggaagcggaatacgtactgaccaacgggcccttttacgtcaaatcctggcttcacggtgaatccattaccctggcaaaaaacgacggatatcatgatgcggccgccatcctgcccgcctcggtccgtttcctcatgcaggctccggacgatccggtctccgccctcgcggaaggcagcctggacgcggccgggctcaccgccgcgcaggcggacgcggcggccgaagaaggcctggagctcgtccgtctccaggacaccttgtccggcgtgtggctgaataacaagatagacgccctttccgtcccctccacccgccgcgccttgcgggacgcaatcgagtgggagcttctcggaacccggctgaccgcgggaggagcctcggtggccgcgggatatatcccgcccgatgccgtggtctcgggtgcggaaagataccggatacccgataacgcgcgtctccctgtctcccgcggccgggaggccctggcggatttcacggccggccttgcgcaggcgggcctctcctcctgcccggggctgaccatgctctgcgccgacgacgaacagagcattgagctggcgcgctatatcctgcaatcctggcagaaaaacctatccgtatattttgagctggtcccgttgtcccctgacgaactggcttcccgtgtcggcgtggggaattacgaactggcgctctacaccctcaccccctcgtccctgaccgctcagggagtgctgggggggctcgcgggcacagccgccgagggaaatctggcgcggtatcagagcgcccgtttttctgaagcgttcggccgtttggctgccggcacctcctcccgcggggagatcgatgagctcgaggggatcttgttcgaggaatgtcccttcatccccctgagtttccctgtccggacggtggggctgggcaaaaccgtgacgggggtgatcgtgcgccccttctccggcggggcgttcggggcggagctggacttccgcggcgccggcaagctggactgaccggcatggccgcctttttgagtaggatacgatggcgaaagtaaagctcatctgcggcaaaatcggcagcggcaaaagttggtacgcgaggaggttgatagcggcctttggcggcctgctcttcaaaggagtggccgaatttgaagagccgtcgccggacgatatggacgtctggttcgaaaaccgccgggccgacggatagggcggagtctgtaagacacaaaagggccacagcaattttattgcggcggcttttttgtttgcttttcattacatgtgtgatacgatatatcataatagtcgtacaataaatttgcgatttatggagaatttgcgatgattagggaaatttatgaaactgaattaaatgaattgctagaactgtatttatatttgcacgagaaatctgtacctgaaatgacagaacatttgaataagacatgggaagccatcatccaggataatcagcatcacattatcgttaagattgtcgatgataagattgtatcttcttgtgtatgcgtgattatccctaatttgacaagaaatatcaggccttacgcatttatagagaatattgtcacccatgcggattatcgtggaaagggctatgcgacggaatgcctggactacgctaaagagattgctgtcaagtcgaattgttataaaatgatgctgcttaccggatcaaagcaagaatcaacactccgcttttatagaaatgctggttataacagcacggataagacggcttttatacaatggcttgaataatgtttacggcgcattttctatacatgaccgctgccatgtagtgcggctaaagaaaaaaccaaggtgcttcgcgacaccttggtttttactcttttacgtccaccgcagcatcgggtgatccgtcctttttagatgtatgttgttggccacctgttttttacaccttcgttaaaaacgggcaagggccgtcctcgatctagcgggaatatatgccatgataggatggccaccaaattccggggccgccgcccgtgacgtttctcctgttctcccagccgcctatctcccgccagcctcatcgtggcgttccaccggctgaaggatgtctgccatcagccgggctccttcccggaagccgtcccggtaggccatccggcagcgctgccttcccatctcctgctgcgcgtcctgccatacgtcgatgcggaactggacctgtatgtccatcttctccagccagccatttagccgttcccgcagctgctccatttcatgagaatcccccgttttttccatatcctcccaccagcgttcgaacctttcatccatccaatgcatagacagccctcccttttgctctatttttagagcaattttaacacaacctttccgtataatcaagtcatcagataggaaaggccgtgcattgtttggaccagaaaatcaaacgggaggcctccgtcgggcacaatatccggcggtgccggatagaggcgggcctgacccaggagcaggttacggccaggctgcagatcgaaggctgtgacttgacgcggagttcctatgcaaagatcgaggccggcctccagcacatctcggtccggcagctgtgggctttgtgccggatcctgaaaacggcgccggaggagctcctccgcctcgacgaatcgttttgaatacctgccgatgccgaccgcaaaggcaaaaacaggcgcgtcatggctcatgacgcgcctgtctgtcaaagcggaaagcaaaaagggtgcaaccggccataaacagtgggttcatccctggcgccctctatatagcctattgagccgctcggccgcctgccgggccgccgaaagtgcccgctcatcccgcgcggcgggaaggcggttggtgtttaatgaacaaaccattgtgcagggacgctctacatgcaggtgtttcaggatggtgagagcggtttggatgggggcagcctcggtgccctgttcggcgccggtcagaaggatgaccccgtttttccgttttcctccagccggctcctgacggaagtgtcgggcggcaaacagcgtctggaaccggctggcgagactgagaagcggcccgctgagcgaggaaaaccaaattggcgatgcgaggaccacgttatcgcactccttccagtaggggacgacatcctgcatctcgtccggtatgctgcagccgggatggctccagcaaaaccggcagtccaggcagggagagatggaagatgaggcggatagggtccgcacctccccctcgagatgccggacgaaggcgcccgccaaagcggcggtatctccatttttcttcagggatccaaacaatagcagcgttttcatacagcctctctcccacaaaacaactcccggccggctcgttctgagccggccgggagccgaaacagggctctttcaataattagccctgcacctgtccgccgtttgccacgcgggcattgtaggcgatcacgagattgttgtagtttttcaaaaacttggccgtggcgatcaggggcccaaggccgcagagcagcgagccgaccaggatccaaagcagataggtcacgccgctgtcctgtacctggacgcccatccgggtaccggtatccttgagccgctcaccctgggtgtaataccagatgatgggatagatgccgcaggtgacgatgtaaagcaccaccgccaggacgggactgaaatcccgattgtcaccctgggcgagctgattgacgcttttcgtggtgatatacacccaatacaggccgtagatcccacaggtgatgatggtcaggaagaaccatccccagaaagaccgttgtttcaacaaaccaaacgcctcctcaaacgtttttatatgtaaggcagatgccttatcaccgaatcgctttaggtgagccatccgaacaggcgcagcaggcggttaagcggcgcgttttcattcaccgtcatcggtggggtgcggggaaaaagccagaccatgcgcacaatatacgtccccgcgaacaaaacggccaagatcgcagcggcggccaccaccgcctttttcggcagccggttgcaaaagaggaacaacagtaccagaagcggcagtgtccagaacagcggatgccagcggaacgccccggcaaaatccagccgcagcgcctggagccaggcccgggtcatgccgcagcccggacagggaacgcccagcaggcggtaaacggcgcatccaaaacaaacggcccacgcaaaaacaaaaatcaggatcagggcaaagctccgccattttctcttgtccataggcctccctcgcccggatatccatatcctgtgtccagtataccaaaccgcgcttctccgcgcaaccgcctgggggcaaatttgtgtcgacaaaatttgaggcggggatttatttattctgccgattcatccaggagatcctttttctccagatgttcccggacagaggagccgtcatccagaaccagacggccgtttggatcgaacgatacgtcccggatatccgaacgggtatattttttgatatcccggatgcggaagcggtcgccgggggtcaggaaggtgaaggccacgccgtggcgtttggcccggccggtccggccgatgcggtggaggtaatactcgttctcgtccgggatatcgtagttgaacaccgcctccacgtcgtcgacatcgataccgcgggccgccacatcggtggcgacgaggacctcgaattttccttcccggaagccgttcatgacccggttgcgctgcgcctgggggatatccccatgcagggcgtcggcgctgcggcccatccggcggagcttgtcccccaggcggcggacggtgtttttcatgttgcagaacaccatcacccgcctcagctccagctcgtcgatgatccggcacatatcctccagccgccggtccccggaagaaatcaggccgaactgcgcgatccggggccggttgtccccctcggcctcgacagtgatctccaccgccgcatgctgatattcccacgccacgtccatcacctcgcgggaaatggtggcgctgaacatcaccacctgggtgtcgccgggggtggcgttgaggatcttgcgcacatccttgataaagcccatcttgagcatttcgtccgcctcgtcgaggacggcggtgtagacgttgccgaggaaaaccgtgccccgtcccatgtggtcgagcaggcggccgggcgtcgccaccaggatatgcggcggctttttcagcgccatgagctgtttctggatgggctggccgccatagaccgagacgatccgcacctccggcaaaaacgccgcgagctggcggagctcctcggtaatctggatgcagagttcccgggtggggcagatcaccaccgcctgggtatccatctcgttcatccgcagattttcgagcagcggaatgccgaaggcacaggtcttgccggtgccggtgggcgccttggcaatgacgtcgtgcccgtccagcatcgcagggatggttctggcctgtaccggcgtgggggcggaaaagcccatccgccggacggcttttaaaacttcaggggtcaggtccagctgttcaaagctgttgatttctccggtcatgtggattcctctctgttccggcagtgccggtttttgaatgggagcgccggctgtcaatggcgagcccccggacatgttcgtttgctttccttttcataaagggagggagatcccgtgggccagccctccggcgtcagccccatactatgggatacgattctgcatacaggcgcgggcagcggttacgggccgggcataccggtacaggtaccctcgtcggcgccggtcagccgcacccgcacgatcgagccgggttcgggcagggcgtcccccaccgcgaggacgcggacgggaagataatcccgggtgtatcccaatgcggcgccggattcctcccgggtttccaccagcacctcggcgatacgcccgatatgagcggcggcaaaggcgtcccggccggcagccgcagtgtcggccatgagcgcggcgcggcgggccttttccgcccgggatacctggccgggcgccgtggcggcgggggtgccggcacggcgggaatacgcgaacacatgcacccgcgcaaagccgatctcttccacaaaccggcgggatcgctcgaattcctccccggtctccccagggaatccgaccatgacgtcggtggtcagggcacagccagggaacgcctcccgcagccgctcgcagacccgccggtactcgtcggtggtatagcggcgccgcatgcgggagagggtggcgtcgcacccgctctgcagggacagatgaaattgggggcagaggcggctgcagccgggcgatgcaaggcgggcaatgaccgcgggggttaggcagtccggttccaacgagcccagccgcacccggtcgatcccctcgacggcacaggcggtttccaccgcatcacagagatcggcacccgtatccttgccgtaagcggtcaaattgatgccgaccagtacgacctcccggtatccccgcgccgccaggagcctgagctcgctgtaaagctccggaatcggcttggagcgcacccgcccgcgtgcccgtgggatgacacaatacgcacagaagcggtcgcatccgtcctcgattttgacaaaggccctcgtccggccctgaaacgcatcgatagacaggctctcgaacgccttgccgtgatccgggatctccacgatccggtggcccagctcccggtattgattgacgcatcggggcaaggccgctctggcggcatttccgaggaccacatcggcttcggcgaagccctccgcctcttcggggaaagcctggggcagacagccggtgaggaccagcacggcacggggattttcccggcggcagcggcgcaggagctgccgcagcttgcggtcgctctcccccgtcacggtgcaggaattaagcacaattacagcgtctccggcatcgggggatccggggaggtattcgccggtttcatagccgttgtcggccatacagcgcatcatggcttgcgtctcgtattgattgaccttgcagccgagcgtataaaacagtgcccgcatggaatccccccttccaagttggtaacttgactcaattttacattatactcgaaatcttaccgcatttcaatggacactttgttttctttccctgttgttttccccgtataaactggctataataagataaattgcgaatttcctcgaaaggctgcagatccaggggcggcaacagcggccggttctgccgcaagagcatgtgcatgccgtttggcgaaaggaaggatggcgggtatgtaccaggcgagagtgcgttttgacaccgtggtggaagccaaagcgtttgtcagcatctgcaacgacatggattttaaagtggaattgattgcccaaccctatgtcatcgacgcgaagtccatcatgggcctgttcagtctcgacctgtccaaaccgattgagctgcgcgcacactgcccggaggacggcggcgaatttgccgcgcgcatccgcccctatcgtgaggccgccgcttcggagccggggaataatgcctgaccagccgagcacatcgccgcgggaaaagccaaggaccgcctgaaagcagcgtttcaggcggtcctttttgggatccggggtcttttcttgtccgcattccaaatcgtcggcggcaaagaagcgcgtttgggatatgcggccggatggacgcgaaaaagcggggagccggatggcccccgctttcatgttgcgcacccgcgtgccgggcgggcagcgcttactccagtacatagatcacgatgtcccgccgtccgaagatacgacactcctccaccgtgtccataaacaggtcggcgatgatgatccccttcctcaccgaaccgccggtatcgcacgcgattccgtacccgtagacgtacttgccgtccgcagacacgatgaaaagctcggagccgtaagggataatcctgggatcgaccgcgacgttgcctacctgaggcttccgtccggttgaagtggtctgcccttcgggcgtgttgtaccaggtataggcggcggcggagccggtcagaacctgcttatagtggacagggatcccgtccccgtccagttccacactgtcgggcagaggtgacatcggcatattgccgccgacgcctaccagcttgatctgatcgacgggctccgtggtcacgctttccgaaaccaggatggtctcggccaccttgccgtccaccaggcagtcgcgataaaccagcgttttctctcccttgcatccggactggatgatcttggactggccgcggtccagggaattggaatacttgacggtggttttataatcgaccggctcggttttcgtatactcgttgtatttgacgcgctccaccagcaggctggtgccgggggccacggcatcttccaaaccggcattgactttgtcgaaggcgccgagccgcacaccggccagctggagggcatcccccaccgttcccgaggtcatttgcaggatggccgtcataccatccaccgtcacactcaccgggaacgcacggctgatttcgatcaaaccctcatccaagctcacattcatgacgtcatgcccacccaaggccacgccggcatcctccagaaccgcgacgggggtgcggctgagcgtcatgaccacccggctggtgtccccgtctacgacagtgaccgcccgcatatgaaccgtgacatacgtcaccatcatcgcacaggcggcagccaaagccgaaaccgctgtcaaacggctgcgcaggatccgcagggccaaacggcctgcgcggcgcagcacgtcgatgcttttttgcatggatctaaccaaccctttccggttttctttcggccgccatccggggacggcagcgcttcggattcatccggattctggtaccgccttgtattatacgcatgccaaatcgccttgtcaaacggcgttttcaggctcatatttgtacaatatgcacaggcatatgccggctttccgcgtaaaaattcccaattgggtgccccgttttgggacaggcaggacctgtccccgtccggctctggtttgggaattttcaacgaaactgtcaccgttttccggaactcctgctttagtttggtacaattcgccccggtttattccaattccttacaattttgtcaattcaaaatcactttgcatgtttttgcgggaattttgtgcaagcagacaaaagttacaggattgtaacccccatttcaggcccaaaaagagccttaaaccccctaaaaatatgcccattcgtggaaatcggcatgaatatttatagaatttatataatataatctcatttctgggtttatttccaattccgcgggcacgcatgtcccacctaaatggacggtgtcccctatacatctggggctaaaaagaagggagtccgcaccaaaaacggcctgtcctgttgcgcggatagcggcatatcggtacaaaaacagcggcaagatcctgcgggagcttgacctgttcggtatagcagaaacctgccgcaaaagccatttcagcttttccggcaggtttctgttccgggaagagacggtaaaaatcgatattttcctgcgccagagacaccgcccgaaggggaaattttgatagcgcagcggaggcggcgtgagggcacctgcaaccgaaccaccgcagcaagcgtacttttaattgagagcatccaaaacgtgctgcttaccggaacttgctttttcagcaagtatacctgccgccgtccgttgttatatccgcctcgcccgaatagcgtccccacacagcggtgaaggtatatacggccgttgtatcagggatcagggtgaattgcagtgtttcatcgggcagcagctgagcggtgtaggagggactgccgccgccctcaacaatacaatagcctccgaattcgtcggcggtgcctgtggcggtcagcgtgaccctgtaggattgtccggcctgcagcgcctgaccggaggcaaccatcgtaccagattcatcggtgacaaccgccgctatctcatagtttgccgccgtgatggtttgcggctggatgtggacgctggcagagaaccacgcccatgtcgtcccggccaaacagaccatacacagcaggctccccacaatagagggcatgagcagacgcaggatgttgtcgtcggtgggtttggtgtgcttcggtgtataaaagatagactttaaccattgcttcaaggcggcaagccctcctttcgggtttccaaatggatgacggcaatcaaaaggcataaacgatggcttatgccttttgattgcctctccttccgaagaaggagaagcgcagaggctaatttaaccggcaaaagggttgatataatcctcgctattaaatgtgttgttttcccatgtgacatgaagggggcttccctcgaacatacctctggaaggatgttcgccgcagtcttccagcacattgttggtaaaggtgaagaaatcacagccgccggacatcttcagcagcccttcttttcggccgacaaaacggcatccatcgatcaaaatcgaatcaacttttccctgaagcgtcgcaacccaggacataccgtcggaagcgtcattggtaaacaggcagtccttcagtgtcaggctcttgataccgccgaattcatcataaaccgggcggcctacaccggaaaaggtgcagccttcaaacgttatatccgtattgcggtttttgccgctaagaccgtccgttactttttgacccttaccagttatgctgcaattcttaaaggttacagctccaatcgttttatccggagtcagcttgatcgtcacatcgttgtcatcggttctgtcaaacgagaaaccgtcaaaggtgacgttgtcgatgttatcttgatcgagcacgattttatctgccttggcgcccatggaaacgatggtaacgtccttcaggccctcggggatttcaatcacacctgtaaaggcggaaccgaccaagaccgtgtctccgggcttcgcatccgccagcatcgtctgcagcccttctacatcggcggccaccggatattccgcatccgcgtcatacaccccgttgaagctgtcttcttcgccggtagcctgagttgcaacgagggtaatggcgataccgtcaatcgagaggccccgatactcattgccggcttcttccttcatatggccggaaataacgatcgggccgactgtttggccgggctcaaggacatactcatcaaagtgcttggtgccataaaacagggtatcgacatcaaatcctttaaaaagatcgaattccccttccgtttcgatcgaaacggcgccggtattgaacttgaaccagccagcgtcagccatagcggtaaaatcgatagcctcaagtaatttggcgtcgccctgaataccggataccgaaaacttgaatttcaaattgaggttgccgttgtttttgatatagaatgactccatattgtaggtgcatcccggctcccaaaggatcgcttcctgttcgcgtccatcatacgcaacccagccaagtgtttttccctcaagggaattgccgctttcatccacaagatcgatagccaaattgcccgccacgatcttgttcacgccggtactggccgaatcggtgaaccacgcgaatgtgctgccgacgagcatcgcaaagcacagcacgacggatagaacgctggcaagcaaggctcttttggtgtttttgctgtttgtcattgtcatattcctcctttttcaaatttttcaatgacaatatgtaatcacgcacaccgcgtgtttacaccgcagggggattttgcggatccgtggcgtcctgcttaccggacagctcctttttcaactgcagaagctcggccatcatcttctgggattcggtccgttcggcttccagccgcttccgttctgccgccatttccgcctgctgccttacccgttcttcttccatttccgcaagctgttcccgcttataccgtctgaacagacgaatgctgttgatcccctgcatgagtatcagcagcaggaacgggaggaagatacagacgatatagcccggtgtggtttttagaaattgaaagaatttgcccacgccggatagctttgtctggtattttcccagcacgaagtcgtaggtgacaacctcctcgtccacatcgccggttgtcgtaccataggtgataaagccgggatttccctcggcatccgctgtcagctcacgaattttatgggtgacgatctcaccgtaattttcactgttggtggactgataggagaggatatcccccacttgcagggtggcgggatcgacttccttgacgagaatcaggtcgcctgcgttgaaatcggtggcggacatggaatccgataacacaatgaacgctttatacccgaacaggctcctgtccatgcggtcaaaggtgttcaccgaaacaatagtgaagcccatcatgcagaccgccaacgccacgaccagccaaagcaaaatggcttttatgatgtgccatgccttcttcatctgttctgctccttgttttctcagtcaaactgccgccggggattgttcttggtctgtaccgcgtcggcgcttagattgaaggagagataccgtgtctgcgcactgtttccagcttcttcaggataatggaaggtgattgtcagctcccggcgctcgtgcagtttcagcctatcgtccgccgtcacggcctttgtttccgtcaaatcggccgctttcccactgtataggacggtatcgccgtcacgaatggagacgtccagcacctcggcgagcccgccttccacattctcgaggtaaagccggtaatacacgtcccatgtgctttcgttctcaatgaaaaagcctttttccaccgtcatgcccggctcgaacaggaactcatgatcttcaatcaccggcttgccgccgttcaggttgatttttaccgtcccggtttggaatcggttgttatccactgtcacgatggaatacaccagcgcgaaggtggtaacgcacaggccgaaagcaagaataaccattgtcacaacgctcgccgtcagcttttttctgatctgcttctgcttattcatgccgcgcctccttcctgccccaaaacgccaacagcaggagcagcgtaaaggacgaagccgctaggatgacccacaggatcctgttcgtcgtgctgccggtcggcgggggcgtcaagccgccctcatctttgacataccatgcgaaatccgctttgagcagcgctgcctgatacccgttgcccgccgaggtgtcgagggatacgtcgatccggtaataggcgatcgtttcatccgccgcactctctttcagcggctcggaaagctccatgccgtcaatttccgcgaaaggcgcatcgcacagcacccggccggtttccatatgcgtgaccttgatatgcaacatcttgccgaggttttttgtttgttctgtaatgtccgtccggaaaaagaggccgatatctgtatcgtgatatgccttgacgcaaaaatatgtggtctccacgtcgcccggaaacatattctgcacttcaaaccgtccgctgtcttccggcttgccttcgtacagttccagtttcggggcagcaggcttgtccgcggcgggacgggaagataccggcgttccgccggttttgttatcggacggctgctccaaaccacggccgtcgttcattgtggggacggatgatgcggtgccgtccccatccggagacgaggccgcttcttcgccgatcagattgtccggcacggttgcggtagagtgtgcaggcgcaaagaaggccagatagatatagcggccggctaagccgcccgcgctgagtaccagcagggcagccaggatgatcacgatgattttcatccgcgttggctgtttctttacttgctcctgcttatccatagtccaggcgctcctccttgtaccatgttttttggatcctgcctttatggctggcagcgtttgcttcttttgatataacctcaaccaatatctccgtcaaaaccgggtcaaacgggggtccgtcccctttcgggtttcgccaacgccgcttctgacatccctttgcgatatggcctgccggcggccatggcatcatgcgcgtccgctaccccggggatcctgcccgccaggcggatgccggcgacggccgagatgccgtttttatttgtcctgtcttttcaagaccggctatcgggtaggctccttttttcattttccctgtctcccaccccatagaacatcacataatgcggattatgtgactgaaaagaaaagcagattcttcgataatcggcccctgccccctcacacacttccgttcgaaataaaaagggcataggaaaacaagctggaagaacgaaaaattccgccggcttggtttcttatacccggatggagttttacctaaaatttggatagcctcttgaaaaagggaagtccctatgatataatagaaatatattaatctgtaaaaatccatttatgtaacagacatgctggtccataatatccacataatccgcattatgtgactaacagggttatctgtacccgttcgagccgggccagatggctgccgccggattccatggtgtagatcctcgtggtatcgacgctgctgtggcccagcaggtcggccaggcggacgatatccttctccatggagtagaatgccctggcgaacaggtgacggagattatggggaaacaccttgctcctcgccacgccggcttcttcgcacagtcccttcatcatacgccagatatagctgcggtcgagcggcttgccgtttcgcccgacaaacaccggcccggtctgcaggccggccttttttatatatcgcagcagcagcttctgtagaggcgcggggatgaaaatcacccgcgtcttgtttttgcagttcaccaccgccgttccgttccgcaccgcctccgcggtgacgtattgcagttcgctgacccgtatgcctgtcccgcaaatggtctgcaggatataagataaccgggtgtctttcgccgcgttcaccagccgccggtattcctccctgctcagctccttctcctgccggcaaaacatctgccgttggattttcaagagcttcacacagcagcccgatagcccgcagaaccgcagaaatccattgagtgccaccagcatggaattgacactggccggcgcatactgttcggtcaggtgttctttgtaggccagcaccacgcttttttctgcgggtctgtttccaaggaaagcatagaagcactgtatatcgtgcagatacttttccacggtagcgtcgctcttttcatcttcgcgcagatatttctcgaaggcaagcagctctttacttgataactggtccatggaaatcccttccttccggatagaaatagtcctctttattttgcccgctatcttttacagtataagcgatgggaaaaagaagcagggtacggacaattgccatagacctgggacaaagggcctccgcgagcgttgggagtacagcgaggctggcctctgctggtaaagcgttatgcgggaattggatggcccgaaaggcgccggagcggctggggtcggacaagccgctccgcgccgccgtacggtatgccgccctataaggcaagcagacgccgccggatcctccggcggcgttcggatatgcacagcgtgtgtcgccaactctacgcaacggatgcagcggcgtccgtccggcacacgcaccatgtgaatccgcgcggtggagaagcctttcccgttagaaaaacggcagtcagaagagggcgccggttgccttaaccggataggccggcaatgaataaagagaaaaagccgctgcagagcttcagctccacagcggctaagactttccatacgccacaccacgcaaccatattttgccgttgcacagtctcacggcaaatacatcacggatatcaaggcggtatccaaataaagagcggagtggcgccgctgccgcagcgccactccgctaaaaacggaatatttcctatttaaggggcgttttttgctgtctgcactacttggcgcttcgccacagcagatccggatctggtaccgtacagccttatttgtatttcggacgggcggtatagctggtgtgcaggcaatggtgcgccttgtgcccgccgaacccatcgtcgaagaactccttgtagagggtctcgatgacaggagactggtgggatttgcgcagcttcataccggcatcctgatcgtacagggctttcgcgcgcagcgccttgagatcggtggtgttgcgcaccgaggcgggctggatgggctggccgccgccgttgacacagccgccggggcagcacatgatctcgacgaaatgccagggggccgtaccgtccttgatgcagctcatgacgtaattggcgctggcgacaccgctcgcgaccgcgactttcacgtccatgccggcaatgttgtaggtggcttccttaagcccggcggtaccgcgcacctcatggaattccaccgcctcgttgtccttcccggtgagccagtcgttagccgtacggagcgcggcctccatcacgccgccggtcgcgccgaagatgacggcggcaccggtatcctcacccaacggcgagtcgaattcctcatccggcagggcggtgaacttgagccccgcgcggtcgatcatccgggcgagttccctcgtggtgatggcgatgtcgatatccgggacgcctgcggcattctgatcgtcgcggccgcattcgaactttttggccgtgcagggcatgaccgaaacgttgacgatgtccttcggatcgatccccatcttctgcgcgtaataggtcttgatgaccgcgccgctcatctgctggggcgatttgcaggaggagaggtggtcgagctggtcgggatagtaatactccgcgaacttgacccagccgggggaacaggaggtaatcatgggcagcacgccgccattcttcacccggcccacgaactcgttggcctcttccacgatggtcaggtcggcgccgaaatcggtatcgaacaccttgtcgaacccgagacggcgcagcgccgcgaccatcttgccctcgacgttggtgccgatcggcatgccgaaacattcgccgagagtggcgcggatggagggggcggtggtgacgatcacgtgcttggtgtcgtcggccagagcctcccagatcttgtccgtgtcgtccttttcggccagggcgccggtcgggcagaccacgatgcattggccgcaggagacgcagggcacatcgtccaacttcttttcgaacgcggtgccgatatgggtgtcgatgccgcggtcgttggcgccgatcaccgacacgaactgctggcggcaggccgcgacgcagcggcggcagaggatgcacttgttgttgtcccgcaccagatgggcggccgaggtgtccagctcatagtggggcttgaagccgtcgtatttaccggtatcttccacgccgtagtccttgcacatcttctgcagctcgcagtcgcctgaccgcgaacaggagaggcacttcttctcgtgggtggacaggatcagctcaagggtggtgcggcgggcggcctgcaccttggcggtattggtctgcacctccatcccctcggataccggatacacacaggcggtcaccaggccgcgggcgccggtggcttccaccacgcagatgcggcaggcgccgatttcgttgatatctttcaaaaaacacagggtggggatttccacccccgcatagcgggcggcctccaagatggtggagcccttggggacctcgaccgcaatgccgttgatctttacatggaccatgtcttccatttcggtcactctccttccttaaaccttaacaatcgcgccgaaacggcatttttccatgcaggcgccgcacttgatgcaggcgccggtatcgatcgaatgcgggttcttgaccgtgccggaaatggcgccgaccgggcagacacgggcgcaggcggtgcagcccttgcacttgtcggcgacgatctcataatgaagcagggatttgcagacgccggccgggcatttcttgtccacgacatgcgcgatgtactcgtcccggaagaatttgagggttgagagcacaggattaggggcggtctggcccaggccgcaaagggaattcgccttgatataatggcacagctcctccagctcgtcgatatcctccagcgtgccgttgcccttggtgattttgtcgagcttctcgagcagccgcttggtgcccacccggcagggggtgcatttgccgcaggactcatcaaccgtgaattccaggaagaacttggcgatgtccaccatgcaggtgtcctcgtccatgacgatcaggccgccggaacccatcatgcagcccatggcgatcaggttgtcgtagtcgatcttggtgtcgatcagggaggcgggaatacagccgccggaagggccgccggtctgcgcggccttgaatttcttgcctcccgggatgccgccgccgatctcctcgacgatctcccgcagggtggtgcccattgggatttccaccaagccggtatgtttgattttgccgccgagcgcgaacaccttggttcccttggacttctcggtgcccatggaagcgaaccagtcggcgcccttcaggatgatctgcgggatattggcaaaggtctcgacgttgttttccaccgtcgggcagccgaagagtcctttgaccgccggataaggcggccggggccggggttcgccgcggttgccctcgatggaggtcatcagcgcggtttcctcaccgcagacgaaggcgccggcgcccaggcggatctccatgtcgaactcaaagccggtaccgaaaatatccttgcccaacaggccggcctctctggcctcgtcgatagcgatctgcaggcggcgcaccgcgatgggatactccgcgcggacatagacgaagcccttggtggccccgatggcgtagccggcaatggccatagcttccaccaggcagtggggatcgccttccagaaccgaccggtccataaacgcgccgggatcgccctcatccgcgttgcagaccacatatttctgcggcgccttgttgggggcgcacagggcccatttgcggccggtcgggaacccgccgccgccccggccgcgcaggccggaatcggtgacgacctggatgacctgctccggcgtatactcggtcaggcacttggccagggcctgatacccgtcca

SEQ ID NO: 4363 - DNA, 31461 bp, Unknown
  16S sequences of unknown bacteria
tgaccagtgtagccggacatgcccgtccttctctttcaaaaccagcagaccagatcacattgctggatatttataaagcagttgaaggcgagaaaccactgcttcatttagacactcataccaatccagaatgtggtgttggcattaacattcaattatctttgcagggattttataatgaaattcaaaaggctgccgaaaaaaaaatgaatacgattactttacaggatatcataaacgcctattatcagcgaacatccataagcctttagcaatcaacgctccaatcacgcctcctatgactggagaaatgcattatatcctgtcgcagcaaacacactgaatctttctacaatcctgaaataagatatattgctctgctgtccactgcatggctacttcctggtgatttccagcgatgcttggcggtatttaggacttttttagaaaaatatagaaaaagactccgaaagcctcataatcactagaaaataaagtgtttatgaggctttcagagcctctataaattctggttcggtttacaatcgaaacttcgcttaagcgttcatctgagcagcaacctcagccgcaaaatcctcgtttttcttctccataccctcgccaacttcgaaacgaaccatcttggtcagcttcaggtctttgtttacagatgcaaggtaagcctttacggtctgctttccatcttctgcctttacatacggctgctcaagaagagtgatctctttgagctgcttggagatacgtccctctacaaggccattgaagattttgttctcaatgattgcagccttatcagccagtgccagctcggcaaggctcttctttgcagcctcagagaggaagttgaacagatatttgttgttcttctgctcttcgtatgcagcagcatcctctgcgctgaatacgttgccttctactgcctttgcaaagaggctgttcagaatcggcttcggaagagatgccggatcgttcagtgcgctgtcaattgtgatctcttttgtctttgcaagctcctcagcagagatatcctcttttgcgatatactgcgggttcattgctgcgatctgcattgcaacattggtaagagcctcttttgctgcatcatcagatgcaccttccgctgctaccagaacaccgattcttccgccgccatggatataagaagctacgcagtctccctctgccttctcaaatcttctgaaggaaagcttctcaccgatcttcagagtcttgtcagcgaactcttctgtcagaccatcatccagaagtgcctgtacgtcctcaccgtttgctccgccgttcttgccggatgccagtgccttatcagcaactgcctgaacaaactcctggaatacttcattctttgcaacgaagtctgtctcagagttaacttctactacaacagcctttgctccgtcagctgcaacacggcagataccctctgctgcgattcttgcagctttctttgccattttagctgcaccgctcttcttcaaaagttctacagctgcttccatatcaccgttggtctcagtcagggcttttttgcagtccatcataccagcgccagttgtctctcttaactcttttaccattcctgctgtgatagccattgttcgttcctcctggttttgattactcagcgatcggctctaccggagcttcctcatcgtatacttctgcaacttcttcctctgcaccctgctttgcctcgataacagcgtctgccattttggaaacgatcagttttacagcacggattgcatcgtcgttgcccgggatcacataatccagctcttccggatcacagttggtatcgcagataccgatcagtttgattcccagtgtatgagcttcctgtacgcagattctttccttcttcgggtctactacgaagattgcgtccgggatcttcttcatatctttgattccgccaaggttcttctgcagtttctccatctctttcttcagagcgatgacttctttcttcggcagtacgtcgaaggttccgtcttcctgcatggtctcaatatctttgaggcgtttgattctgctctggatggtcttgaagttggtcagcataccgccaagccatctctcgtttacgtagtacataccgcatctctcagcttccgtctgtactgcatcctgagcctgcttctttgtacctacaaagaggattgtgccgccgtctgctgcgatatcagcaactgccttgtaagcctcatctacttttcctacagacttctgaaggtcgatgatgtagatgccgtttctctctgtgtagatgtactcagccattttcgggttccatcttctggtctgatgtccgaaatgaacacctgcctcaagtaactgtttcattgaaattacactcatgtcttttctccttttggttgttttcttccgcatgcctcatgttcggaggaaccattcggcaccatctccgaaatccacatacgtgtttaatctgcaacttttgtattataacataagggcctgtcatctgacaagccccttttttatgatttaatcgagcagcgaagcggattgcgaatatccgctttgactttcatctggagaatacgcattactctctccgcaatgcgtcgatcgggtttaagttcgccgccttgatcgacggcagcagtccgaagacaattccgatcagcatcgagaacagtactgcaatcaccgccgccggtacgctgatcgcgaccgtgacaccggaaatcctgctgatcacctgcgccataatgatacctgcggccacaccaaggatcccgcccatgcttgtcagcactgctgcctcagtcaggaactggccaaggatcgtattctttctcgcaccgatcgcttttttcagtccgatctcactcgttcgttcggtaaccgataccagcatgatgttcataacaccgataccgccgaccagaagtgagatacttgcgatccagatcagctgattgttggtcgctgcacttaacttctgcatgtttcttgcctgctcaagcaggttgtccgccttgtattttacactggtctgcgaggaagagatcgtcgcattcaggattttctccgcgctctgtcctgcattttccatatcgtctgtactcattgcctttacgattacattttccggctcgtcataggagtaactgatcggccagcaggtcttcggcatgaacagatagctgatcttgctgctcgcatagctgtcatactgcgtcaggtttgtgatcgtcggctcataagtattggcctgtgccgcaacgccgatgaccgtatacggctgtttgccgatctcgatcgttttcccgatcgggaattcatcctcaaacagtgctttcgctgcattcgtatcgatgatcagcaccttgcggaactccgtgtaatcctcatccacgaaattccggcctgttttgatcacgtagcctgctgtctcaaaatagctggtatcaattccgcggatgcacccgcttgacattgccttgtcttgataaaaaatactgtccggactctgacgctccttgtagctcgtcatgttctcaaccgagtcaagatccagaatcgcctgtttcgtctcctcggtcacttccggtataccaaacgggatatccgaggaagaataaatcgtaagcggatacccctgctgattgatctgaatatttaccgcattgtttccggctccgatcaggctgttcttgatctcctcgtttgttcctttgatcgtcgatacgattgaaatgatcgctgcgataccgattatgataccgagcatcgtcagaaacgatctcattttgtgcgaccagatgccctgaaaggacagtcttacattctctaacaatttccatttcctcctcttttactccgacagcgcggtaagattgtctacttccttcgtctgcgcaccctctgtcacgccgtcaccgtacggaaatgcaatcttgtcatccatggaaagtccggaattaatctggatcgcataatcataaactgtctttccagtcgatacgtactgctttttcagttttccgttttcatctttatacacataggatcttccgtcgctctcctcacgtatgaggtatttcggcagataaatatcacctgaagaatcagatccgcttcccgtaaactggaatgtcgcctggccttcctcgattccctccggatcctcgatcagcgcatagaacggataatacgccacattcgtattctgcgatccgctgaaatacatcagattctccgctccgttcggatccggatactgagaaacctctttgatcacagccgtaaagctcattccgtttgatgcatttccggtcacggtgtctccttcgtggagattgctgaccgacagttcatcgatcgtgcctttcaggtaaagtccggatgtatttgccacctttgcaaagtatccttccgtgtcagaagtgccgtcagcacttccgatgctgatgaccgtgccatccatcgtgctcttgactacttttccgtctacgacacgcctgctctgctcgactttcagttctttttcacggatatccagatcgcacgtcttaatctcccgctccttgtcactgatcatttctttgatttcttccggggtatagatgccgtcttctccgccgtcaaagtcgccgccaccgtcacccggatcaaacggctccgtctgcggttcttcctcccacagcccgtactgtttcagcagtgcaatcagcgtatccgcattccagactgccgccttctgtccgtcacttaaggcaagataggcatcccttgctgccctcagtttttcaatcagcagatcctcctgaatcgtcggatcgatctcctgaatcgtcaaaataacctcacataccgccaggcgctccccgtacgtcagaatggtcggcgccggagcttctgtttcactctcggactggccatctgccggagtggtaccatccgaaatcggagtggtatcgccgttgtggctccagatatcgccatccggatcggtcgtctcacttccgccgtatacactctgatccagctcttcgcgccaggtatcgcccagattttcataggctttctttgccttttccagtgctccgtgcctttcctccagtgagacactgtcatccttcagcgctgtctccagatcctccaccagcgtttttacatcgatcatacacagctgtttatagcgcttctgcagatatgcgatctgatcctcttttcccgtttttttcaggtaatcctgaatggtttttccaatcacatactcgtccatcgcagtagccgtcccatccacgatatcatcggtggcctctgcaagattcgtctgatagtagacgagcgccgtttctaccgccgtcgtgtcataatgctccagcgtcacgccgtccgctccaagtgccgtctctgccagcgaaacgaatcccgtgatccaggaatccacctgatccgcaaaaagcgcctcgatctcaaccgcatgctccggcatcacaaaggttgttgtctcttctgccggatccgccagtttcacatcagccggtatcaccttccagcccataaaggtctgtcccttctccgccgccgctgtgatcgttactgtctcgcctgccgcgatctcaacggtctctgcttccccgccgttaatctttccgtttgtgatcgtcaccggatacagaagcggtgcctccgtttcggtttcagtttcagtttcggtctcggtctgcgtttctgtctgagtctccggttcgctctccgtcagcgtctctgactgtatttctgtctccgtctgtgcatctgtttcactttctgtctgcacaccactctccgtctcggtctggttttccgtaccgggattcgtttctgtactgatttctgtactgacttcagtctccaattccgtcgcacgtccggacggatccgtttctgtctgtgtttctgtctccgtctcgacttcctgcccattctccggaagcgtctcctgtgccgcaagcgcagcggcctttccttccatctctgtaaggcgggattcgtctgctacttccgcctttgctgccgttgtcagggcttcgtactgcgcacgtgcttcttttacatcctggctgaaatcacccggattctccggatccagttcccggatcagaagctccacgtaacgtacctgatatttttccatcagcgctgtactttcctcaagcgccttcgtgccatcctccccaagtgcttcttttacgctgtcttttaacacgtaagaaacctgtccatcttctgatttccattcctctgccagatttttgcggtaatagctgacgcattcctttactgcatcgccgatttcctccgccgtcagagaatcaccgtgcgcctgaaacagcacatcaatcatggatacgagtgtctcatagctggacaccgcagatgacactgctgcttccttcgtattacctgcatttacagcgccgctctcaccgctctttgctccggccttggcatcttccggcacctcatcgaccgtttctacgccttctaccgaaaggccgccattactgccggcttcatcctcgtcctgtgtctgctttccctcatccggcgcatccgctccaccgtccagtatcacgtcatccgcagaagcggtctttatcgccgcgtcctgctccagtgccgcggacgtcttcgtttttttcagcttgtccagatccttttccagcttgaccttttccagctcttttgcctgcaggtcaagctctgccatctcaagttcaagctccgggagcgtcatatcataggaaaaaagcggagtcccttcctttacggtatctcctgcggagacatagatcttgtcgatctgatattcctcgttcagtgtgattgtctgcgccacctgtgaggtaacggtgccgtataccatctcctcatcatcccagtaaccgtaattcacattcacaaccggaactacctcgatcgggtcttttttcccctgcatcgtataatacgcaccatatccgactccgcctaccagagccgccgtcactacaaggctgattgctatcattcctgcctttttcattgaaccgcctccctgtgttctgaaatctctccgtcaaaaatatccacgatccgtttcgcatgatgtgcaatccccgggtcatgcgtaatcataacgaccgttactccttcttcgttcagcttctggaaaagctccataacctgtgcgctcgacctggaatccagcgctccggtcggctcatccgcaagcagtatcttcggcttgttcaccattgcccgcgcgatcgccacacgctgcttctggccaccggaaagctgtgtcggattgaaggaggtacggtcttccagcccgacacgcacaagtgcctccctcgcccgctccctgcgcacttttttgcgtatacccgcataaacaagcggaagcgccacattttccagtgctgacatacgcggcagcagctggaaattctgaaatacaaatccgatcgtaccaagccgcaggtccgccagtttattttcattcagagaaagcacatcactgcccgccagctcatagcttccggatgtcggcagatccaggcagccaatgatattcatcagtgtggattttccggaaccggacggtcccatgatcgccacatattccccctcttccacataaagactgacgtctttgagtaccgggactgtcattttcccctgaatataatccttataaatatgttccagtttcaggatcacaaccgttacctccctgcattcatccaactgttccaagcgaatttccaccgtttaacagcagattgctggctccgtctatataggtgccgtcttcctgatccgcatcatacgtattgtctatggaatcatccatggaattctcatcataagatcccatatcagaaccatctatcgaaccttcatcataggatcccatatcagaaccatctatcgaaccttcatcataggatcccatatcggaaccgtttatcgaaccttcatcataagatcccatatcggaaccatccacagaattttcatcatacgctccaaggtccgcgctgtcgccgtcactataatcaccgagcagatttccctgatcgtccatcatctcaccggagccgtccaggctgtcaaatcctgacattccatcggaactgtaatcattgtagataaccggtgtaccctcggtcaggccatcctgcacaaccgtgatataatcatcctcagacaatccgtccttgatctcatactccatcagatcttcatcgtaatcgcccagtgtgaccgggtgcttctccagtacgttgtccttattcgccatccatacgtaggccgtaccgtcatcatcctgttcaatatagtactccccaagccacatgccggtcttttcttcctgctgtccctcgtccgcttccagataaacatgctgtccgaggatcagcccctccgatgtgtcgagttccacataaaacgtatagtttgaactgccggaatcggaactgtttccccagccataagaagaatcgctgttgtcttccgccttgtccgtcttgatctcagaaatcgtaccattccaggtcttggaatcgtcgacacgggaatgcacgatcaccggagtggcagagtcatacagtgcctgcagattctggagattctgttcgttgacacttcctttgatccggtaatctcccgctgcaaggattttgatatacaccgaggaatctcctgatgaagaataagaggaggcggaatcactgttcggatccgaaatcgactgcacaatacctgccatctcagctgtcaccgtcgcatttgagatcgtctccttcagatttttgatctccagctgctttgacttaatctcatattctttctgcttgatctcattctgatcactcagaatctgtgtcgtataagaaagctggtcatccgcactcgcatttttcttatctttttcgttctgtgcaatgctcttgttcagcagctcaatatcgccctcggcgcgctcaatgtcgatctctgcctgtgcaagtttatcctcatcgtccttcgtgtcatagacaaacaggcgctgcccctctttaagctcctgaccttcttttacaaaacactgctttacggtacgctcattttccagcttcacctcaagagtagcctgcggctccacctcgcccgcatagcggtcggctactgtgcttcccgtactcccgtagcctgtgatcaccgatacctgatcaacatagaccgcatcctcgcttgtggaagagacacgctcctgcgctgcattttcaaagaaatgatgatagacaccgtagccgcctgctccgacaataccgatcaccagaaacgcgattactgcttttttcatgaatcaattccccttcaattctaattctgattttatctttttaacttttaacatgataccacaactttttgcaaaagaaagagatattttcttaatacttccaaaagtcactgttttttcacatttaaccaaatgtcgtttactgtcactttttaatacacaaaacctcatttcatagtcacatattccattttattgacatatctctgtttttcatgtacaatctgttaagatggatattcataattcagcctctgctatgagcaggcggcgaagcggattgcgaatattctttttacttctgccaggtgaacagttaataccatctttaaagaacggagctctgttttaatatgaaattcttccttattttatatctgatcctgatcaatctcttcggcttttccgtcatgggaatcgacaaacgccgtgcgatccgtcacaggtggcgcgtccccgaacgcgttttgttcggcaccgccttttgcttcggcagcatcggaatcctgactggcatgtacgtgtttcgccacaagacaaggcatctgtcattccggctcgggatcccggccattcttgcacttcagctgctccttgccggtcttctttttttctggaatgagcgccgcctcggacagccttctctcgcagtcgagcaggagctctcacgcattgaggaacttgacgatgcgacgatccagtcctttgtctcctatgaaaatctgaccaattcccacatcgcctccggttctcccggagacgaggccacaaaagctgtctctctttttttcaaacactttcaataccacattcacaacgaacaaattgacggcgacaccgcagaggtcagcgcaacccttacgaacattgatatgcatgcgctggcgcaggatctctgccgtgaaattttaaaacgtgctgtcgccgtttcttccgtctccatgaccacagcagactattatcagctgctctgtgataccctttcccaaaattcctatgatgaagttgtgacaaccgcctggtttcaccttgcccgtcaggagcagggctggacgatccttgtcgacgacgaactggaagacgcacttgtcggcggcttcatcacctgcatgaatgatccctatatcctctccgcaaagacagttctcggcctgcatctcgatgcgctgacctctcttgacggtgccggatggaaggactacctgaacttaaacgatgtcttttctacctgtaatgaaacgtacgccgcgcagatcgatgatacctttgccgccctgcttgcagacagctacggctgggagatcctgacctgtcatgaagacggcgatcaggctgaagcggcaatccgcatcaccggccccgatatggccgctacgctgcaggcctataaagaatccctgctttcttatgccgccaccgccaaatccatccgcgacagtcagtcggaacagtccgatgaaacatcacgccttctgcttgaagcactgaaaaacacggccggaacccacaccacggatctctctttgtccttttccaacaatgggcagacgtgggaaatctcttttgacgaggcgtttaccaacgcacttatgggggatctgtctgccgcactcactgaatttgagcagggcacgtaagccacggtcttttggtgaagcctgctcctgcaggcatcatggtctttttcctgcgcagacgcagaagatgcgctacagtgaccgcagcgcatcttccagttcttcattatccatcatattttccaggccgtcctcattcacgacccgcataaatgcaagaaacacttcaatatcataatacctggactcatcgatcatcagttccattgctgcatccacgtcaaatgctttccggtacggacggtctgccgtcagcgctgcaaatacatcacagacacggatgattctggctccaagcgggatttcatcccgtgtcaggttgttcggataaccggaaccgtcacagttttcatgatgaaaccgcaccatctccacaatctcctccggatagccaaactgctgcaggaaatccgcgcccagcttggaatggcgtcttacatacttcatttcctcgatgattagcgtctcttcttcgtggcctcttacgtacctggccagctccagctttccgatgtcatgtaaaaatccggcaatggccagcttatggcacatttcttcactgcagttcatctgttttcccgtatggaacgccaggttgctgacacagatcccgtgtgccagctcctttaagacactcggtcttatgatcggatactgtttccggtattcatgccccgtctcactcatggatcccagacctctttctctcaatcatctcatcaatccgatcaatataatttcggatgtcctttacgttctcaatccgctcgatccggtcacttgcccagaccatcttcgtcgatgcaccggcgccaagtgccagaatactctgcacctcttccataataagaatattatagataccggcttttccctctttcgaataaccgacgttctcaaaattgccggccatatttttctgccgatacagataatacggactctgtccggcccgcgccgcatattccgccgccatatccatgatctcccggttgttcgtaaacgtcatttctttatattcatcatgaaacattttcagccgcgacgcacgcttgactgcaagggaatgcaccgtgatgctgtccggatccagtgatatcacctcctgcagcgtgtgttccacgtctgccttttcttcccccggaagtccaacgatcaggtccatgttgatattgtcaaatcccatctcccgcgccagatggaacgcatctttcgtctgctccaccgtatggcggcggccgatcagatcgagcgtcttctggttcattgtctgcggattgatcgagatacgtgaaattccatgtgcacgcagcaccgcaagcttctcccgcgtaatgctgtccggccgtcctgcctcaaccgtaaattcaagcagctggctgtaatcaaaccgctcctccagctttgaaagcaatcgttccagctgatccggctccagtgtcgtcggcgtgccgcctccgatatataccgtattcagctctttttccgcaaatgcatccgaggcgtaatcaatctctttgcacagagcatccaggtacgcatccacctgattcttccagatgccaatcggactggaactgaacgagcagtataggcagatactcgggcagaacggaataccgacgtacaggctgtaaccgttctgataattaatgtcctttagcagatggcgctcccggtttgcgatcgcgatcgcaagtgatgtcttctcattgcttgtataatacgttttccgcatgtaatccgcgatctcgacattccggtatccctgtccgagcatcgccatcggaatcttcgtcggacggattcccgtcaggttgccccacggcagcttctgcctggtgtaagatgagagctggcggtaaacgagacgcttcacctcatttttcagttccttgcggtcgtccggctgtgtgcagacggcggtttcttctgactctgtttttccgttctttcgaatctggaagcggatatgcgaagtcggaacctgttccttttcacaggcctgttctggcaaagtatcctctgacttaaaattgcttaccgttttcaaaaactccagcctgcataccagctgcgcgtccgcctcttccggcgaggtttcatacacaatttttacgtcctcccccgggtaaaacgactttaccagagagtggacgtcatattcaaaaatctgtctgtttaattgtacgattatcatattcttatcccgcttcaatatggattataccgtttttcatatgctatgtcagtcgacgcgtcgtgtcccggatatacttccgtatcatccggcagcgcatacagtttcctgtgcagcgactcatgcagcatgcccatgcttccggtcggaaaatccgttctgccgacacttccatggaacagcgtatcgccggaaaaaaccaccttttcttccggaaaataatagctggcaccaccgacggtatgacccggtgtatgaagcacatgaatctcaaatccggcaagccgcaggatttcaccatccttcaggaaatgatccgcatgcacggtgtaacctcttccgtaaagccctgaaagattattctgcgcatcttccaggatctccttttcttctgccatcgcatagattggcgcattgtaatacgctttcagctcttctgccgcaccgatatgatcaaaatggccgtgtgtcagcaaaatcgccgccggccggcctcccatcgccgcaacccgctcccggatccgcagcgcatcatcggccggatccacgatcagcagttctccgctctcccggttcagcaccagataacagtttgtctgcaccggtccaagcaccatactttccagtttcatcttacccatcgcttctcctttcagccggtggtacgctcgatgtcaatgacactctccacctggcggatcttctcaatcagggagttgagcactgccttgtccggcacctcaaacgccatcgcgatcgtcgcgagtccctgcttgctcgtacgtgaattaacagaatttacatcgatcttccgctccgtaaaaatcttcgtgatatcaaccagcagaccggtccggttatggccataaatgatgatctctgccatatacaggcctttttcacccttctgcgcttcctgctgccactctgcatcgatgatacgcgcccgctcttcctccggaagattgatgatattgatacagtctgtgcgatgtacggtcacgccgcgtccgcgcgtcacaaatccaacaatctcgtcccccgggatcgggctgcagcattttgcaaaccggacgctcacgtcatccataccctgcacggtaatgccgccctttgattttgcgatctgcaccggcgatgcatccttcgaagcctgcaccgcttcgatgatctgctcgtccgtcatcgccttcttgtgatcgatttcatagccctcgagcagtttgttgaccacctggccttcttttaaaccgccgtggccaatcgccgccagtgcggaatcccagtcccggaatccgtactttgtgagcacccgctccatgtattccggctttaaaatatctgactggacaattccctttgcacggcagtagtttgtaagcagctccttgcccctgatgatattgtcttccttcagctcctgcttaaaccactgcgtgatcttgtttttcgcctgagaactctttacgattttcagccagtcacggctcggtccgcgggaattctgcgaggtaatgatctcgatccggtcaccgttctggatcacgtagtcgatcgttaccagcttgccgttgacccgcgctccgatcatccggttgccgactgcactgtgaatgctgtaggcaaagtcgatcggcgtcgaaccggccggaagatttttcacatcgcccgccggtgtaaaacagtaaacgctctcggaaaacaggtcgaaatcactctttaagaggctcataaactcgcggttgtccgacatctgccagtccagcacctgccgcagccagctcagcttctcttcctcgctctttgtgccgcccttctttccgtccgcgctctccttgtacttccagtgcgcagcgataccgtactcagcagtccggtgcatctcaaatgtacggatctggatctcaaatggctggccgttcggtccgatcagtgtcgtatgcagggactggtacatgttctgtttcggcattgcaatataatccttgaaacgcccagggatcggcttgtacatctcatggatgacaccgagcgccgcataacagtctttgaccgtatcaacgatgatacgcacggcaaacagatcatagatctggtcaagcgtcttattctggttgaccatctttttgtaaatgctgaaaaagtgctttgcccgtccgtcgatctgcgccttgattccggctgcctcgatgtgctcgctgacctcttttacgatctcattgacgaattcctgacgtgcatcctttttcagtgcaattttttcgaccagatcgtaatagacttccggctccagatatttcagggaaagatcatccagttctaccttgatcttggaaataccgagccggtgtgcgatcggcgcgtagatatccatggtctcacgcgctttttccttctgcttcgccggtgactgatacttcagcgtacgcatattgtggagacggtctgccagcttgatcaggatgacccggatatcctttgccattgcaaggaacattttccggagattctccgcctgtacctccagcttgtcagccgaatacgacagctgcgtcagctttgtgacaccgtccaccagaagagccacctcagcaccgaactcttcttttacctgctcagtcgtcatgaccgtgtcctcaacgacatcatgcaaaagtcccgcagcgatcgtctccttgtcgagctccagatccgccagaatgatcgccacgcacagcggatgaataatatatggctcacccgacttccgcttctgatccttgtgtgcctcatacgccgtcttataggctttctcgatcagtgagatatcatccgacggatgatacttgcggattcccgcaatcagctcctgatacagtttatccgggctggtaaaatcctccattgtctttacattggcatccgcccgcttgatctcatcaattttttcctgttttgttttcgtatccatcggcatccgtctcaccatctccgtaatttctgtgctttgcgcggctctctaaccacctatcagaaaaaaatgtgtcccttatcgccactttgcagtctgttccttttctcacagaagcatttctttgtttctttttcatcgctttgaaacagacaggacaggcattcaaaatctgttttctgcctacaggattatttgccctcgtagcagattactgaatccacatcatatcctgcaagcttctcacggcccttcagacccgcaagctccatcaggaatactaccttgactactacaccgccaagctgctcgatcagcttgattgcagcctcgatcgtaccgccggttgcaatcaggtcatcgatcagaacgactctctgtcccggcctgatcgaatccttatgcatctcgatcgtcgctgtgccgtactccagatcataatccatagaaacggtctcacacggaagttttccttttttgcgaaccggcacaaatgccttgtgcagattataagcaaccggaacgccaaagataaatcctcttgactccgtccctgcgatcacatcaaaatcaagtccttccagcttttcctgaatcaggtctatcgaaagcttcagtccatccggatcctgcaggatgctcgtcacatccctgaaaataattcccggctccggaaagtccggaatacttctgacatactcttctatttttttcatttttcccgctcctttgtgaattattctgtccgtcctattaaagcaaaatgaatacctataatccgattcactgcttacaggatcataagggatcctcccgcaagcggatccctcctttgataaagaccaaatatcttttagtatagcattttccaatatatttcgcaacctgcaagtcttgcgtattttatctctgtgtgaattttcggtaaatccacaagaccgccgcaatcacaagcagcaccggcagcagtttccacaaaatatggaataccgtgccaagcacgatgcagataatcacaatcaccagcacaatcttcgcccaatcccccgctgtcatgcggcgtacctcgacgtgtgcaccggtaaacgggtctgtatattccgactccggtgtatctttccgatacgtaccatcctcttctgtatagacggccgcgtcctgatacggctcctcttctcttttctcatctacctgaagaatggtccgcgcaatcagccgcggatcgccaagctcctgcagtacctgctcctccgtttttccagaagcgatctgctgctcaatataattccagtaataattaatattatctgcgacctcgctctctgacagctcccgtgccagcaccttgcgcagagtgtccagaaactcttccttcgacatacgtttcctttccttattataatgcatggcaacaatgtaaagaggacatttgctgccgttttcctgtcatgtaccgtttttccatactataccctaatctttgcggattcgcaagtatctgttttgagcatctccttaacttttgtccaacaaaaacgagagcccgaaattccagcaacatacgtggaattttgagctctcgcctcaatttttattttcttgtaactgttcagagccaacctccaaaatgctacgcatttcgtcggtgtggcgtatccgccaaatagatttccatgtaaaagtgttcattcatgcaagcatgattcacacttttgcatgaaaatctgcttggctctgaacagttaccattatcttttatttcgcagcttttttcttgcctgcgatcgtctgaacaccctcaacggcaagtacgattgccaggattacaagcagcgtaccgatgcctgcacggatccagcaccacattgtctcgccggtgcctgccattgcagtgttgaagtttgtcagaatggtctggcacagagatacgatcgttacgatgagcatgaatgccatcgggaacaggaacatcttgttgttcttgcccatggttccaagccatgcagcgacagccagaagaccaagagctgcaagcagctggtttgccgctccaaacagagcccagatctttgcgtatccggtcataccaagtgcgatgccaagtacaaccgtgatgatcgttgcaacatacggattcgtaaccactttcttaaatcccgttgcatccttgtaggtctgacccggctcaagccagaactcctggaacatgtaacgtgcaagacgtgttgccgtatccagagaagtcaggcagaatgcagatactgcaaggatcagcatggagtaaatgacattctgagcgcctgccaggaacggaatcgttgcgcacatacgtgaaataccggttgcaaatacagcggtcggagtagtaattccgcccggaacatactcagaccagatataccctaccgcacacagagaaatcagagccagtgcacactcaatcagcattccgccgtaagcgatcggacgggcatctccctctttgtccagctgctttgcagtcgtaccggaaccaacgagtgaatggaaaccggagattgcgccgcaggcaatcgttacgaacagtgccgggaacaggcttccaagagatacacctgaaccatactcagctttgtcaacaaatccggtaaatgccgggatagaaagtgtcgggtgagcgcctacgataccaacaacagcgatgatcatcataccatagagcaggaaagagctcaggtaatcacgcggctgaagcaggatccataccggtgttacggatgcgatcgcgatgtagatacctacgatgatcatccaggtgcttccgcttaagtaaatcggatgccagttgtatccgattgccatacatgcaacgatagcaagtacgccaactacggttgaaacaaccaggcttgcgtttcttctgtataccatcataccgaatacaatcgcgatcaggatgaacagaatcgaaatcattgcagtagatgcatttgcggagcttgccaccttatccagtgcgccagactcatcgtatgtagccttgaatgtatttgcaacgatggaagcaaatgcagcgactaccaggatcagggtcaggtaggagaaggtcaggaacagcttcttcgcacgcggcccgatactctcagcgataacctcaccgattgactgacctttgttgcggacagaagcaaacagtgcaccgaagtcatgcactgcaccaaagaaaatacctccgatcagaacccacagcataaccggaacccatccgaatactgctgcctggatcggtccgttgatcgggcctgcacctgcgatcgatgagaagtgatgtcccatcagtaccggtgctttggctggtacataatcatttccgtcttccagttcatgcgcaggtgtcgttctgttcgggtcaacgccccactgctcggcaagccattttccgtagaaaacgtagccggcaatcagaatcgcacatcctacaagtaagattactactgcattcatgttttgccctccttatttttctctttcatgaatttagtatatttttcataaatttcgcgttaccgcgtcccatccggttcgtgattacacgattgcccttccggatgaccgccgccgtatggacgttcatccatccataccacgaaaaatgaaaacttttgtaaatgcggcacctcataagcgccttctctgcctctttcgtgcatgtgtcgcagataaacaccggcgtaatgtagctgtacatatgccccggtttcggatcaatcagcttcatgccctcttcataggcataatccttacaccgctcgaaaatctcctttgtcagctccggcacagaaaaaatatagacatattcattgctgtccgcatcccagagcttcgccttcttcaccagcacatacttctcggaatgtacgtaaaaccggcagtgcgccataagtggaaggtcatcttccctctcctcgtaccgctcaatatcaaaatacgcctgatatcctttcagcatgcgctccagcagttcctctctggtctgtttctgatctggcatctgcagtctccttttctatttctccgtgtgcttccctgccttttccaaaagataaaccagagtctgccatacagagggtgtattatcctttttatcgccataattgagaaaaaaaatcatcagcccctgtgaaatgcgggaactgttcagagccagcctcaaaaatccgaaaaaaagccggcatcgcggagatgccgacaaaagctttcaaaatgacttgcctcattttcaaagtaccaggccccgttgcctaaaaaaattataaaagatataactttcttaattttttataaacgcattaacaggattttagcactttatcacggtaattgcaagggggatttgaagggatttgaggaaaaatggagaatgatgcaggattttggaaatttatgcagatactctttttatagtatctctttttatagcatttctttttcctgcacctgtcacagacgctccagtgtttcccggtctcttttcccgccaaaaaatttatccaggagcattccgaataccttttgatttggatctgctttttcaaataaggtcatacacgacttaaattttaaagtatccggccaatgaaatacttctaccggattatttgtgtcaagtgcaagtaaaacctggcagagttcaagcgtatgtgctccaagaaccggattttccagatatgctctcgcctcattcaaatctgcaatagaatagaattgtgacatactgcttcttccaagtccggcaatctgcggaaaaatgtaccacatccaatgtgtttgtttatttccagctctcaattcattaagcgcattctgataatcacgttcatgcgcctcaagaaatctgcttaaatcacaggtctcctctttcttattttctttctcaaacactttacggaacacttgataattctcagtctcatatctgccgcagaacacagcatactcaatcatttcaaaataagaagcgtatttctcctgaacagccttaaaagcttttgcaacaacttctggcggattgcaaaaagctccgcagccaaacgcccctaaaatcagaatctctgctccatttgccgctgctattctgaatatccgctctattctccgctgatggagcttatacagtttttcattttcaatctctgccggtgtttctcccgcacaagggttcataaaattactcggcacacttcgcaaattcggtgctgcgcatgtaatcacatccacctgataccagtctgcctcttccattctttccgggaaagaaacgtcgcttttaaacacaacaacgcccggggtatacagacaatcatcattataaagcggatttcctgctgcccggtgcggtccgtaaaatgcatcccacattttttcaatattcaggcagggatataacgtactgcatctgcacagacattcctcctgcgcagagcttccgcgtgttacgccaccacctggattcgttgatgaagcaaaattgagcacacacacttttttcccatcacgcgcatactctgctgtcgcttcaaaacttctttttttcgaaacgacggttttgcataccagacttctatcctccggtacactaacattttctccctccagatacagtttctgcttttcgattgatgtccgaatcgcctgacgaagcatttcatttccgttcatcagccccattgaatcttcaaaaactgctacattctttgctcttctgtcatacattctataacctccttttcacttccatacagacagcctggcacactgctgcgccaggctatccgcactattttactgtatcactctcactcacttattattttcacttgttacctcacagtttttcaggcaccactgctttccaagcttctttctgccgactttttcaaactcaacactcagcgacgtttcccctgccgccacaactgttccatttccaaaaagcttatgtttgattctgtctccaatcttcacctccatctccggcttcgtctcggtctcctctgactgcacctgcaccttctgtaccggtccaaacagttccgcaaacgtctcaaacgttttcattttctctgtcagacctgctctgcataaaccaacaaagcaagccgccgcttttgcctgacagttgaggcttctgtccggattaaattcgatatccgtaaaagcatcgtattccagcacagctgccgcaagcttctcattttccagcagcgcattgatgtagatataatcatagaacacagttcttggaatcagcggatacatctgattcccgaatgtaaaacagatcagcgctccactgtttttcagtctctcatcctgtttcgcctctctcggagaaacgtcaagaagatccttgtacggtcctccatgcgcaaatgttttcgctccctgaaatacacactccacaggaaccttctttccaagctccggcacatttttcagaaggaaaaaggcactgagtgcttcaccgtattcctgcatggatttgcttgaaatttccagaatctttttatccggctctttcttcagaaattcttgatgcagtgcggtaatattcttctgtttctgtacctttgccagacctccgttccactcaaatttaatttcagtcatctgataaaacggtgcagtctcttttgcgataaatacaggtctctttgccatagtaagctcctctctgtgctgtacaattgttttcttttcatcactacttattattagtcttggttttcttactttttccgacatttaaccgaatttttttacagatattctctttattttcttctattttaatctgattttccgataaatcaaagcttcattttgcctgaaaccggattttttactcctgccccgtgcccttccggcatctctgtcccaagtgtaatcggataatcaaagatcagcggcagatcctgtaccagaaacggataacacctgtcatgaaaaatcagcgtctcattcttccgcaaatgctgcagccgcgataccgagatcagcggtcttccatattcattcgtgccagccagacgactgatgtactcaaggaaggaaatttcactggtatgcagatagatcagatttccacagttatccataatcgttttgctgatgctgtctccgtacttgtccaccatctgactgtatgactgaaccaccagatgaaatcggatatttctgcttcgtgcagctgtaagcataggccccagatcactcagccgcggcatattacaaaattcttccataatgaaatttacacgtataggcagttttccattgttttgctccgcattttccaacaggctttcatagcactggctgataaacagcgccgccagaaaatgatacgttgtcttttcatccggaaccaccagaaaaacagcacgcttctctgttcctatgttgtccatatttacagaatcgctttgctgtcacggaaccatcgattcttcaggtttttcacgactttctggaacatatagatccggagctttattatgaaccggaggaagcggcacagatcatagagcggcagattcggcagctggagactgggaattgattccgtttttacactttcctgtgtaaagcgaacattcgtaattcgctttgcgatctgcgtccaacttcctatcgacaattcagcaatatcgtattctccctaacaacagaagaaccgaccaatccgttttctaaaaacagatcggtcggttcttctctttccgtgatttttttattctgatcagaccacgaatttcttcgtctcttgactgttaatcattttgctttctgtgtgtttcatccaaactgatttccctctcctttacacacaattgcccctgtttctgcttccgtacctttttcctgccatccctccgtctctttcttcaatctcacaatcgtcttaaacagatccccgtctgtctcgatccggaagcttcccccctgaagctccgtaaagctcttcacaatcgcaaggccaagaccgcttccttcggtgttgcgggaagtgtcgccgcgcacgaaacgttcggttaaatagctgcagtcttcggcaagctcctgcgcggaggtgtttttgacctcgatctccacgtcatcgacggtttcgcgcaaagttatccacgcccgcgtgcctgcaagcgcatatttactcacattgacaatcagattttccaggatgcggtacgtcttctccccgtccagaaaaatcaggacacgattttccggtaccgatacgcggcagtcgatctgcgcttctgccagacggtcctcctgctccagcacggcctgctttaccatctcggcgagatcaacctgctgccgtctgatctggatatttccgctcgccgctttgctgatctcaaagagatcttcgatcaactttttcaggcgaagggacttccggtcaaggatctcaatgtaacttttccgttcttcctctgtcgttccttcttctttcagcaggttcacgtacgtaatgattgcggtcaacggtgttttcagatcatgtgagacatttgtgatgagctccgtcttcatgttccggcttttcagttcctcttccaccgccgcagaaaatccctcttttactttttccagctcttccccggcagcagaaaaaatgccgaggtcaccgtccgccgaagcattcagatttccttctcccatctcctttacttcctcaagcagcacccgataattttctttgatccggttcagatagcgccgaaaaatcagaaacagcacagccgaatacaggaaaatccagaaaataccgcccacccacaggctgcaaagtactgcaagaatcacaaaattcacaagaattaccagcaaaagccagcggtcggaggaatccgtcagatcgactgtctgaagctcttttaccagcttctttatcttactcttcagccaggccaaaatccggtctccgttctgatataagagggagcgctctttcaggtaaggaaccactccgacatccaacacttgcagcaatgctatgactgcagcaaaccacacactgtaggccgcaaagtggaagcctaggcagacaagcagatacatcgcataccagctgttttctgactgtacaatccttactgcaaaagaaatgacgccctcctgtgccgtgattaccagaactacagcagctaccgcagcctcaaacggaattttcccaatcagccggttctctctgcgcagccgcttaaacggcggaatcaaaaatgcggccagcgccagtagaaaaagcggtatgatgtacgattccagataccagcttccacgatctccatacgctgtctcaaaagcctgttcttccggctgccactgtacccccgtataataacagtcctggttttccgagtaaatatagactgtaacctgctttggtgtctgcagaagtgtcggtgatagctctgtatttccgatccagttcagaatccgtgccttcgtcatcctccggatatctccggccgacaagatgattccatcctgattttgcatctcgtcgatcgacacactgccttcttcatcaaacgtcattttaaggaaaaatggggcattttccacagcgctctcatactgctccagattttccaacgaatttgtctctgcctcgctgctttcctgatccacaatccggtattcaatctggtactgctcgaccaatgaggaaaatccattgtaccagctctgaaattccacatcaaaatcagccagctgtgtttccagatcctcatccgtttttgcctgctcccttattttgtctgaaaaaaatacttccgaaggaagcactgtacgctgctgcagtttttcctgcagctgccagtacatcacataactgccaacgtacataaactgcgcaaagcttttcagattatcttccgctccgccgtcataggacggccaggtgttttccggcgcatccgcctctgtcacctgtgttttctggctgctgtccatggaagcccgatattcataataaatctgataatacagatccgaagcgactcctgtcatgatcgcagcacagatcaggatcagaatccctgcaaaaataattgccttattgtttttcgattttgtagccaacgccccacaccacctttaaatattttggatttttcggatccacctcgatttttgaccggatatgccggacatgcaccatgatcgtctctgttgcgattgccttttcattccataccttctcataaatttcttctgctgaaaaaacacgtcccgggtttttcatcagaagcgccaggatcttaaattccagcggtgtcatcgtcaccgtctccccgtcgatccgcacctctttcgtctcatcattcaactccaggccgccgatcacgtacgtatgatcgttctcctttttgcccgccattttcagatacctcgaataccggcgcagatgggaattgacacgcgcgatcagctccatcggtgcaaacggttttgtcacataatcgtccgcgccgatatttaatcccatcaccttatcgacctcctccgactttgccgacagcatgatcaccggaaaatcgtacttttcccgaagctttatcgtcatcgtaatgccgtccatcaccggcatcatgatatcgacaatcgccagatgaatctcttccttggcaagaatctccagcccctcctttccgttctgtgccttaaacaccttatacccctgatttttcaggtaaattcccacaccatccaaaattgcccggtcgtcttccactacaagtatatgatacatttttctcttttcctctctgtgcacattctctaatcgagtcaggcaggtcacaaatatcctcttttcactccgcgccacgtacacgtactgtctgctcctgcagatttcttatcagaatcttttttctgttcctgctctatcataccagtgaaaccggaaaacctccatccctttcctcataagaaagcagaaaaaaatccgaaagaaattcgaaagaagcacaataaaaaagatcctctgaaacaaatttcggcatatcatccgatctgtttcagaggatccttctctctgttctttttctatagcaattcaataaaataatgcaggcaagactatttgtctgactctggtaacccggacattcccaaccactccatggccggtcaatggggtgcttcaacgccttctgctcttacctttttaagctttgcatgtttgaaactatggaatacttatcctagcgcaacttcccgcttacttcgcagcctctctcgacgagatcagcatcggctctgtcgcgcttgcctctgcgatattcatcacatgattgacaattcgcgtgaagctgttcagcgcctcaacgaatgtaagtccctgctcaaatgtacacttcttctcctggagcctctccatatgattcgtctgtgcccgggcggccatcttcatgatcgagcgctctttgagcttcagttccagccatttttctgctgtcatctgctgatcccggaaggtcttcatcgtttcgtcgagcagctccatatccatctggtataccttgcgcagctcttcctgtgctgcctccgtatatccctgtcccatttctactgccttttcggtctgaaccagaatcttgatcgcatggtcaccgatctgctccaggtcattgatcacgtggaagatacagcccatgtaatgggaaaccgtcggtggcagctgcagtgcattcacattggtgatataatctgtgatctcagatgccagataatcaaccacctgctcccgctctcttatgatgtttgcggacatgatgtcctttttgatcagtccctctgccgcatcagccacattctgctttacaataccggccatacgttccacttccttgccaacctgcagcgacataacggccggagatcctaccatgttctgatcgatgtactccagacggaacgcactctcgtgtgcctgcttcggaatgatccgatacgtccattttacaaccagatttacaaacggcagcagcagaacaccggtcactactttaaagataatgtggtaaaccgccacctgaaataccggatctggtatcacctgctcgatcatctgtgtgatcggggtcagaatcgtcagcggaataaacaaaatcgctccgactacgttaaagatcaggtaaatgcaggctgcacgcttcgcattattttttgcatttaatgcagaaagcagcggcggtgtggatgaaccgacgttgataccgcagatcagaaatgctgcaaagtaaagcggcatcagaccctgcatggccagcgcctgaagaacgccgactgccgcagaagaactctgtattacagcacagagaacaactccgaccacaaagccgagcagaggattttttgcgttgaggataaaattctgaaatgccggtgaatctttcagcggagacattgcggagctcatcgtgtgaagcccctgaaacagaattccgaatccgagaatgacctgccctacatagcgcgtgcgcttcttttttgcgtaaagcagaagcaccgctcccatacagatacagacaggagcaattccggaaacatcaagcgcgatcagtacactggtgatcgtggtaccgatattggcaccaaagataacgcccgttgcctgcgccagatccatgatctctgcgttgataaagcccatgaccataactgtcgtcgccgaagaggactgaatgactacggtaaccagtgctccgagcagaaagcccataatgcggtttcgtgtcagcttctccagcaaatccttcatttttggaccggcagcaagttccaggccttcgcccatgtacttcatcccgaacagaaacgctcccaatccacccagcagagcaataatactgttaattcccatatgctgttttccagaaaacctttgccaggtttccctttcctcctttgatgagacttttctttttgcgggtatccgcaaatttcatccatttataacatatcataaaagtaaggaaattgcaaagtgaatgtaaattctgcgtaagttttgtgtaatctgccggatatcgtaataaaaattcggctatttctgtagtatgttcgaaacgactgccgcgattccacagagttcttttctatttcagaatcttctctacatcacagagttttgaaatatcataatctatatgtacttccgttgtatttttcttttttttcggattataccagcagcatttcgcgccgatattgtttccgcctctcatatcactcgtcagtgaatcccctacaagcagaatacgattcggctcaattcctttcagcagttccagtaccggcctgaaaaatccgatgtttggtttttccactccgatctcatctgaaataaaaatcccatccatatattgtccaaggccggagcccttaagcttctcccgctgtgcctccaccgttccattcgtgatgacacactggcggatctttccgtgcagcttcttacaaagtgctactgaatcttcattttcaaaaaaaatctcccctagttttctctggtatgagtcattaaatgcttttacatcgctgcaggtaattccctcctgtgcaaagaaacggtgaaatcttccaaccagtacttccggtttcgtcatctctccgcgctccagcgcttcccagcaggcgcggtttacctccgcgtaacgcccaagcatcgcgtcatcgcagccctcgattccaaattcttccatgcaggaaaggataccgtggcgctcagatttttcaaaatcgagcagcgtcccgtccacatcccataaaatggcctgataatacatgttacatttctcctataagtaataatattagcacttcgaaatcggattctttccattcttccatcatgcgttccattgcattcaggtttggatcggagtgttcgagttcccgggcgtagcgccatgccagttcggcgcggtcttccgcggccagcttttcgccggccagaatccactgtgcaaagacaagctctcttaaaatccggacgctcatcaccgccatcttcgccttgcgaagcgcatcgccgtcgtaaactgcgccgcaaaaataaacaaacaggaagtataccagaatctgctcatactctgtctcccatgcacgtgcctcggcaagaaaacgttttttgcgttccagataaactgccggtccttcaccatacagtgccttcctccaccgctgcagatccggcacccagcgtggatcgagcacctcaaaatccctgaggtaatcaagtagacgccattgtacggaaagataatctgaatccgcccgctgcccgtcattttccccgcagaattcttcatttacaagtgaaaaccagatcagcttgtgcgcaagcgccgtatcagccccttctctttgatagcgttccaggacattctctgtgtcaaataactgtctcgaatcaatccggttctgcacatcatgagcgagtgacaggatcttagccatacgaagattcagcacttcattgcggttctgtgccatcgcaatcagtacgcttctgcagtcctgcagcgctgaatatagaaactcatcaaagtcatcgtcgtttttctgtaagtgatctccatcgttttttctgactttttctgtcgtcagaaactgcgcctgatctgttttatcaagcagcaggcgtgccaccattgggcaggagagtgataatgaaatctctctctcattttcatagacctccacgtgctttgggtaacgcctgcaggtacggcacagaaaatccggtcctttttccagatgaatgtcacagagattctgttcattcaaaaaagcgcagcggctatgatactgtttgaaacgcccttcttcccagttaattgaattgaccaggcggtttccaaaaatcccaggacaggatgcatattttttcagactcttatcatcaatcataatctgccatccggcgcagcacgttgccgggcagtcagaagccaaacatttgaatttcttataataatcagggactgtgtatctcatctttctactccattctgccgcagacctgcgtctgcagccgtctcagtaaagcaacattcgccatgcatttttatgatattttgtaactgttcagagccaagcaaaatttcataaaacaggcggaaaatgcttgcatttttaagcctgtttttgaaattttatttggcggatacgccacaccgacgaaatgcgcagcattttggaggttggctct

SEQ ID NO: 4364 - DNA, 10290 bp, Unknown
  16S sequences of unknown bacteria
gagcgcacaaaggagaggtacgccagcaacccggacattgacatcagcaaaagcatggacaatttccatatcatccagcccgcacagaagtaccgaaaggaaatcaacattcgcatcaaaacggcggggtgccgcctccgaaaggacagcaccatgtttgtggacaccctcatcaccgccagcccggagttttttacaggcagaagcaagcaggagatacaagcctatttcaccgaagcggtggccttcatggagaagaaagtgggagggggtaacatcttttctgccgtggtacatatggatgagaaaaccccgcaccttcacctgtgctttactccgatcacgaaggacggccggctgtcggccaaggaggttctgggtaaccgggcgcagttgtcccaatggcaggatgagtttcacgcgcacatgaaaaaggcttacccagttttcaaacggggcaagagcgcgctggtgacaaaacgcaggcacattcccacatggctgttcaagcagtctgtggacctcacccgccggcagcggaccattgaaaaggcgataagcgaaattggcggactaaatgcagggaaaaagcgggacgaggcgctggaaatgataggaccgtatttcgcccggctggaaaaacatctgggacagatgaagaggtatcaagccaccattgactacttgacgcaggagaacatgggcctgaaacaaaaagtcaacgacgaaaagagcatccaaaagcgggtggaagtattggagctgaaaaaggaaaacgagcggctccgacgatttgtggaaagtattcctcaggagatcagacaggcgtttcaagagcggcagagggagcagtctgccaaagctccccagcgatagccattttctcaagaaaggaggtacatttgggcggaaggaaaaagctcacgaacaacaccgatattccccagcaccagatcgaagcaatagcccgctgcatcctcccggatattcttgctttctatgaaagtgaggaaggccagagggaatttgctgaatggaagaagcaaagggaactggaaaagcaggaggtcaaggcagagtaaggacaaaagaaagggcgggcgcaccgtgaaaacggctgcgtccgccttttttgcgtctatggagttattgcttcttccgaaggcctctcggcttggagacaggcttgcgccttaccccgttgcgaaagtaggtactttacatacgggttgagaaagcaatcatccgaacctgttttctgatcagtcaatgtggctttgagatcacaaaagtaataatcgatgtccattcctttagaaataacgaggtcgaatgacagcgttcattggtcacttgccatcatacgaagcaggtttctttcggcttttacgcatgggagattggggacaaaacacatttcaatcaggcagcgcatttttcctgcaccggagtggcctgacatgtacatgcggaagggtgtgtttttgtctacccggcagccgtcaaaaaacctccatcaaggcttccagcagtccactcggaagaggaagcgaagcacattcacgcagaatcgccagcggttccttctgcatgcacagcaggtcaaacagccgttccttgagctcatagtcaatctgtgcacggttgagcagtgcttcccagtatccgacacggtcgttgtcggcaacacaaaagccgtccggaaggctcaccgcaatgctttgggcattgtccatcggtgggagcttcacatggaaacgatgcatttgcgagtcatagagggtttcggccgataggagttccttcccgcagcgcgccacacaggaagctggctccttaagaccgcagaacgtaatggtgagctgacgctttctgtgcaaagagggggcgtcatgcacgacggaaagcgaaaattcattccctgtcagacgaagcgcggtcagcagatagtcgcctgaggcatagcgctccgtctccccatcgtcctcgtagagatccaacgcgccatccgcccccacaaagacaaggatctccaaggcttcagggattgcgcttttctcctccaccggcatcagcggcgcaatcccgcctgccttggccagcacaggaatgctttccagcggcctgaacaggcgcctcgctcccccgccgcgatagaggatgccggtaaacaggtcatgatagaggccgtccggaagccaagcgtcgacgccggccagcctgagctgcggcgccatgggcgaggtgataggtgcggcgatcaactggttgccaaaaagatactcgttgggtacctggtaggcagcatcctcgcgtggccatgcgtaatacatgggctgaacaagcggctctccaaggctgtggcagcgccagttcatgctgtagagatagggaatcaggcggtggcgcagcctgagaaacgccgtcatgatgccgcatgcctccggcccgtagcgccatggctccttgccgttaaacggattggacgtgctgtgcatacgcaggatcggagaaaaaacgccgaactgaagccacctggtttgcagctcatcatcgcgcctaccgtgcgtatgcccgccgatatcgtggctccaccagccgtaaccaatattggaagccgtggccgtaaagtatggctgaaattgaagcgacttccagctgatgacgctgtctcccgaaaagccggccggataccggtgactgcccggcccggcgtagcgggacagaataaaggggcgcctaccttcatgcgcggcatcctgcgcatgaaaatgattaagcagccacagcgggtccatgccctcggtagcgcaggattgtccctgctgccagtccacccaccagaaatccacgccctcccgctccagcgggtgatgcacaaggtcaaagtacacatgccaaaacgcccggttttccggctcaaaaggaatccgctggcctcgcgcctcatcccttcccagagcagcagcggcctgtggatagaccagctcatgcggctggataccctcggcgggatgcagattgagtgttaccttgaggccctttttgtgcagcgcctccagaaacgccggcgggtcgggaaacaatgtcctgtcccaggtgtagcccgtccatcccttgtggccggcgccgtcagagcttacgtgccagttcatgtcaatcacggccacgcttaaagggatgccggccctttcaaaccggtccatgagcgagaggtattcgccggcggtataggcatggaatcggctccaccagttgcccagcgcataccggggcaacagcggcgtagcaccgcacaggtgaaaaaagtccgccagcgcctgccggtacgcatagccatagctgaaaaaatacagatcctgatggcccggacggggcgggtcaatccagccgtcctttgtcagcgcataggaagcgctgtcatccagcacgctgtagccctggaggcgggaaaggaggccgggctccagcggcaccgggccgtccgcctcgtccagcgtgcgcgccgtaccgcccaggttttcgcaaagcgcgtccccataatgccaggtgcagtagatgccccggcattcggaacggttttcaatccacagccctccgggagaaaacggcttttcatcataaaatacgttcatgaacgccgttgaaagctcaatgccgcgttccgtgcgccacagccggtgctcaaccggcgagaagtcccggttttgcaccctctgggtagggcggtcctcaaagacgccgtccggcgcgtattccagccgaataagctgcggcgtcagcagcatcaggcggtaccgctttccccggatcacggtggtctgcccgttcatggaacctcccccgtttcagaatcaataatgataggctcgccttttacgctgagcaggccgccttccacccataccggctggcggctcaccaggtcgcaatagcgcccgtccgggaagggaacgcgcacgggcgcgcttgctcccttcgtgctgaaaacgcccatcagccgacggtctcccagcacatacatggcccgaagcatgccgtttccggcatcctggacgctgtagccgccctcggccatcagcggatggctgcgcaacgcccgcagggcacgaagcaaagaagaaatgttctcgcccgcatgccagtcgatggggtccttgtcaaacaggctgggccggatttcgcagcccgcctcctgtccgttgtagatcagcgtcatccccttttgaaaatagaggaacgcaagccagttgcggcgctgacgggcatccggcacaaggaagacggcgcggggacggtcatggttttccagaaagcgcagcttgacatagttgtccggatagagatattcctgccgggaaagggcggcggcataggcctccagcggcttttctccgcacagcaggctcacccagtcgtgatagacgtcgtactcgtagctcagatcaaacgcctgatagatctcgctgtccgacaggctggtcatgccccgcgcacggttgtccagcgtgaaggcgggctccaccgactcgctcagccacaggcagtccggctgcacctggcttacctcgcgccgcgcgcgcagccagaactccagcggcacgagcggcgccacgtcgcagcgaaaaccgtccaccatggatgcccacatcttgagcgtttcgatctggtaatcccacagttccggatggctataatccagatcaatgatgtccgaccactcgccgattctattgccaaagctgccgtccgccctatgatagaaccattcgggatggtgctgcgccagccaggagtccggcgaggtgtggttatagaccacatcgatcatcaggcgcatgcccaggcggtgaacctcgccggccaggcgctcgaaatcctgcattgtgccgtattcctcgttgacggcgcgataatcccggatggcatacgggctcccaagcgccccttttctgcatgcctttccgatgggatgaatgggaagaagccagagaatatccacccccagatcccggatgcgcgtaaggtcctcccgcaccttttcaaacgtgccctctttgctgtattgccgtacatatacgcagtacatcacctgctgacgaagtgccttgctggtatctgccgccattctgccgcctcctgttcatcctgtctggttttggttttcttcgcgcagccttccttttcctgccatcagcccttgaccgctgccgaagcgatgccctgcacaaaccgcttttgaaagatcaggtagcacacaacgaccggcacgatggtgatggccgttgcggcaaacagcccggcataatcggtggagtatcgcccgctgaacatgttcagcgccacgctcagcatgtttttgctttccgtgcgaatcatcagatacggccagagataatcctcccaggcccagagaaactggaaaatggccaggctggaaatggcgtttccaagcatgggcagcatgatgcggtgaaagatatagccgccgctggccccgtccatccgcgccgcctccagcagctcatcgggcacggcggcgcagctctgacgcatcagaaagatcccgaatggcgtaaacaggctggggatgagcaaagctctccaggtgtccagccatcccagctgctgcatcatggtatagcgcgggatgatcgtcaccacgcccggcaccatcatggtggccagaacggcaccaaagagcgcgtcacgtccgcggaagcggtatttgcaaagcacaaagccgctgattgcgctggtgtagagcgtaagcgccgtcagcagcacggcataggtcaggctgtttgcaaaataccggaggaaattcatcttctcaagcgcgttgagataattgtcaacggagggatgaaggggcagaaaatgctgctccaacgcgctgatttcggcattggacttaaacgacgatgccagcatccacagaaagggcagaatggttatgacgcttaatgcaagcagcgcaacattcaacgcgagggactggagccttcgtttttgcattgccgcgcctcctaagccttaacgccgccgctggcccggaaggacagggccgtgagcgcggcgatgagcgcaaagagaatgaaggaaatggccgaagcatagccaaagttgtatttcacaaaggcctgatcgtaaatgatgtaggatgccagatatgtctttgtccccggtccgccctgggtgagcaccatcacggggatataggtctgaaaataggagatcagcgaggtgatgacgatgaacaccatagtgggcctcagcaggggcagggtgagaaaggcgaagcgctgtgtcgcggaggcgccgtccatctccgcggcctcatagcaatcggacggcagcgaatacaggccgcccagaagaatcaccaccgcatagccgaaatccttccagatggtcaaaagcaaaatggcgctcatggcgtagcgcgcatcgaaaagccagttgattttggttcccaaaacctgattgatcaggccaaactgcggatcatacatgaatttccacacaaaggccaccgccaccatcggggtgatggtgggcaggtaatacagcgtgcggtacaatgactggcggcgaatcagccgggtgtggagggccagggccagcgccatgccgatgaccagccgggcggccaccgcaaccgccgcaaacagcgccgtattgcccatggactgccagaacaggctgctgcgaaacaccatctgccagttttgcaggccggtgaagcggtactgtcccttcagcggattccaaagatgaaagctgcctacgaaggccatgagaatgggaatgagatagaaaaccgaaaaaaacgcaatcagtcctgcgacgaccgtgttgcgcaggacgatttcgctgcgactttgcagcggatggatttggtgtctgcgcgccatcaggcgggcgcctcccttccccaaaagggccggtgggaggggtaaacccaccggcccatgtggttatggcaatgatcgctcacttcgcttcgtccgcgtactggtattgcggctcgacggaaacaaattcgctcattgccagctcctcgttgcaaaggtcctcggcgttttgcagggcggtttcgacatcctcgccgttgtagaagatgttttccagcgcgatcttcatattgttttcaacggcgctgggcatggggccgggccagatgtagcggtcgatgtgctcggccagcaccgcgatgctcgacacgctgaggatgtcctcatcctcagccagggaacgcttggccgggaagacggagttggccaggcagaactccttttgcagcgcgtcattggccaggaagaagcgcacgatgtcctgtgccaccgcctgctgatcggcgggcgcgtttttgttgataccgaaggtggattcaccgttgtagcggtggtaggcatagggcacatcctcggcaggcgtgggaatttcaaagctgccgaagtcggtttcgggccacaggctcttgaacagattgtgcatgaagccccagcccaggtacatggccaccatgccctggccaaagttgtcgccggagttgttgccgaaattatagtcgccgctgccgtccacctcatagatgtccttcatgcggttgacgaccgtgcggatggcttcgttgttgaaggttaccttgttgtcctccgtaaacaggttctgcccgtactgatactgcatgcccagcacatcgccctgggcgccgccgttaaagctgaatcccgcctgtaccagctcgccgttttcatcgcggatggtcagctttttggccacttcgcggaactggtcccacgttttgggaatgtcggcctcggtcagtccggcggcatcccacatggccttgttgtaatacatggtggccgtcatcatgccatagtccgtgtagtagacgttgccgtcgatttcatgtgcggaaacgcccacaaaatcggcttccaggtcctccagcggaatatcatagggcgccagataaccaatcaggttttcatgatagctgttgtgtacattgaagatggcgggaccatctgtgccctgcagggccagagggagctttgtccagtagtcttcataggggttttccacaagcgtgatcttcacattgggatgaatggccgtatattcgtccaccactgcctgaaacaggttggccgcgcccgtccagtaccagaattcaatggcgatgtcctcaccgttgttgaccggagcggaggggtcgtattgaatggcgcttccgatgactgcgccgccttcggccatggcaacgcccatggtcagcaacagggtcagggaaagcagcagggaaatcatacgccttagatttttcttcatcacaaaatcttcccttccgatatttttctttccgcatgactagtatagcggtaaacttaactctattatattctcatcgtctcttttgtcaagagaaaaatagaaattatcacacggtttaaaagatatctatatccggcagctttttaaggaaaagaaaaaaggtttaattaaacttcccgaaaaaccacgttttcaatatatcttttcaaatatcaatcaagacaatttttggcttgcaattatcccaaaaactatgatagcatagtttataaacctttgtaaggaggatgcctgtggttacgctcaaggacatcgcgcgcgaggccaacgtaagcgtcatgacggtttccaacgttgtcaacggcaacctgtccaaggtgtccaaagagaaagcggcacagattcaggaaatcatccggcggcgcaactatgtgcaaaacgccagcgcgcgcaaccttgccaaggccaattccaacatcgtggccatcatgctgcgcaatatcggcaatgaaaacgcgctgagcgggccgcacaacgcggcgctggtgggacagatgatccggctgcttcaggcaggcggcttttatgcgatggtcagcctggttgaaaacaaggccgatattgcaaaaaccctgcgcgcctggaatgtgcggggagcggtttttctgggaatgtttgacgacgagattgagcagatctatgccgcctccaaggcgcccatggtgtttgtggacagctacagcaacgtgcgccggatctgcagcgtggggattgacgactaccggggcggccggctggcggctcgctgcctggctgagcacggccatacccggctcgcgtttgccggacctgctcagcgcaccaccggcgtcattcagcagcgtcttgccggatttatggacgagctggctgcccgcggcctcgcgctggaaccggagcatcggattgttgtggaatccgacagcgacccgcacgcaatttgcgctgcgacagatgcgctgtgcgccatggccggaagcataacaggcgtctttgtaacaagcgatcagctcgccatggggctgatgggcgcgctggccgagcgcgggttttccattccccgggatctatcggtcgtcgggtttgacaacatctccgtcagcgggcagatctatcctccgctgacaaccattgggcagtgtctggagcagaaggcaacgctcgccattgaaattttgcagcgtcagatagagggccgagacacccctgcagaaatgcgcgtgctggatgtggaactcgtcgaacgcgccaccgtctccgcaccccgaacgtgaacggcccctgacaaacggggcctcgtcgaatcgccgcaacaactcttttaaaaacggcaaggaagcagtctatagctgatcaacaacaccgatattccccagcaccagatcgcagcgatcgcccgctgcatcctgccggacattctggccttctatgagagcggggaagggcagcgggagttttctctgaacagaagaagcagagagaatggagaggcaaggggtaaaaacagaatatggacatggcaaaggcgggacatcatccgaaaatggtggcaccccgcctttttgcgtttatatggatttcttctttttccgtggtcctcttggcttggaggtcggtttgcgcttcactccgttgcggaaataggtgctttcgtaacggtcaaagaaaacaaataatccgaacccgtctcctattggaaacaagttcggattatattggtttggtgcgggaaacaggacttgaacctgcatgaagaaaaccctcactagaacctgaatctagcgcgtctgccaattccgccattcccgcatgatgccttctctggcggagagaagggcttttggtgggcaggggtggattcgaaccaccgaagtctgcgacggcagatttacagtctgctccctt

SEQ ID NO: 4365 - DNA, 15172 bp, Unknown
  16S sequences of unknown bacteria
ttccgatgggctcggagtcatgtgaatgaccttttgtaggacaaaataaaaattttgaggcattaattgagaaattgactgttgttgaagttgatatgacatcagctaaacttaatacagatgtattagcatcatacccagccggattttatcgcaaaaattgcgtaataattggcatatcagtgtatgatcgagtaaataacaattactacagtctgttcggtgatactacagtaacagctatgcttggatcaaaggtgatcgttaaaacatcacaaagtaattacattggagctggatctaaaattagagtagtactttacaaaatagcataagctgtatctaatacataaaatccagccggagcatttgctcccagaaccactctgccactggtatcgatatgaactgatgatgttgtattgtcctgctggttaaggaataacagattataaactttaacacctggatggtaaaatgacagttacttttaacgctgtcagtcgtggattattcgttggattctgggtagttgcttaattactttttacataaataatatcaaccatcaatctattactaatagccgatgatgatgtatttttgtaaaaagccttttttgcaccacttactgcattgacaaatgtaattacatttgtttgagtagattcagatccactattggagtacggtgtggcagatgcgatggtgtatccgtcttttgctggtatagccaatccagcagtagatccagaattgatttgtacaacgccaaaatcaacagtttcggctatgatcttttcagttaatgcctcaaaatttttattttgctcagcaatctcgaccagaattctcgtcttctccacgtgactctcatcccactctccggccggatgagctgtcgtaaacttccacaccgtattgtcataaatcgtataatctcccgcctcataatcccgtcctggatcaaatgcatcacccgtgcaattgaccatcttcgttatggcattcacatcttttgccccgaatttgtctcccgctgtttcgtactctgtcatatcgaccggagatactgttccatcaccgttgtccagcatcttgtacttccgtaaaccagcaaataccgcgtccttataatcttccttcaatgccatcaaaaatctcctccattcagtgtaaattccagtgtttttcgcccattcgctgttcctgtcaggtattcgtgcagattcaggcaggcggattcaatccgattcaattcttctgatcctataaatactttattggcttcatacatcctcttttcgccgatagcaagaccacaggttccgttatttattgcatccaggttgtcctcaaacagatctatctcatcggcataataagatatatccgcataggttttatctgctcccatctcagcaaatggaaattctaaccatgcggatattgctatctcatgcagcacatcaagatttcctttaatccggttataatcctcaatgttaaaatagtctcccggtgcccatgttgtttttggtgtctgccacatcactctaccctcctcgctttaatcgttccagacagagctccgttataagtcaactggtgctccgagatcctgacctgcatattctccacatatttgttctccagaaaaatcagatcattcgcatcaatcctggcttcaccgcggtacgacaattcatattctcgatcagcctgcagataatcaccgatccagtccgccagatccgccgcatggatcagttccgacacgagcggattgctccacgtctccagagtacccgtggtatgtaactgccgtatgacttttgtataagacaaaatatactcgcgccccatgaccactgcctcaagctccacaggctccgtaatacctgtgatctccactgttgcataataattactgctgtcaatgattcggatgctctgaccggcttctggctccacaatggagcatgacagaccataggatgcattggaaaaataaaaggtgtactgattatccgccgaagaaatggatatcttctccctggccagttccacatcagccacctgtccctctccgtacagtgtccgcgtgatctgcagttctttgaccttctgcagctgctttccctttggtgttttcatcagattggcataagtcagctcatagtccgtactatccccaaatgtaatgctgtccaggatcacaggactatacggctttccgccctggaactctatctgcagtctgtcccattctggaaattcccgacttatggtcgttaccctttcggcatccactgtcagctcttcctgcaatacatccgccagatacatggtcagttttacttttcccggatacaaccgaccgaagctcagctgcatgccaaagcatttatatgcagcctctgcagatacttctatctgaggattcgtggcaaaatttccggatgcatctgtgatcgatgctgagatatatccggtctccagatactgcactccttcctgctcccgtggaaggaaaaacatattgctgtctacccgtgtatactccggcgccgaaattgcatactccgatttatccccgctggtcaaaatcttatccggctgtgaataataagctgcatcctccgtctgtaccgtcatatccggtgcaaagctggacttcatgtagatgtttccattccttccctgggtgataatgcatcgaccggcattggcaatcagctgcagagcttctttgtgttttaccactggcatcggattatataccttcacatctttcagatacggatccagccagtatgtccttggatcgatgcctgcatccgcaaatacatcaaccgccaggtcatacaatgtaattccctctgatcgatatattcccctgtaataggtaccagtcatattgtcaaagcgatccgtggctgaaaatgacatttcctcatcgtccacggaccactctgtcagctgcaaggctatgccaggcagccactcaatggatccgtctttcaactcctgaccgtataacgcttcaatctcctgtccagcctgcagataattgactgcactggctgtattttcgatatcccacttccggtccttgttcgtcaccgttgccgtaaaatccagtgttggaagctcttcgctgatcggactcacatattccttcttggttgctgtcttgatctccctgctggaaaagtatatgcctgctcccatgatgatctgatgaatccgaagcttattctgtccctgcaacatcttggacggtttgatcaacagataggtcactccctcaaatacctcatctgttgtccatctgctctctgcatttccagtaatatgcatagcctgatgatctgattcaaccacaaaatcaaccggatacatctctccaaaatcaacagttaatcctttcagatcataagccactggaaaatctatcctgattgtcccaagaatctcatgtgtaactattccctggttgagcactgccatctccttctcccgcggcagaaagaacatctgactgtcaaccttcgtataattctgatcacaagctacatataactctgaaggatcaacagtatagttgttcagtggctttgtaagttctgaataatattcatatccatctcctgtcaccgtagccgtagactgtgcttcttggttgactactccgatggagatccgcatatgacttacctgatcaacatatttttgtgctttgacttccttatatttctggcttgcactctgcatttaccgttccccgcaatctatcagattaaccttgcagtttttgtataccgtcggaagccccgtcactggatcctccgctgcaatatttgccgtacggtttcccggatacatccgttctgttttccatccgccatttaccatatccggaaacttcacaaccaccacaaactccttgaactcctgcagtatcgcattccactctgctgcatccagcatggtccaagtcagaccgtcgatcttgtcctgatcacgcccgattcgctgtcctacgaactctcccagagcgttcctgccgtcagatacatttgtagccactgtaagaccgggaccgatatcataacttttatagggatgtccattgataaatatcatatgctgcctcctatccccgcagcggataaccgctccggtcttccaactgtttcagcttattcttaatgtcgcggatatcaatatttactgtcagatccaatgcctggatcacttcaatgatccgtttcagcagatcgatcatcatcagtaaatactggtccgtcatattctgattggacgccatcgcaacagcccgatccaccatagcctgcatcttatcctccggtgccacgatctcgccctgatatctgttatcaccgatcatggccagctgtggtgtattggcacgtacaaaaccgccttgcgccagacgcggaatcgatacagtcgggatatgcgggatattaagcccaaacgacttacctcccagaccaggcacccaatcagggatgtcgaaatgcagattgttaagagcatcaaccatcttgttgattgcacggactactccgttcgccatcgattccaccccggaaaggatcgcatttatcgttgatttgatagccgcccacatatcgttaaagatctgtgatgtggtatttttcacggatgtccatgtgtttttccaactgttctggatcttaccgatcgtggtattgatccctgtctgaattgcccttacaactgtatcaatgactgacttgatgccattccagatcgctgatgcctgagcttttacggtatcccaatgcttatacagtaatacaccggctgtaatcaatgccgcaatcgccagtactacaagcccaatagggctggtcagaaatgcaatagccgcacccaatgccgctgtgacagtcgtagcaatcgcgcatactgcattccatgccactgtcgctgctgtcattgttacctgagctacggtatcggcaatcttagctgctgtatttatagcaaactgtgccgcctgtgttactaatgccgctgtgccctgtgcaaggtttactacaaaatctttcgcatacatggccacaatagccgctgtctcaactttatctgccaccagtgctgcgatatgcgttccaattgcaacaacattcgcagtaaatcctgatgccatccctgagagcattgctaccacaccacctgcattgatgataaattcacccagttttatgacttcccaagcggcaaagaatgcagttactgctgtaattgctccatcaaaacgatcctgtgtttccgtaatccagtccaccgccaaagagattgcttcggtaaatgcatcaaataccggctttgcaatggtgtcgtatgcggtgttcagtccatcccacagatgatcaatcagctctttcagcttatcgaactttggctgaagctcatctaacacaccctggatccggtctttaatctgtccagcattgtccgtgattggcttcgcgattacattgatgatgtccctggcaaatttaccggccagctcggtcactcccataaaggaatcgttgaatattcctatgatgtccgctgtgatctgtttggctgaatcactccgaaatacggagaaaatctcagccactgccgcactgaaattgccagaaatcgtagcaatatcactgccgatgtcaaacatggatacaagatacgtcttgattcgaccgctgttctgacccagatacaggtccataccaccaagaacattatcagctatcgttgcgcctatgctcgccgccgaaccggctgtcttgccaaggttataagcaacagaatcagcaaatttgtttgcagccgtctgaacctctggatccaggaatatgttcttcaggctttccttgatgcctcccagctcactcttaattgactggaatacactggtatcaccaaaaccgtcccagaagcccttagtggccaaagctgccagttctttcattcgatcaatcagagcctgcatcttgctgtcagtctcatccagcgcagaggtatccgccagagaacccatgtcgaagctgtctgagctgtatccgccaccagatccggagccggaagaggaatctgtggactgatcaatgatgttcagctcatcgattcctgttgtaatgcccttgagctcctttgcagtcttctttgccgcatctccgacaccactggtggcattctccgccttaccggctgccgctgccacatcagccattccggatgcagcaccactggaacctttcttcccacttaatagctccgtgaatgacttaaatgcatttgccagagtcatcagcttaccaatgatcatgttgatcactttaatcaccggtgacaacacattgatcaagccctgaccgatcgtggcttttaaactgtcaaactgtagcttcaggatacgtacctggttcgcccatccatcagacgtccgtgagaagtccccgactgcagatgtcagctgatcctgcacaaactggtaccggagtgcaaccttctccatctccgacatctttgctgtagtctttccaaagccgttggctagtgcatagctgtccagagctgtctgagtcatgaccaccccaaggtctttcaggctctctgtctcacctgtaaacactgatttcagcttggtatatgcttcatcctgggaaatgttgtaaaaagatgccacgtctccagccaacccggtcagagtcgtagacatgtcatatgcatccttctcgttgaacccaaatgcttttgacattgctccgaaggttccagtaaattttttcgtcatcgtctccgacagaccgaactgtgctgcagcattcttcgcaaagctgtcaatctgcttgttcatatgtgggaatactacatccactacgttctgaacttctgccagatctgatccaagatcaatgcactctttaccgaaatcagccagcttctttatggcaaatgcactgataagcattgtaccgatctttttcaaagcacttccaagtccactactaatttccttagaagtctgctttgactgatttccaataccttttatatttttctttacatgttcagatccagaatcgctgcttctctcaatctcagtccaggcttttttcatagcttcagactgttccattccctgtttccgatatatccaagaaatagatgcagcttttgccttcatacttttggtttgatctgccagaatggcatcaatttttttacgggcttcgtccacttccccgctcattttctgaaattcttttccagcctgattgcaggattcctggcatcgtttgcccattttagaaaatgcaccagtaaatttatcattgatctttttgctggcatccgcaatttctgtttttaactttccaagatcaaaagatatttcaaaacgaatagctccgtccgctgccatatacttcacctgccctttttataagacaggcacatcggcacagcgtcttagattcttaactcaaatacttttctacattccttatttttgcacttaaaaaatacacctttacagactgcatccgcagatttgtttgcattaaccggatggccacaatatggacaccggactttctcttttcctgtgtccatatcaccctcctgccattgcggccatcatacgttccagatcagccatctgctccgcaaagttctctgcagtaatcttctttgccgaagaatctctccactcattgcggatccgcttctgctccggactaaagtgcttcaggatgttctcatcattttctgaccggatcgctacgatccgacccaaagcagtctccggagagagtccggcaatcagagccttaaactcatcccaggagactgtctcaaattcttttgtccggattctcaacccgtactgtgatagaaaactggacacaatcaaatcccagtcttcaaaaagatcatagtacgggtcactgctccccctggtcagcttcctcaccagttaccagacttatggcttcgttgatcactactactacatcattaaaactcagtttcatcttatcaatctcttttctcgctttctccgagaaaatcagattgtacatagctgcaatttctttcggacccggatcatcccctgcgagacccataatctgaagcatagtaggagcgtctgcattgacctccagctcttttcctttgatcacaaggaccggattaccatcaaaggtcagcttgtctgtaatatctacttttcttgccatcttcgctcctccttataatgttgccgccggtgtgaaggtcggttttccataaacaattgcctcaaactccaaagtatctacattggtagaatcaccgccacccggagttgttacgttgatcacaacatcactggaaagctttgctccagaaaccatagtccactcaaatttggtcataacatcctgaccaaacttccaggcaagacccgcaatgtaatcatttcctacatctccgacagatcttttacctttgaaggagaaactcaattttttaccggtcatggcggattttgcccagccaccggcatccattgcgtaccattcttctactgttccatcaatagacggagaaaaattctccaaatccttcggcatcgccatatcgccgtctacgctgtccattccttttgtaccaaacttaaatacattgttatgtaccgggtacacttttcctgctgtttcagccattcttcattcctcactttctctgataaataaaatccagccagatcacatattcatatacaccgttatcgtccgttcccacgtcctgcggttcaggcaccatcagacggatgtaattgatatgggtatctcctatgtccaggctggatacatttctgatagtttcaaataactcatatgctgctgcttcactctccggcttgctgcgattccagtggaccagcagtgagatcggacgcacatcgtaactggtatagtccaacccgccaagtgcaatgttcggcggaccagaagagctgcggctgtatacaccgatggacttctgctgtttattatccaacttacccatatagacatgctcatcctcggcaattcccaaggacgcaatccattcgcggatgtctgtggtcttcagcatcacacaccactctccttcttgtaaaatctcttaaatgcattcggggcaaaatctgcttcacctccacccggcaaccaatcatccagccattttccttttgcattcggattaccatcatgtttcacatgatgattctttccatctttatctgtccatttttcttcccatggtcctttatggaaattgtactctggatgataatataatcgacgcgcatatggttcatcgtgaatcaacgcaacttttccactttggctttgcgaacaatccacaaagaaactttctccttgtagtgctccatcccttcgtgggacaacacctgcctgctgcacttcatcatgcagtgcctccgccgtctgctccaacgccctctctgctgcctgggacagctcattgatccgcgccatattcagctttaccgttgatttcacctgcatcagaccacctccagactgcagtaattcaccgatccatctggatttctgttcttgcagccctgctcgatccgccgttcctgcccaaatacggtcagtgtgcctccactcaaggatggcagatccggagcaatgtctccggggaacatggctgtaccggtgacctgcaccagcttcttctctgcagtcaggatcgtcttcgttttatcctggaaattacacatcagatctgcgtcaaacacatatttcggtgccccaaggttattcagctcttcagactccagatgtacatgcacaggagtcttgcaaaactgtttttgtatcaaacacggatatttcataacctcacctcgccaaccgacagcacaaacccgtctgacagagctgtgcgtacacatctgccctcatcgcaacaccttttccaacaagcacattccaggatccaccgaactgcattgccacaccattgatgctatagctctgcagcactgtattgatcatatctgcattctccacctcgaaatctgcctgctggcagaccacttcacggatcatgtcctgctggaatgcagtcagattagagaatccctgacctacgattcggttgtaagtcagggtatcaatatgacgactggcctgccggagagcttttgcaagctgctcctccggcacgatcgttccgccatactcattcttgtaataatctgatgttacatacggttcgtatgccatcactccaccgctttctttctggttgcagctttgcctgcaggttctactgcaggttctttctcctgggactccagttcagcgattttggctctcagctcctcattttctttcttgagtgccatataatcttcatatgccacggtctttccggcaccatatgcgatcacttttccatcatcaccgtaaatatcatatccggcaacctgataagccgccatctgaccctcatcaatgctgtatactttattatccttctcagctgtcatgaccattcacctacccttctgcttccgcattgattgcaatgccgcatgctttattctgaatcaggaacgtatctgtgtaataacggttctgatatacatatttatcggcggttctggagtccgttcccggagtgaacagcttcatatacgcatatttatctcgggaaatcacacaggacggatgaagcagcattgcattcacctgttttgcagcagcggccggagtacagccgtttgtaaactcatacttagtcttaaaacgggcagacggcaccgtcttgatctgcacatcatccagaccatgcacacgtctgtcgatcacaccagctgctccgacagacatggttctggtgattccatctgcactcttcagcagcttattgatagcagaggtcacatagaaaatacgtccttcctgcggtacagacaggtcatccattttggacatctgttcgtcaaaccactccaggatatttgcagcagtcagagccgttgtatcaaccactgctccatcagatgcataagtctttgcttctgcatacagcttggaaaaccggtagctatccttctccgggatcgcctgctctgtctcaaaggtgttctggatgttcgccacttccaggacaaggttggtctcgtcgatatccatcggatcaatcgcaaactcgatatctctatcgtgagcgagctttttcggctcccagtcgttggtaatggtccctgaattgaatcccataccggtacggctatgatccttgtagccggataccgtgatcttcgggatcttgattgtctgagcattcaaaaacttgatgcccgggttggaaagagtcaggtcatgggaaataagctctcttgcatatttctgtgccagttctttctcaaatacttctgcgtaactatatactgccattttttatttctccttttattttttgttgccgaagatagaagccagctgatcttcctggctcggctgcggattggatgatcctccaggattaccaacctggataaatcctgcccctcctgcagtctgaggcttcagagccggtacatcctccagcactttcttcagcgcattgtttacagtttcattgttgatctttccgtcctggcctatcgcctgactaaaatctgccagtttcaggatatacgggatgctctttgcatcaattccaagtgccactgcctccagtgttgcagctgcctggatctgagcctgctgagcagcagcctgtgcctgagtcatctgtgtctgcaacgctccaacatccggagtattggcggctttctgctgcttaaaagcagcgattgcctgctccatctcttcctggctgagcccctgctgtttgaaatatcctttcagcagactatcctctgtagctgcctgtttaccggaaatcaactgagccaatttgtcataatcgatctccacaggtgctggtgtcggtgtaggattcggtgccggagtcggactttgtgctggtgtcggtgcaggtgctggatctgcatacatctgcagatccattgctttcagatttttcatgatttttagtctccttccacagttttaagagtgtctctctataacagttttatgggtgtctcccaaacagttaattcagtgtgtctcaccgtagttttgtgccttcgggcataaaaacagcacccaggacttgcctgcgtgcgtcatctgctgttttacggacagctccgagatatctggatcaccgcctttctacggatatccgtctgccatcatacatgatcgtgtcaccgatctgtgccacatcgtcacctcttactctcacccctttcacttccgcatgaccatctctggttcgatacaggattgttgctatgcctctctcgatgcgttctgacaaccaggacggtgccagaatgtccacatctttggtaactgtatagtattttctcacatcttccccaccccttttctaaaaaagagtataaaaataccaccagcctactgactgatggtattaataccataatactgttttttcttttggtaaattactagtctttgcaagacgctgcaactctcttttgacgtgcgatgctgcaaaagaactagcattattatgttctacaacttcattaccccttagcatcatgaacccttttggttctttgccctccggatagtaatcggcagatatcgtatcattatttttccttatgtttttcaagattaccataatactccatcgcctccttcggataatcatatttttctgaagccaattcatgagccttccagtgttccatactaggattttccttcttaattttcatttcaagaagctcatgttcaatcaaggttttgtcatgcggtttgatatcttttccaagcattagcctctgccagctctgtgctattgcacagtctggatcaaaccgtcttcgttccccggtatcaatatccagcagagaattatcttcaaaaagataggctttaatcttctttatgtcagattctttctttccgaggttttcagctatcctctttgtatcagttgagaagctgcgtatttctttgtaatacatttctgcaaaatcatcagccttttcgctaaagatatctgtaattcttgcccctgatattattatatcagagtccaaaatttttgcaatctctttcgctcctgcctttatcttagcctcatcgatgatctttgctatactatccggtatcttctctcccttatccatagcgaggaatccttccgcaaatgcttcatacgggctttctgctgcatatttactaatcttggctgcatccgcttttgctttagcagaatatctggtattgatgtcatacttccaatctccattcataagctttccgcccagttcttttgcttggaaaacactcgacttctgaacatagtctgcttctgcgtgcctgtgtataaagtgaccatactcatgcgtaagcgaatccataagattttccctcactgccatgcgctgggtattaagttcgatttcggcttcagccttggcgaaaattgccttttctctttcatatcctttaatactcttatcagatagtatcctctcagcattctttaacttttctttctggatgtcaataatcttactcttttcccgatactcattcagtgatgcctcagaggcttttacggtctctgcatacttttcgatatcgttgaatttattggaaatatatatcttgtcatccagccaattgtatgaagccgtcgcatcggatacctttgtcgggttgtagacaattcccttcggcatgattccatacttgtccttgattcgtttcaagttgtcttccagcgcatccaccgtttccggtgtcattttcttggaaagttttatctcctccacgattcctgcctcagcaatcctgttttcagcttcagttttataggtttcctgcttaacaagcagtttttctttgagggcatccaggctctcctgagatttctttctggattcaaccagcgattttagcttagccatatcctcatctgttccagcggcatcaagatataccagtttttcgagattcttttctttttctctgccctcgcttatctgcttcttaatatcctcaattctggacctgatggcattgatttccaacttagcactttccttatcaaactctgtatgctgctttttccattcttcctttctctttgcaactcttttctgaaattccgaatcatttcgaagcatttccgtctgtttcttccactcagaagcttttctgccataggcttccttgttctccggatccagtgaatacttggccagacgatcatacttctccacctgacgctgagcatactgctgtctggcttcctgtttcgcctgaagaccaaccttttccaattcttcctccgtccaggtatcatctgcagtggaaatgcctgggaaatatgtagtatggctgtccttgcaccgtggatgataaagccctttgctgatggcatagctcatcagaggataactcttcccactctccggatctacaccatcactccggccgccgctccacacgtcatcaatcagaaccttccctacaaatggcagacacttcgggcagggatttccacgcttggccatgatgactgtggtaacgccccactcctgacgtttctcgccctctccctgcagatatgcccgcttgctggctgtccggattgccatgtccgcatagtcagccagggcgtgtctggctccattggcatactctacacagttcaggccacgggccagcatatctttggtagccatatcaacagctttctcgtaagtgccggatccggtgttcgcatacacctgagcattgaatattgccttgcggtaatcatcctctgcctttctgagcaccgccgtctctgctttctccatgtcctgccgggtcgctttgatcagtgcctccaattttcggtcgttcagcttaaaaaactcagcgatcatagtctgatgtgcaggagatttattttttccatgaactttccagcccttctttatagcctggagtatccggat

SEQ ID NO: 4366 - DNA, 4289 bp, Unknown
  16S sequences of unknown bacteria
cggaatctccctccacgatgaaaatctcacatttggatgcatccctgctctcacagtttgccagctttccgttggaatcaaaagagaatttctgcttggtcagcagattggtcttcgcacgttcctcagattttcggatcttggcggctttttccgcacagccgatcacagtcttcagcgtctccagattccggtcaaaataccgctggatctcatcaccggtcacttttgcggtggccttggaagcatcctggttatcaagctttgtctttgtctgtccctcaaatctcggatccggatgtttgatggagatgactgctgtcattccatttcgtacatctgcacctgtaaaattcgcatctttttctttgaggattcccagttcccgggcataggagttgatcaccgtggtaaatactgtcttgaatcccgtaatatgagtaccaccttccgcattataaatattgttgcagaaccccagtacgttctcatgaaattcatttacatactgaaaagccacttctacggtaatcccttcgctttccccctgaaaatacaccacctcatggagtgtttcctgcgatttattcagatcttttacgaatcctaccagcccgtccggctcatggtattcaatatgctccacttcactgccacggcggtcttcaaagatgatggtcagattcgggttcagatatgcagtctcatgcatacggctcttgacctcttctgccttgaagcgggtcttctcaaagatctccggatcgggcagaaaacggatcttcgttcccgtctttctggtcttaccaagcgtaggaagcagtccatgttccagttcaacggttgggttgcccctctcgtagtggtcatgatgtacatatccgtctctgtacacctctatatccagccaggtggacagcgcatttacaacagaagaacctactccgtgaagtcctccgctggtcttatatgcagaatcatcaaactttccacctgcatgcagtgtggtaaataccagtcgctccgcagacattcccttggcatgcattccaactggaataccacgtccattatctgtgaccgtacaggaaccatctttttccagatacacttcaatctgggtacaatatcctgccagatgctcatccactgagttatctacgatctcatagatcagatgattcaatccttttgtggaaacgcttccaatgtacatgccaggccgttttcgtaccgcttccagtccttccagaacggaaatactgtccgcatcatatgtgttgccttttgccatctgtcaatactccttttctaatttccggggaaaaaagcaggcgtcctgcattactgaggattcctgcttttcaccctactccatatgaatcttatgttccttgtactgccggatctcgtccagcgctgcctgcatgacacggtctccctttgccataccataatctctggtatccactgccatgaccggaatcctctccggtacccgctctcttacgcttgccagtgcacaacgcacctgcggtcccacaaggacaatatccgcatcctctttatcttcatccagtccagccaatgatgatacaataatctccacatccagcagattggctctcgcccaggcaagcattctgtcccttaaaatactggccgaactgccggaataacataccaacaccagtttcattccttgtttctcccgtaccgaacttattccggatcgttatatccgttcggattctgggtctgccatttccaggaatcagcacacatctcatcaataccgtactctgcttcccagccaagctctctctttgctttagacggatcacagtagcaggttgcaatatcgcctgcacgacgcggtttgatctcatacgggatcttcttgccgcatgccttgccaaatgcttcaataacctgaagtacactgtatccgttgccggtacccaggttgtagatcagcacacctttattctctttgaacttctcgattgcttttacatgacctcttgccaggtctaccacatgaatgtaatcacgtacgccggttccatccggagtatcataatcatttccaaatacacccacacatttcagcttgccgatggctacctgtgccacatacggaagcaggttgttcggaatacccttgggatcttcaccgatcagtcctgatttgtgtgctccgatcggattgaaataacgaagcagggttacattccactctggatctgcacgatggatgtccatcagcacctgctccagcatagtcttggtctgaccataagggttggtcggactctgtttcgggcattcttctgtgatcgggatctccagaggatctccatatactgtagcagaagaactgaaaataatgtttttcacaccatgttttctcatggtatcacacaggagcaatgttcctgtcatattattatgataatattcaatcggctttaccacagactctccaactgccttatatcctgcaaaatggatgactgcatccggcttctctgcttcaaaaatcttatccattgccggctgatccagcatatctgcctcataaaatgtaagcgtttttccggtgatctgctgtacgcggtccagtgcctttgcgcttgcattataaaggttatccataacaactacttcatatccactgttcagaagttctacgcaggtatgacttccaatatagcctgctcccccagttactaaaatcttcatgtccttctacctctctgaaattgtaatatatttcccggacgtatcgtatatgcccacgataaaataagtgtatcacacttttttaataatagcaaacgaccggcatgtttttttctacataaccatatatttcttttgccttattaggtggcaggttcacgcatccatgggatccgctggtctggtatatagttccaccaaaactgcctctccaaccggcatcgtgcataccgatattcccgttaaatggcatccagtaactgacaggtgttgcatagtctgcgcctctgagtaccgcatttcttgtcttataggtcagtccaaagacaccacccggtgtgccccagcctctggacatattgcctgataccagcgggctttccatgatcacagatccatctttgataaaatacagatgctgggcacttaagtcgatctccacatacgtgctgcctatgtcattttctcctgttacataaccctctttggtccactgtggagtatgggcgacactttttttatcagcaagcatggtaagaagggcttcctgctctgcctccacgtccattttccatccgtaagcaccgctcttcagctttttctccacaccgcttactgtcttaaaaatgcggacttttccataggtgttataggtatctgccagctctttcacataagcctttgccagttcttcatccactgttaccgttccatctgctgcacgtaccagccactcatggatctgatctccgtctaccgttaccggaatcccatgcatatcataggaaaatgtcaggttggtataggcattcaattcttctgcttctttgttgagtcgctcatcgtcagaaaagatcttcggttcttcataatattcagctccggtcagatcaagctcagcctgtcgggtcgttactgctttccggatcgcttctaccgcatcttccttatggatcatacttccttctacttccgtgagcacctcgtattcctttttctctggaagataatcggacagcttcgcatccaccggagcaatctggttcttcggctggaagaaactcatagcatctacctgtgcagtaaatgtctcctcatcgatctgaatactgcctgtcagttcatcctcaaaagtctcaaaaaagctgaccggccacatccatggacgctgtctgcgcagatttgacctcagttcttcaagtggatcaatagatgcccccagctcttttccggtccgcacttcctccatttcatatcttccccggatcaccagactgtaattctgctgtcgtgcggtcacatccaccgccacctcttccggcgtcatgcatccatagcccactccgtcgatcttcgttccataaaaataatgggtataaaaataccagcatcccactccgtaaatcgtcaggaacagtgccgctgccacgatggctgttatcttcagtacttttttcattttactttctcatttcccctgtatttgcaatgatccagaatcatgtattttcaccgatggactctgcatactgcttataaatcat

SEQ ID NO: 4367 - DNA, 17709 bp, Unknown
  16S sequences of unknown bacteria
acctcgaggcgctcatcaagatggcggccaagcgcggtgcacgcgacctgcgcgtccacgcgttcatggacggccgcgacgtcgaccccaagagcggcgccggctacatgcagcgcctcatcgactacgacgaggatatattcttcaagtatcagggcaccgaggtctccatctcgacgatctcgggtcgctactatgccatggaccgcgacaggcgctgggatcgcgatggcaggcggcaaggggttcggcaagggccgtcccgtgcaggcgatcaacgcctcctacaacgcgggcatcaccgacgagttcatcatcccgacggtgctcgaccacaggggcgtgcgccatggtgacacgatgatcttcttcaacttccgccccgaccgcgcccgcgagctgacgcgcgcgttcacggacaaggacttcgatggcttcgagcgcccctacgtgcccgaggtcaacttcgtctgcctgaccgagtatgaccccgatatcgacgctccggtcgcattccccaaggtcttcccggaaaacaccctcgcggactacctggctgcaaacggtctcacgcagtaccacaccgcagagaccgagaagtacgcgcacgtcacgttcttcttcaatggtggggtagagcagcccaagccgggcgagcagcgcaagctcatcgcgagtcccaaggtggcgacctacgacctgcagcccgagatgtccgagcccgaggtcaccgcgacgctcgaggaggccatcaacaacgacacggcagacgtctacatcgtcaactacgccaactgcgacatggttggccacacgggcgtcattccggcggcggtcaaggccgtcgaggcggtcgaccacggcctgtcgcgcatcgtgcccgcaatccttgccaaaggcggcgcggcgctcatcacggcagaccacggcaatgcggacaaagagctggcagatgacggcgtgagcccgttcacggcgcataccaccaaccgcgtcccgttcatcttggcaagcggcgatacaacgctcggcctgcaggacacgggtgagggcaggctcgcggatgtggccccgacgctcgtcgatatcctgggcctggaaaaaccttctgaatggactggaaattcattgttgactcgcgaatagcttgtcgctacaatactgaactcgcagcgctgagcgttgcaaagtttttgaaggagtaaaggtacgtgaacgcaattcttgactttatgcattcggcaccgttttgctatgtgatgctcgtcatctgggctatctccgcaattgggctgattgtgtttgtcatgatgcattccggcaagggcaccggcgtttccgaggccattgcaggcagcatctacggcaccgattcggggtcgagcattgtggagaaaaatctcgaccgaattactgtggtattcgcgatcgtttttatggtatcgttgcttctgctgatgattgcttatcctcacggatcggttggctaagcaagcatcaaaccttgataacgtgtcggagtggcggaatggcagacgcgctagcttgaggtgctagtgcctaattttacgggcgtgggggttcaagtcccccctccgacaccaaaagacttgaacgaaccggctgagacgaaaacgtttcagccggttcttttttattctcgggcctgcctacagaggggtaatctgtgccagatgaggacgcgttaggacatgcgcttcgagacggtcctcaccgcgaattcccaggccgccgccgtttctaaaattattctggactaaccagaaagcatggtcgtatcatccacgttcaatattgcagacggcgagaaggcgcggacatgcctttgcgtcgtctttttcacagaggagcaaaaaatggctatgaagaagcgcgagctggacggcattcctgccgccgagcagcgaaacgtccaggtaaggcgtgtcatgcttttggtgctgtgcctcaacttgggcgtcgcgctcgcgaaaatcttcacgggctacgcgttttcctccggtgccgtgagggcagatggcatccactcgctgttcgacgccgcgagcaatgttgtggcgctgctgggtgtcgcgattgccgcacgtcctgccgacgtgggccacccgtacgggcatgccaaatacgagactttcgcgagcatgttcatcggcatcttgcttgtgggcgcggcatgcgaggtcggctggagtgccgtgcaggagctgctcacgggcgaggcatctgccgagttctctttcgtgtcggtaatcgtgatggtggcgacgttgtgcatcaacacgggtgtgacgcgcttcgagcacaagcagggcaagctcctcaagagcgcggttctggtggcggactccaagcacacgctgtccgacgtgctcgtctctgcgagcgtcatcgtcggcctcatcttcgtggcagtcgggtttcccattgcggatgccatcgccacgctcatcgtcaccgtcgcaatctttgccacggcaatctccgttttcaaggacgtccatgacacgttctcggatgaggcgcgcatcgacgtgaagctgatcgaggcgtgcgtcatgtccatcgacggcgtgcgctcgtgccacaagattcgcacgcgcggccttgagggcgaggtgtatgcggacctgcatattctcgtcgacccggacatgagcatacggctggcgcacgaggtggcaagcgaggtcgagcgggctgtggaggagaagttcccgcaggtgcgcgaggtgctggtacacgtcgagccggatgttcccgaagagcggctgtaacgcgcagacggggagtcgcgcgagcactgcgcgaagtctaagcttcagcgaatcgagcctttacggggaatcattcggaaaaactgcttgagaaaagaatgaggacccgccgtaagagaggagaggaaggcgggtcctcgcaaggagggatgcgacatcttggtgtcgctgtttcaatgattcgcggtccgagtctgtttcgttgtcgaatcatatcgaaaggtttggggagttcctttcgacaactggaatatacacataggaagagcccttttgggcaaattcaaagcttcgtcacattcctattatcccaccgtcatatttccgttgccaaacggcgcaagttgtgtaggacttgtggacaaagcgcacgtcagggcgcagtctccggctttcagcattgtctgggcacctcttggaaccagacattgcagcatactatgaacaaactgtgaattcagtgtctgcaaaagcaatgaacacgcgggaggacatcggtttcgcattcggggaagcgcccggaaacggctgtctgcggaagcgcgcattttgtcaagacacgtgcatgcacgcgactcgggacatgctatacttccgtgcattgcgttgatggagacagtcgcgtcagagcgtccggtcaaccagagaagagcccgaacggtggaagggctcgggcagggccgacgcgaattcactccggagctgttggctcaacgccgcctgcggcaagtaggccaaccgggtgctcccgacacagggcagacgagtgggttgccgcttttttggcagccaaccgaggtggtaccgcggaatacgaatgacttttccgtcctcgtgtgtgatgcgagggcggattttttatgccctggctttcgctactcgtgagttgtgcagagcaaagaaggagaccatatggcactgcaacaagaacttgaggagctgtgcgcgcagacgctcgactccatcaagggcgcagcaactaccgatgcgctcgaagaggtgcgcgtgggcgtgctgggcaagaagggaacgctcacctcgattctgcgcggcatgcgcgacctccccaaagaggaacgcccgctcgtcggcaagatgagcaacgaggtccgcgacgcgatcgaggccgcgctcgaggaaaagaagcgcgagctttccgcagcagagctcgaggcgcggatgcaggcgggtgcaatcgacatcacgctgcccggccgctcgcatcccatcgggtcgcagcacctgattacccacatcatcgacgaagtctccgatatctttgccggcatcggctacgagatcgaaggcggccgcgagatcgagaccgactggtacaacttcacggcgctcaacgccccgaaagaccatcccagccgctccatgcaagacacattctacgtcgtcgaccgctcgggcgacgtctctaacgtgcgcggcgaaagcgacgtgctgctgcgcacccagacctcgggcacgcaggtccacacgatggagcagcagcagccgcccatctacatgatcagccccggcaaggtgtaccgtcgcgatgtcgccgacccgtcccacctgccgcagttccatcagatcgagggtctcgtcgtcgataagggcatcacgttcggcgacctcaagggcacgctcgactactttgtgaaggcattcttcggcgaagagcgcaagacgcgcctgcgcgcgcacttcttcccgttcaccgagccgtccgccgaggcggatgtctcgtgcggcatctgcggtggcgagggctgccgcttctgcaagcacaccggctgggtcgagatcttgggctgcggcatggtcgaccccaacgtcttcgagatgagcggcatcgacccggaggtctacacgggcttcgcgtttggcatgggcgtcgagcgcctggcctgcctcaagtacgatgtgccggacctgcgcatgctgctcgaaggcgacatgcgcttcctgcgtcagttctagcaaaaggggaggagacatcacatgctagtttcgcttaaatggctcgacacgatggtcaaggtccccgatgggctgcaggacttctgcgaccggctcgacctgaccggtaccggcgtcgagggggtcaacaaggtgggcgccagcctcgaaggcgtcaagatcggatacgtgctcacctgcgagccgcctcccgacagcgaccatatgcacgtcacgaccgtcgactttggcgacggcgaggagcccacgcagatcgtctgcggtgcccccaacatcgcggccggccagaaggtcgccgtcgccacggttggcacggtgctgcccggcgacgtcaagatcaagaaatccaagcttcgcggcgtcaagagcaacggcatgatctgctcggcacgcgagctgggcattggcggcgaccacacgggcatcatggtgctgcccgaagacgcgccgctcggggccgagttcgccgagtggaagggcctcacggatacggtgctcgacctcgagatcacgccgaaccgccccgactgcctgtccatgaagggcttcgcgcgcgaggtgggcgcgatgtaccacatcccgtggagctacgagccgccatgcgaggtgccggggccgcttaacgacgagcaggtctccgacctcgtctcggtagagatcgacgagcccgagctgtgcccgcgctacacggcgcgcgtcatccgcaacgtcaaggtgggtccgtccccggactggcttgtcgagcgcatcaccgcgctgggcgcgcgctccatcaacaacgtcgtcgacgtgaccaactacatcctgttcgagctggggcagccgctccacgcattcgacctgtccgcgttcccgcagcaggccgacggcaagcaccacgtgctcgtgcgccgcgcagaggacggcaccacgttcacgacgctcgacggcaccgagcgccagctcacgagcgacatgacccttatcaccgacggcaagacccccgttgcgctggctggcgtcatgggcgggctgtactccgaagtcaccgagaagacgaccgacgtgctgctcgagtcggcgaccttcgagacgggccgcacctcgcgtacctcgcgcaacctctcgctcgtcagcgaggcgtccctgcgctacgagcgcggcgtcgatgcatctacctgcgacgagtacggagagatcgccgcggcgctcatcgcggccgtttccggtggcacggtgtgccagggctcggtcgacaactacccgatcaaggcagtcgagcccaagctcacgttgcgtcctgcgcgcctgcgcgcgcatatcggcgccgagatctccgaccaagagcagatcgacatcctcaccgacctcggctgccgcatcgagggcaagccgggcgacgatgagctcaccgtgttcgcgccgacgttccgccccgatctcatccgcgagatcgacctctacgaagaggtgctgcgtatctggggcatggaccgcatcgagccgacgcttcccggcggtgcgcatgcgggcgggcgcagccacgagcagaacctgctcgtcaagatcgacgctgcgctgcgcgcgggcggcctcaacgagacgatgacgtattcgctcgtgcccgctgacgaccttgagaaggcgcgcattcccgaagagggccttggcgaggcggtcgagctcatcaacccgatgaacagcgagcagtccgtcatgcgccgcagcatgctgccgggcctgctgcgttccgtcgcctacaaccagagccgtggggttaccgatgtccagctcttcgaacgcggcgtcgtgttcagcgccgccgaggggcgcaagaaccccaaggagagcatgcacgtggctgcagtgctcaccggctcgtggaaccttcccggttggaaccagccggctgtcgcgctcgacttcttcgatgccaagggcatcgtggaaaacctgctgcgcgagctcgctgtccccaaggtgcgcttcaaggcgctcgaacccgacgaggccccatggctgcagccggggcgtgcggcgcaggtgctctccggcggccgcgtgatcggctggattggtgaggtgcacccgctcgccgtcgcggcgttcgaagcagaaagcgccgtcgcggcgttcgagctcgacgtcaagcagctggtcgagaccgcgaccgagcagcgcccctacgtcgacgttcccgtctaccccgcgatcgaggtcgacatggcgatcgtcgtcgacgaggaggtcacggccgagcgcgtcgagcagtgcatcacgagcgcgggcaagaagggcccgttcgaaagcgtgcgcctgttcgatgtgtaccgcgacgagcagcgcgtcggagcgggcaagaagtccatggcgttccgcctgtcgtaccgtgcgagcgaccgcacgctgacgagcgaggaagtggacaaggcccacgcgaagatcgtcgacaaggtcatcaaggccacgggcggcgaagtccgcagctagactgtcttcacaggctttttcaggctgtgcaggtgctccctttccggggcatctgtgcagcctgtgtttttcagcgccgcatgccgattgcaacgcatgcgcgcgaaggacaatgggtaggatagacaaaactgaacaaacggtcagattgggtgagcgggtcgttgaagggcaagcacgaagcagataaagacgttacggaagaaaagggcaaacggcgcctctcgaaacgcgagaagaccgttgccgtggtggtggcggtagccgtggcgctcgctgccgtatttgccggcacgcagctgtacctgcagcagcaggcgcaggcgaacgacagggtatcgagccgcgtgggcgagctcatgagcgccaattccctcgacagcgcgctcaatcctgggacgcccgcgacgcagcaaggtaccgacgccgtcgagggacagccaacggcaaaggactaccagtcgctcatcgactccgccaacagcgctccgagcacgggcactttgcaggtgttcggcacgagccagagtcttccgctggcatccgagctcaccctcaacgccaaactcaagagcatctcgagccactacgagctcagcgtcatgatggtagacctcacgacgggcgagggcatctcgttcaatcccgatgcgcgcatctacagcgcgtcggcaatcaagggaccgtacgttgcgtcgatcaacaagctcaacccgagtggcgcgaaggcgcacgcctccacgatcgagcgggtcatcacggtttccgacaacgagggctacgattcgctgcggcgaagcttcggggactcgacgtttggcacgtacgcgcatgatgcgaatgtgacggcgttcgacccggtgcactggtacgtgtacacgggcgcgcgcgacttcgcgaagctgtggattgagaactacgattacttctacgtgcaccccaacgagaattccgagtgggcgcgcggactgtactcagacacgttgaactccgtcatccaccagggcgtgggctcgcgctattcggtcgattctaaagccggctggtttgcgggggagtacaacgtgctcaacgacgcgggaatcgtgttctcggaagtcaacggcgagtcgcatccgtacgtgctcgccatcttcagctcggcagccgaccagtacgacctgctggccgacctcgttcagtcggtcgacgacgtgcacacggatatggtcgcaagcgaacaacgctgatgtcgtcacctgggagggcgcccgtgcaccctgcgcgagatatgtggcagtgccacgcttttcacgcgctccgtacgcgcatgtgacgcgcggcataaaaaagtccccgcggcgaaggcgcgcagggaccttgggagcatgttcgtaatgctcttagcgcaggtacttgtagtaggcggcgcaagagccctcgctcgacaccatgcaggggccgacggggttttcggggaagcatgccttgccgaacagcgggcacttgttgggcggaatcaccccgcgcaggacgtcaccgcaacggcagcccttgggctcgatggtcggttccacctcgggatggaacttggcgactgcatcgtagcgcgcgtactcctctttcagcttgtagcccgaattgggaatgtcgcccagaccgcgccacgtggcatccgccggctcgaaggtctcggcgatcatctgctgggcagcgggattgccctcgtccatgacgcagcgcttgtagtcgttgacgatgcgcgcctcgccggctgcgagctgcttgagcaagatcgcgatgcccgatagcaggtcgacgggctcgaagcccatgatgaccccggggatgtggtacttgtcggccaagaactcgtagggctccatgccgatgatggtgctcacgtgaccgggcaggatgagtgccgtgatctcgacctcggggtcgttcacgagcgcctcgagcgtgcggggaacggtcttgtgcgcggtaaacacgctaaagttctcgacgcctttgctcttggcgcgacgaatggtcgaggaaatgagcggagtggtggtctcgaagccaacgccgacgaagatgacctccttgtcggggttttcctcggcgatccgcaggccgtcgagcggcgagtacacgatgcggatgtcgcgtcctgcggccttctcggcgttgagcgaggaagtcgagccgggcacgcgcgtcatgtcgccgaaagtcgtgaggatgacgtcgtcgatgcgcgacagcgcgatggccgtgtcgatgtccttgttcgccgtcacgcagaccgggcagcccgggccgctgatgagctcgacgccctcgggcaggatgctgcggatgccgttgcgtgcgagcgcgaccgtgtgcgtgccgcacacctccatcagcttgacggagccgccgcatttctcgacagctttggggccgacggtgcggatgacctcgacgagctctcgtccgagttcggggtctcggaaacccgaaagatcgagtgccatctacatcgcccctgcagacacgcccatacccggatggtcctcgtcgatgaggtcggggaactgcctgatgagctcgagggtctcgttggcgtactgctcgtcgacgacctcgatgccgtagcccgcgtggaccaagacgtagtcgcccacctgtgccttgggcacgaggtcaagcgccacctcgcgctcgacgccgaggatgtcgaccgtgccgagcgcctccttctggtcgatgctcttaacctgtgcggggattgccaaacacatgtctattcctccatcagccttgcccgcgcgacgacggcctggccgtaggcgatacagccgtcgttggggggcaattctcgattcgtgtacacgtcgaacccgcgtttgcgcagaccttccttgagcccttgggcgagcaggcgattgaccatgcacccgccgctcaaggcgaccttggaaagcccgtgcgcgccgcgagccttctcacattgctcgatgataacgtcgatgacattacggtgaaatgacaaagcggtgagcgggtcgcccgggaagtacgactcgtgcgcctcggcggcccagctgcgtatgtcgccgccacgttctgcgagctctgcgcgcgccgccgcctcgagcaggcaggccgcctcgccgtcgtagctcggtttgccgcaggcgccgagcagcaccgacaccgcatcgaaaaagcggcccatggacgtgcagatgggcgagttgatgcccttctccatcatctggtcgagcagctcgcggttttccagctgcgaaagcggacctctgaactgcgggttgtcgcgccagaactgcgcgaagaacggcatgcggctcgtctcgtacgacttgagcagcgcgtaggcgacgcggaccgggtccttgatggctgcagcgccgcccggcagcagaaacggcggcaggtgccagaagcgcctgaactcggaccggttggcgagcagcacctccccgccccagatggtgccgtcggtcccgaatcccgtgccgtcgagcgcgacgccgatgacgggctcggtgagcatgttctcgcccagcacggaggcgatgtgcgcatggtggtgctggatttcgacgagcggtatcccgtgcgccttggcatactcgcgcgcccatttgctcgcgaggtactccgggtgcatgtcgcaggccacgacctgcgggttgagcccgaacagctccttgtagcggtcgaaggcctcctcccaggcgcgccaggcgcccaggcgctcgaggtcgcccaggtgctgcgagaggtagacgcgccttcctgcaagaaaggcgaaggtcgacttctgctcgggcccggcggcaaagatgaccggcgcatccgtgccgggcgcgcggccatcgagcatgaggggcatcggcgcgaacccgcgggcgcggcgcacgagctgccgggtgccgtcgtcgagcacgcgcacgacagaatcgtcgtagcgcgcgacgatggcgcggttgttgcccaaaaacgcgtcggcgatctttccgagcgcgtcgcgcgcctgcgcgtcggtggcgacgatgggctcgccgctgcggttgccgctcgtcattacgagcgggacgtcaacgcagtgcatgagcaggtgctgtaccggcgtggagggcagcatgatgcccagctcgggcagcttgcccgcgatgccgggggcgattgcggtaccgggcttgcgctgcagcaagacgatggggcgtgcgcggtgctcgagcagcgcggcttccttctcgcccacctcgcacagctcgcgcgcgtgcgcgaggtcgcgcaccatgatggcgagcggcttggtggggcggtgcttgcgctcgcgcagcgcccgcacagcctgttcgtcgaacgccgagcacgacagatgccatccgcccagccccttgatggcaagcacctggcctgccgcaaggcgcgaggccgcctcgtcgatgagcgcgtccgactgctcgcgcgtgaggtgcgcggcgggtgggacgagtgcgccggactcgtcgaagacggcgtgctcgaggtcgtcggacagccacagacgcgggccgcacgcaaagcacgcatccggctgggcgtggtagcggcggtcctgctcgtcggcgtactcgcgtgcgcagtcggggcacatggcaaagtcgcgcatcgaggtggcggcgcggtcgtagggcaggtcgtcgatgatggtgaagcgcggtccgcagttcgtgcagttgatgaaggggtagtggtagcggcggtcttcggggtcgaagagctcgtcgaggcagctatcgcaggtggcgaggtcggggctgatgagcgtgtcgcggctgcccgcatggcccgacgccctgatctcgaagccgtcgtactcatgcggcttgactatgctcacgcgcatggcggtgatctcggcggcgcttggcgcgtccgatttgagccggtgcacgaaggcgtcgagcggggaggccttggggtgctcgacccagatgctcacgccgtcggggttgttcgagacccagcccgaaaggcccatcgagcgtgcgaggcgggcgacgaacggcctgaagccgacgccctggacaatgccgttgacttgtatgtcgcgtgcttccatatatgaagtccaattgacggttgccgattgtttcttgaaacggtaggttctatcctacagctcatgccaatttacgataccagcgcgtttttggagggtctatgcaaagggagatttctcgcaggtcgtttcttgcgagcgcggcggcgtttgccgcaatcgccgccgtcaatctgaccggctgcggcggcgggcaggcgtccggctcgtcttcgatcaagattggcaccatgcccaccgaggacatcctgcccatgtgggtggccgagaaagaggggctcttcgacgccaacaacgtgaaggcggaggtcgtcgtctttgactcggcgcagaatctctccgcggcgctcaccgccggcgaggtcgacctggcaatgaccgatcccatgcgcaccgtgaagctctgcgagtccggaacggagctcaccatggagtggatcacgctcgggacggatgcctcgcaggggcgctttggcgtgctgaccggcgcagactcaggcttcaagaccctgtccgacctgactcgatccgagcagggcgtcggcgtggcggccaataccgtccccgagtatgtgctcgacatgctctgcgagcagcagggcatcgaccccgatgccgtcaagcgcagcgaggtcccgagcctgcccgaccgcttcagcctggtgagcgccggcaagctcgacgcggccgcgcttccggggtcgatgctcgcgctcggcgaggcaagcggcatgctcgtcatcgccgacgactccaagggcaaaaacatctcgcagtccgtcatggtagcgcgcaaggcgtacaacacgggcgatggcgccaagcacgtcgaggcagtgcgcaaggcgtgggacgacgcagtcgaaaagatcaacgcgaaccccgagagctaccgcgagctgctcgccgagaaggcgaacctcaacgcgaaggtggtcgacagctacccgatcagcgtctacccgctggcgacgagagacggcaagagggcccacccgccggcggagctcatcgacccgcaggtcgagtggatggccaagaagggctactcgtccaagaagatcgcctacaacgaggcggacggctcggtgacggtcgcgtagccatgccacagcaggaaaagaagtacgagcctttgaccccgctcatgtgtgcgcgcctcgcggcgccgcacacctggccgggcccggctgtgctcacgacgatctttggcggcgtgttctcgatggcgctggggtatccgttttcgccgggcatctggtgcctccttctggcagtcgcgatcttcgcgcagtcggcggtcaacacgctcaacgactgggccgactaccgcgcgggcacggacacggtcgagaactccgacgatccgaccgacgcggtgctcgtctacaacaaccccgacccctcgcacgtgctcgcgctcggcgtcgggtacatgctcgtcgcgctggtgtgcggcatcgcgtgcgtggtctggtcgggaagcgccgtcccgctcgtgctcggcctgatcggcgggctgttcatcttcgcgtattccaacggcaagattcccgtgtcgtacctgccgctgggcgaggtcgtgagcggcgtggtgatgggcggcctgatcccgctgtgcgacgtgtgcgtcttcgcggcgcacgcgtatccgggaagcgggccgttcgacctgttcggccagctcgactggcctttcgtgctcatgtgcatggcgccgttcgtcatcggcgtcggcatggtcatggccacgcagaacaactgcgatatcgagcgcgacgagccggtggggcgccgcacgctgcccgtcgtcctcgggcgcaggcacagcctcgtggtctaccggctgttcgtggtgctgtggatcgcggtcgtgctgcacctgagcttctggtacttcggagatgggttctgggccgcctgcgtgtgcctgctgctcggcgccgggacgatctaccatctgctcacgaccaagctcgtgcacgaggtgcgcggcccgtccatgggctttgtcatgaagggcaacctcttcatcaacggcgcgtacatcttcgccgtcatcatgagcctgctgtaagcgaagcgcgcaggcggcagcaggcgggcaagacgtccgcaagtgcaaaacgacccacgtgccggtctttcctgcacgtgggtcgctgcgttacggggagcaagcgcccgacgggcgcccggacggcgcgctaggagagcgcctggatgcgacggacggcctcggcggtctcgtcggcatcgccgaaggcggtcaggcgtatgtagccctcaccagacgggccaaagcccgcacccggcgtggtgatgacgttcgccttctcgagcagcatctggaagaactcccacgagcccatgccctcgggcgtcttgcaccagacgtacgggctgttgacggcgccgtacacctcgtagccggccttttcgaggccctctttgatcatgcgggcattgttgcggtagtagtcgagcgtctcttcgatttccttcgcgccctgctcggtgtagatggcagccgcgccacgctggatgatgtaggacgcgccgttgaacttggtggtctggcggcggttccacattgcgttcaggctctggccctcgcgcacgagcgccttgggcaccacggtatagccgcagcgtgcgccagtgaagccggctgtcttggagaacgagcggaactcgatggcgcaggtcttggcgccttcgatctcgtagatggagtgcggaatgccgggctcggtgatgaagcgctcgtaggcggcatcgaacatgatgatcgcgtcgtgttcgttggcgtagtcgacccacatcttgagctgctcggcgttgagcacggtgcccgtcgggttgttgggcgagcacaggtagatgacgtcgacgggctcgtcgggcagcgccgggcagaagccgttttcggcggtggtgggcatgtaggtgatgttcgtccacttctcggcggcctcgtcgtagtcgcccgcgcggccggccatggcgttcgtgtcgacgtagacggggtagaccgggtcgcagacggccaccttgttgtcgatggagaggatgtcgccgatgttgccgcagtcgctcttggcaccatcggagacgaagatctcgtcgacgtcgatatcgatgccgcgtgccgcgtagtcgcctttcgcgatggcctcgcgcaggaagtcatagccctgctcgggaccgtagccgtggaagccctcgacggtggacatatcgtcgacggctgcgtgcatcgcctcgatgacggccggggcgagcgggcgcgtcacgtcgccgatgcccatgcggatgagctttgcctcggggtgctgctcgctgtaggcggcggtcctgtgggcgatgtcggagaacaggtagctgccggggagcttttcgtagttggcgttgacctttgccattgatgatcctttcgaaactggggcacgggcgcgccgtgccaggcgcgcgcacgcggcttgtcctttgtcttcggatgcttctacatcgtacgttgcaattgtgtccgtaacgtttcaatgtgtcgacacttttaacacatccgttacgtagcatcttaccctcgagcatatgatggacgtcacgagcgaatttttgagaataggggtgtagcaatgcgctatgagtttgccaagctgaacggagcgggaaacgacttcgtcatgattgaggacctggccgacaagatctcgtttacgccggagcaggtcgcgcagatctgcgaccgccactttggcgttggcgccgatggcgtcatcgtggtcaagccctccccgcgcgaggagtgcacgggctacatggactattacaactccgacggcacgaaggcccagatgtgcggcaacggcgtgcggtgcttcgcgaagttcctcgtcgaccgcggtatcgtcgaccctgcggcgggtttcttcgtggcagacacgctctcgggccccaagccgatcagcttcacgctggatgccgagggcaagctcgccacggcgacggtcgacatgggcgagccggagctgcgcgccctcaagatcccgacctatctgaaggagaccgagacggcgtttgggccggccgttgtcgagcagccggtcaacacgggcgagtcgatcctcgagttcacctgcgtgtccatgggcaacccccatgcggtcacgttcgtgaacgacccctccgagtgcatggtacacacgatggggcccgccatcgaggtctcgcagtatttccccgagaagaccaacgtcgagttcgcgcatgtggacggcgacaccatcaccatgcgcgtgtgggagcgcggctgcggcgagacgtttgcttgcggcacggggtgctgcgcgaccgccgtggcagcgcacatcaccggtcgcgcgccccgcaaggtgcacctcaaggtcttgggcggcgtgctcgacatcgactggcgcgacaacaaccacgtgttcatgaccggacccgcggcccagagcttcaccggcagcttcgagatctagggcaggctgcttttttcgagacgccggttgcgcgcgtcgggactcgttcccggcgcgcgtttttttgcatagacgcaacggcatgccgcaacgatatgccggagaaggggcggggcggacatttaacgaaagcgaaacatagtcgaaatttacccgacatgttcgctccgtactgttacaagcgcggaccgtaacaccacattctccttagttcgatcggtccgcctgtttggccggagcccccgatatgcctcccaatcagcatattgggggctcggcgtacatagattggggacctcttatgcaaagcaattctgtcgatgcaagccaccagagccgcggcctgtatcgtccgcagtttgagcacgacgcctgcggcatcggcgcactcgcgcacctcggcggcgagaagtcgcaccagatgatcgacgacgccctgtcggtcctggtcaatctcgagcaccgcggcggtgtgggactggaaaagaacacgggcgacggcgcgggcatcctgttccagatcccgcaccgcttcttccgcaaggaagcccagaagtacggccatctgttgcccggcgtgggcgactacggcgtggcaatgctcttcctgccgcaagacgagcagggcatcaacgcgggcatgcgcatcttcgaggagggctgcgcgcagctcggcctgccgctgctgttctggcgcgacgtgcccgtcgacccgcgcgacctgggcgccacggcgcgcgcctgcatgccgacgatgaagcaggcgtttctcgcccgccccgagagctgcccgcagggcatcgagttcgagcggctcctctacgtgtgccgccgcaccatcgaaaagaaggccgacgccgagtttgccctgcgc

SEQ ID NO: 4368 - DNA, 32367 bp, Unknown
  16S sequences of unknown bacteria
ttttccgatcctcaccgtccctcgcgggacagcttggttagtataccgcctttttctccttttgtcaacacttttctgcatcttttttgcctttctttttaccaggcctgaaaaggccctataccgcagccattccagagggatagcagggatagaaaaacccctccagccaatgctggaggggtttcttttttaccgataagacttcttcttggcgcgggccgcttcggacttcttgcggcgcttgacgctggggctttcataatgttctctcttacggagctcggaaagcacgcccgactttgcacaagaacgcttaaagcgtctcagtgcgctgtccaaagattcattatcttttacgcggatctctgacatttcattccctccccccgtgttataaccaatcagtataggcagatttaaacactcctatattatacgcaggcaaggggggtttgtcaactgtaaatcacgcgggttttacaactatattgacgattctgccgggaatgacaatgactttcaccacttgcatcccttccagagccgccgccactttgggctcggccatggccttctcctggatctgctccttggtatcctgggcgccgatccacacagtgcccttcaccttgccgttgatctgcacgccgatctccagggtgtcgtccactgtcttgctttcgtcatatttgggccagggagcatacaccagcatctccttgccgcccatgcgctcgttgagctcctcgcagatatggggcgcaaagggagaaagcagcaaaataaaggtcttatactcggcctggttgactccattgtccccaaaggtattgagcaggctcatcagggccgcaatggcggtgttgaacttcaggttctcaatgtcctcggtgacctttttgatggtcttgtgcatttccccttcgttcttttggctatagctgtccccaggctgcacctggtcaaacagggcccatacacgctccaggaagcgacggcagcccttgacggcattctgggaccagggagcagccttttcaaagtcgcccaggaacatctcatacaggcgcatggtgtcggcgccatagtcccgcacgatgtcgtccgggttgatgacattgccccggctcttggacatcttctcgccgccctcgcccaggatcataccatggctggtgcgcttctgatagggttcgggctggggcacaacaccgatgtcatagaggaacttatgccagaaacgggaatagagcagatggagggtggtatgctccatgccgccgttgtaccagtctaccggcatccagtattccagagcttccttggaggccagctccttgtcgttgtgaggatcgcaatagcggaggaaataccagctggaaccggcccactggggcatggtgtcggtttcccgcttggcgggagcgccgcaatgggggcaggtggtattgacccagtcggtcatcttggccaggggagattcgccgtcgtcggtgggctcataggaatccacttcgggcaggcgcagaggcagctggtcttccggcaccgggacccaaccgcatttttcgcaataaaccagaggaatgggttcgccccaataccgctgacgggagaaaacccagtcgcggagtttatagttgaccttggtttcgcccttcttctctttttccagccattccacgatcttgaccttggcttcttccacgctcaagccgtccaggaagccggaattgaccataatgccagtatcgcagtcggtgaaggcttctttctccacatcgccgcccttgaccacttcaatgatgggcagctcaaactttttggcaaactcccagtcacgggtgtcgtgggccggtacagccatgatggcgccggtgccataggacatgagcacatagtcggaaacaaaaatgggaatctcctggttgttcaccggattgatgccccggacgccctcaatgcgcacgccggtcttttccttcaccagctcggtgcgttcaaagtcggatttccgggcagactgctcctgatattcccggacatcatccatgttctggatctttccagcccatttttcgatatagggatgctcgggagaaataaccatataagtggcgccgaacagggtatcgggccgggtggtgtagatctccagcacatcgccctcggtggtgtcaaaacgcacctgggcgccggtggaacggccgatccagttgcgctgctgggtcttgacccgctcgatataatccacctggtccagatcgtccagcagccgctgggcatactcggtgatcttcagcatccactggctcttttccttgcggatgaccgggctgccgcaccgctcacacacgccattgaccacttcttcgttggccagcacgcatttacaggatgtgcaccagttgacgggcatggtggtcttataggccaggccctttttgaacagctggaggaagatccactgggtccacttataataggaaggatcggtggtattgacttcccgggcccagtcaaaggacagacccaaagaacgcagctggctcttgaagcgggccacattctgccgggtcacttcttccggatgcacatggtttttgatggcatagttttcagtgggcaggccaaaagcgtcccatcccatggggaagagcacattatagccctccatccgccgtttccgggccacgatgtccatggcggtatagggccggggatggcctacatggagaccctggcccgaaggataggggaactccaccagagcgtaatacttgggcttgtcgtatttgttttccgcccggaaggcctgggcctcgtcccacttatcctgccatttgtgttctatggccgtgtaatcatacttcattttgtttcctcttccttctttacaagatagggctctacatccactttctgggcatcggaccagagccgctcaatagcatacagttcccgggcttcctccaggaaaatatggaccacaacgctggtgtaatccatcagaatccagttggatgtgaccccttcgatgtgatggggcaccacttcatgctcccgcttcagcttcagttcgatctcttcgctgagggcccggatatgggtggtggatgtgccggtcatcaccacaaaatagtcggtgagggtggtctgctcaaaaacccggatggcagtgatgtcccgggcctttttgctgtccgctgcccggacaatggcttccagtgtctgttcaggtgtcatatattttcctccgattgttcgtgataggttcacgcttatggcgtggttggctgctgaatgcccggatcggtgtctcccgtctccggggtgatgggatccggtgtgggctccggttccggctcaggctcaggctctggctcgggttccggttccggtgtgggttctggctcaggctccggcgtcaccgtttcgtttccgccgccttccggctctgtgggcttgctggtctcgccgccaggctgcgtggtagaaccgccgccgctgggcttactccctgaggagctggaagaaccggacgaactggagctggaaccggagttctgggccggcggatcgtcgtcctccccttccgaagagctgctggaagaagaaccggaaccggccggggccgatgtggaatacttgctgacatcgatcaggttgagcttggtcacatcgtccttataaggattgagcagctcattgaccatctccaggatctcttcctcttcgggcacaaaataggactgcatatggccgtagtccgcctcatagaggtaggccgagtggccgggcagagtggtcatgtcgatgttgttgaagtccattttcagcgcctgcattccaaaccaggtcagctcgctgagagtcaggttggtctcggtgttgtccagcacggctttggtcatgtcccccagattgagcagattctcagggctgaggatcttcttggccacggtgcgcaggaattcctgctgcatcttgatccggccgatgtctccttcggcataaccgccggccacacccggattgttctgacggaagcgcaccagctggatggccttttcgccgtccagatgctgcattcccggttccagatagatgtggagatcctgggaaggatcgtcccacaccatataggtgggcacattgaagtccacaccgccgatcaggtcgatcagctcttcaaagccttcaaagctgaccaccacataccggtcaatgggaatgcccagcagcatttccagctctttttccagctgctccggcccgccgctgaagccgccgttgatctttttgatcttccgctttacattggacatggtatcccgggggatgttgaccatgttcacctgctgggtctttacattataggatgccacgatgatggtatcggtacgggtaccgccatcgtcggtgccgcagaacatgaaggtatagtaatcatccttccgttcccggtcgccatcttcgatgaagggctccaccagatcggcgtagggatcgtcttctccctcgcccaaggtgacctccggctcctttaccgacacatcggggggcttggcaaaggccttgaggaaggcatagacccccactcccagcaccagcaatattcccagaacgatcaacgggatataccgggctttgagccgccgcttctttttcttcttcccgccctgatcggcctggatcttgctttcgccattcccaagaggctttccaggagctttccccggccgagaaggcactcctcccgcctctttgcccttggcctgaggcttggacgcgttttccggccccttcttttccgaagaggatgccggtttaggcgtgccttctgtttttttcaccttctcttgagaaggggtccccgcctgtttctccagcttttccacctggggaagaggggccgtttcgtcatggatggcagaaggttttctgccgtgatttccaccaaatatcttcatttcccattctctttctttgaccgcagatcgtccaacgcttcctgtgagcgccggtcaggctctccgcccttctgacgcacatgctctatggtgtcgctcagcgcctgtatcatggcctgatccagatcctgccggcacaggctccgcaatcgatccactccaggataatcccggcccggctcaatgcaatcggccaggtaaacgatcttgtccagagtggtcatatcccggtcccccgtggtatggcgggcgatggcctgcaccacctgggggctggagccgaatttgtcctgcgccaacgctgcggccgtcttcccgtggagcagggcagtattctgttcaccatagtcaaaaattatatcgtactggcggcacaatttcaactgctcctggatatccaggcacttggtggcatcgtggagcaaagccgcttcccgcgcttcttcctctggcaccccgtattgccgggccagagaggccgccacctcttccacgcccagggtgtgccgccagcgtttttcggtcagatgctcccgtaccgctttccccagctcttccagccgggaggatggctgatacaggccgtggctctggatataccgggccacatcttcatccagctcactttctccgcctccggccatcacatcctggcgcacctgggtggagctgaggacggtgaccgggcaggacaccacatcgctttccactcccagcgtctctttgagaaagacctgctgccgctggatcttttctttttcctgttcctcccgggccaccaccgccagacggcaatagcaggcgatcttctccggctggcgccatttgtggaaggaaaggaacatatcggtccccatgatcagccagaaatccgcccccggatattctccggccagctgctccacggtatcgcaggtatagctgggccccagacgggacagctccagatcacacacctgggcccgagggatcttccgggcgatgatctccgtcatctccagccgctgccggggcgtggcgctgcccgccggcatggacttgtggggcggcacaaaggcgggaatgagcagcagccgggtcagttccagctgccggacacaggccgccgccgcccgctggtgtcccaggtggggcgggttgaatgtgccgccgaacaaaccgatccggaccttttctcccttattttccaagatcgatcaccgggttcttctcgttctttttatagagaacgaaccgggaaccgatgcactgcaccggttcggcatcgatggcctccgccaagacttcgcaggcctcccgagtggtgagcagggcgctctccagcacccgcaccttgatcatttctttattggagatggcctgctgggcctgggtaatgacgctttcggtgatgccgcccttgccgatctgcatgacggtgtccaggccattggccagggagcgcagagttgctctttgcttggatgtgatcatgttattttttctcctcttctttgcctttcatttcttccgccagtccggcggcgcactttgccatggcccgggcccgatgggaaatcttgttcttttcttccccgggcatctgggcaaaggtcattttatattccggcaggtaaaacaccgggtcgtagccgaagcccccttcgccctggggctcttccagcaccaggccgggacattcgccccgccacacccgttcggtgccgtcgggaaagacgcaggccaccgccgaaacaaatctggcgccccgcttctcccggggaatattcttcatattgtggagcaaaaactggagccggtcccagtcgctgcctggacaatagcgggccgagtggattcccggcgcgcctcccagagcgtccaccgccaggccggagtcgtcggccagggccggaaggccggaggccttgcaggccgcccgggctttgatgagggcgttttcctcaaaagtatccccatcttcttccggctgggtgtgcacgcccgcttcctccatggacaaaacctcaatgcccagtccctggaggatggcgctcatctccccttttttcttttggttgttggatgccagtacaaatctcacagcagatcacctatggcttctttctgggcggcgatcagctcgccgatgcccttttccgccagagcatacatggcgtccatctcctttttggagaagggccgctcctctccggtgccctggagttcgatgatgttgcccttgtcgtccatgatgaaattgaaatccacctgggcgccgctgtcttccacatagcaaagatccagcagggggttgtcactgaccatgccgcagctcaccgccgccacatagccccgcaggggcagcttttgggaaatgccctcctggcgcagcttgtccagcgccagcaccagagccacaaaaccgccggtgatggaagcgcagcgggtgccgccgtcggcctggatcacatcgcagtcgatggtgatggtccgctcgcccagggcgtccatatcggtgaccgagcgaagggcccggcccaccaggcgctggatctccgccgagcgaggggagagcttcagcttgctcacatcccgccgtcctctggtgttggtggcccggggcagcatggagtattccgccgtcacccagccgctgccgcttccctttttgaaaggcggcacgccctcttccacagtggcgttgcagatcaccttggtgtcgccgcactcaatgagcaccgatccctccgggtatttgataaaatctttggtaatggtcaccggccgcatttcctccggctgccgtccatcatagcgtctcatgggtccttcctccttctttattcaaaaaaggcctgcacaaactggcctgcgtcaaattccagcagatcgtcggcggtttcgcccacgccgatgaacttcaccggcacgcccagccgggcggaaatattgatggcaatgccgcccttggcggtgccgtccaacttggtgagcaccagcccggtgagggtcgccgcctgattaaattgctcagcctggctcagggcgttctggccggtgacggcatccagcaccagcaaggtctccttatcggcctggggcagttcccggtcgatgacccggttgatcttggccagctcgttcatcaggttggtcttgttgtgcagccgtccggcggtgtcgcagatgaccacatccacccctctggctttggccgcggaaatggcgtcaaacaccaccgccgccgggtccgctccttcgctgtggcgcacgatatcggcgccgcaccggtcggcccacaccgtcagctgatcggctgcggcggcccggaaggtatcggccgcggcaaagagcacctttttcccctgggccgtcagcttctggcccagcttgccgatggtggtggtcttgcccacgccattgaccccaatgaccagaatcaccgaaggatgggtgttgagatggagcccatcgttgggggtcatcttttcggtgaggatctggcacagagcttccaccagctcctccttggtctcaatgctctggcgtttggcccgctcccgcagctcgtcgatggtctcggcagcggtctgagccccgatgtccgacagaatcagtgcatcctccagctcttccagcgtctcttcgtccaccttgcggaacaccgacagcaccgaatccagtgtctcaccgatgttggccttggtcttttgcagaccgctgcggatcttatcaaaaaatcccatgtttctctttcctcctgattgattactccatctattcttccatcttctcctgaagggaaacgcccagcttttcttccacctggctcagttgcagccgcagcagcttggtcaccccctgctcctgcatggtgacgccatagaggatatccgagccctccatggtgccccggcggtgggtgatgaggatgaactgggtgctctggcacaggcggcgcatataccctacataccgcagcacattcacatcgtccagggcggcctcgatctcatccagcacacagaagggcgtgggccgcactttcagaatggcgaaatagagcacaatagccaccagcgccttttccccgccggacagcagggacatggcccgctggctttttcccggcagttccacatggatatcgatgccgcactccaggatatcttccccttcctccagctgaagccaggcctttcctccgccgaacagctcctggaaggtttcgccgaagtgcttatcgatgcgcacaaattcccggccgaagatctcccgcatattctgggtgagatcgccgatgatgtccaaaagatcgcctttggccttttccagatcccgtctctgttcctccaggaactggtatcgctcatggaccttctggtattcctcgatggccccgatgttcaccggccccagctttttgatctctccccgcagctgtcccagccggcgctgggcttcgctgcggctttccatgggcttctggatctgctgggccgcagtgggagtcagctcatagctttcccacattttatccagaacctgcttttcctccagctggagctggctggccttgctttccagccgggccttttcccgctccatacgcaagatctcgtcgtttttctcctgggcttgccgcccattctgggtgcgctggccctcaatacgcagtttttcctctgccagcgtttccagctggctctgctttttctcccgcaaagcggtgtattcctttttcaccgcttccttttcttccatatgcctggaaagcatcgtttcctctgcggaaagctcctccagctcccgctgacgctcttcccggtccccggaaagggagcggagcagctcttccagctgaaagaggctttgctccagcgctccaaggcggctgtcctcctgggctttctccgcccgtttttccagcagctgctcttccaaagtccggcggctctgcaggagttcctggctttccgccaacagcgcttccaaacggcgggccgcttcttcccgcttttcggatacttcctcccgggcctgcttgttttccgcaagccgtgtctccaatgtcctgcggcgctcctgggcgcttccctgctcctccagcaatccttccagagcctggcgcagacttcccagcagcaaagcgtgctgactttgccgggcctccagggattgcagagccccttgcgcctggttcttctcctcctgggcggcctgagcgtcattctctgccttcttccattcgccctgggccttctgaacctgtccggccagctccttcaaatcgctgcttttttcctccagcgcctgctgcagccgggcaatctcgtttttccgggagaggatgccggtgtttttattcaggctgccgccggtcatggcgccggaattgctcatcaactggccgtccaaagtgaccatccgataccggtgaggatagcggcgggacaggcgaatggcgctgtccagatcttccaccaccgcagtgccccccagaaggctgcacaccacattgtcgtaaatgggctcccgctgtaccagcgtatcggccatgcccacaaatccgggttcgccctccaaagggcggccatctgtcttccggggggccatggccgataccggcaaaaaggtggcccgtcccaggtcccggcttttcagaaaaccgatggcctgtttggcgctttcctcgtcctttgtgacgatgttgctcatggctgcgcccaaggcgatctcaatggccacggcgtgttcgtcccccacggagatcagctgggataccgggccatggatgccggaaagcacccccttccgggcagcttccagggtctggcgcaccgcccggccaaagccttcgtaatcccgctccagggcctggagcatttccaatcgatcggaaagggtgcccagggcacgcttttcctcctggtatgtttccagcagcttctgggccttttcccgccgttttctgacccggagcaaaaagccttccagcatattcccggcactttccgcctgctcccggccctgctccagaaggttctccagatttttggcttccccttcttctttttccagccgttctttggcccgggcaagttccgattccaggtttttgccccggctttccatctcctgtccgccgctttccaaagcggctcttacgatctccagctgatgaagctgctggctgctttgattgagtttctcccgggccgcctcttcccgctgggtctgctcctgctgatgccctgccagctcctgctgccgatgggcgattttcgccagttcttgttctttggctgcaaggatcttgcggctttcctcccgctgctgttcctgaccagttttctgttccacaaggccatcctggcgggtggcgtgcagttccagctcccgctccagacgccgggcgttctgccggccattttcccgctgggtgcccaacacagcgatgtcgctttccaaggaatgaatctggccttcaatattccgcagctccacccggctctgctcggtctccagttccttgtcccgcatactctgaaggaggcgttccccttctgcgtacagctcttccagctcccgcccccgggcggaaagcatccgctgagcattgtccaggtccactttggttttttgccggttctctcccagtttggcaagggaatccatccaaagggagacctccagcacccgcagctcatcccgcagcagcagaaattgccgggcgtcctgggcctgtttctccagcgggcctacctggctgtggagctcggtgataatgtcccggatgcgcaccagattgtcctcggtggcgctgaggcggcgctgggcttcattgcgtttatagcggtaacgggtgatgccggcggcttcctcgaagatttcccgacgctcgccgcttttgacggccagaatctcgtcaatacggccctggccaatgatggagtagccctcccggcccaggccggtatccatcagaagttcgtgcacatccttcagccgcaccggttttttgttgataaaaaactcactttccccagagcggtaataacggcgggtcacggccacctcatcataatccagaggaaggctgtggtctccattgtccacggtgagggtcacttcacaatagcccaggggacggcggcgctgggtgccgccaaagaccacatcctccatccgactgccccgcaggttgcgggtggactgttcccccagcacccagcggatggcgtccaccaggttggacttgcccgagccattgggtcccacaatggcggtgatcccgctgctgaaatccagccgggtcttatcgggaaaggatttaaagccctggatctcaagggatttcagatacaatgccacacccccgcagaaattcttccatattcaatttattgtatcaactcctgggtaacttttcaacattctgaagaaagaaaaaagccacaggggggattttagttgacaattttacaggccatagatataataaaaatgtggaaacccagacggttgccacaacatacaaactacatcaggccgagggttctgccctcagaccacagtgagccgttctgttgcgaccagacggctcacttctttttgttatgaatctgatcccaagcctggaagagaatccaagcgatggaaacaatccaaaaaacctcttgaagtgttatatgtatcacccccttgggaaaagatttcccgcgagggctctatacacgccttcctttccgctctcgcgggatatcaggcaaccgtctttttcaccgtacaccgtctacaaaatgggcaaaactcaactgcggacggcgggtttccacacattgagattatattgcttcgaaccggctgtgtcaacagcggtcaaaaggaatcctggggattcctttttttatggattgaaaaagccggaacgcaaaaaagcgttccggccatggaggcattttacttctgttctgtgagtttcagctcatcgatgagctggagggcgtgttcggggccatccaccagatggggggtatcgtccacaaacagagtgggcagacccacacggctctccttgcgaacctcctcaaaggcgggataattgtcccgcaccttcaggaactgacggagatagccaatgctggaggtaatgtcgatatagacaaagcgtacattgttctgggaaagaacctctttcaccggggggcaggtctttcaaagggggctgccatacaaaataattttacgcataaaaaagtaccgcctttcaattatcagtgtaaccaataacttctgattctattataatgtatgccgaacaaagccgcaagccttgaaagccaaggtcttcaaggcaaattggctttgttcgggtgcaaggttttggagaagaccactccaaagccttgcacattccgttggtgcggcaaaacccaccaacggaaatacacattgtaacaatggttgaaatccataaaatagcgtccctgtgctattttatggattgatgcggcatctgccgcaagaataaaccgcatagcggtgtattctttaaccattattatagagggggcaaatagcaatgtcaagaaaaaatgtatttttttcagttgcagataaaagaaaaaaagaggggcccggatgggccgtttgatttagggttgtgagaagggattattcggcaggagcaagagtacgagtgatggtgctctgagaaacgctaatcacatcgtcgttagcattctgccacacaaaggtgtaattccatgtgttatcaccaatataatctgcctcagcatcggctttcgcaaagaccagatagttgatgaaatcaccgttgtgtgtatcagcgccgccatagacagtttcctgtgtcaaatcaaaagcagcattgtccttccccagattcttagcttccgcatcaccagtgctgcgataaacagttacctttttagcaccttcaggagcgtcaaactgtacaccgaagaagaggccgttgtcgccattcaattcaccgctaggctgtgtcagattttcgatggcctgctcatttgtttcgctatctgccaagaaagctttcgtggttttcactgtaactttaatggcattgcctgcaaaagtcacaccagcagattcataagctgttccataattgtaatccggtgtctcatcctttgcagggccatcgactcttgtattcgctgtctgctcagtcactttaacccagtccttattagtccagaccttggtttctccgttttcaaccagtttggagaaattcggaacagtggcttcggccagtacaacatcagcgcctttaacagtaccagtctgagtaagtgttgcaccctcatccacagtcagggtaacaccatctttaatgaccagggtcttgccagcgggaacttcgcgagcttctgtgagctcacaatctttgttcagggtaaagctggaaatgaacttccagtcatcggtagtgggcaatgtatcgccttcggtgaccggagccgtaatgttcagtttgctgatgtccagagtgtagctggcccgtgttgtagctccttcagaggttttgaagtccaaagtgacaacatacttatctgttcccagcttggtccaagtgctatctttcttttcagcaaaggtgatacccagcttcagatagatgctaccgtcttcacccttcacaaaccggccatctcctttgagagttgccactgtttcttctgcagaagcaaccttgccatcccgatttacggaatatgcaactttctcaatgttgtcaggagatgcaacgccagtcaccttaatatagttgaccatggctcttctggtgtccctattggcatcaccggcattgtcaaaattttcaacttccagctgggtcatcgtcttggatttggtcagatccagctcattgtccgcatcacgggtaatcccagcaggtgcatgtgcttcgtcataagtggacacagcagaagctgtagctttttccatatcaaccttcacaccagacaggtcgataacatacttcacaacttcgccatcgccccactggagggttatatgagttttgggagcggttgaacctgcattgacccaagcgacaaaatacttcccttcgcctacattaggatcgtctactaccaaggtatcatttccattgtcagctgtatcgctagcttccgttccgaaatgatatgctacggtatctttttcatagccatccggagccttgatagcaacaccaacccagtaaccctctgtcttcttctcattttgatgcagaggcacttctttatctgtactcagcttgatggtgacaactttgctgacaatgtcctgggtggcagaggcctcaacggtgggcatcttctcaggagcaatcgccccttcctcactctgatccacaggctttacgccaacaatgccgcccacaggcaggatgggggtaccttcatcctcaccgccggtggagccgccaccgccgggagtggtggtgctgccttcggtctggctggtgccggtggagccggaggaaatcaccttatcgccgccggtggtcacatcaccggtgccgttgtttgtcaccttggtgccgtcggtggtgatgctggcgccgctggagccctgggccgcttcaaagtttgtaacagttccctcgccggacacagtggtgttggcagcagaggtggtgatcttctcgatcttggcgccttcctcggccttgacagtagtatcagagccggacacactcatggtgttgacagtgccattgacagtgacaacagccttggaagcagctgtgttcattgtcttcacagtggtgccgctctggacggaaaccgctgtgccggaagcactctgagccacattcatggtctccacagtggacttctcgctcacaacaaccttggcacttgtgccagccacattcatggtggccacagtagcgctgttcagagtaacagtgccctgggaagcgctggcgttgacttcggcaaaatcgccggtgagcaccacattgtcgctgaccgcatttacattcacggccttttcggcgttgttttccacacgcacagcgccggtgggcttgttgaccacaacgctgcccactgtggtattgccttccagtgtgacagtgcttgtgccgccgccgcgaaccagcagacgaccggaaacggtcacatccttcagcaccacatcgccttcggctgcaccgtcgccaatgatcagatcaccggaaatggtggcgccttccagagtgccggccttgttcagaaccgcattgccgttggcattcacattcagctggctgtcagcaaaataggtcttgaccaggttgtccatcacctgagcaaactcagcacgggtgatgctgctcaggggattcagcttattgtcagaacccttcacatagccggcggccaccatggaagccatggagtccttggcccaatcggccacctgggccccatcagtatagctgttcagcacgctctgatcgccgccgctcagggtgaacagacgggccaggacggtgaaagcttcctgacgagtgatgttggcgttgggattgaggttcacgccatcgccctggaacgcgcccatcagcacggaagaagccatggcatcatagaaccagtcgccagtgttcacatccccgaaagaggaaatgtcggccttgccattggtgccaaaagcacgagtgacaatagcggccatctgtgcacgggtcagattctcgctcgcagcgattttcccgtcgatgccgttgagcagcccattgttgatggcgttctgcagcgcctgagtggaccagtcgttgggcatgtcagggaaggttgtgttatctgcggcaaaagccggttttggcagcatcgacgccaacatggtggcgctgagggccaaagacaacacttgctttttcataggtgtctccccctattataatgtatttggcatcccggggcgcacacccccaaaataccttagggccattataccatcttttcccctaatgttccacctttatatcaaattgttctaaaaaaatttttaccatttcacctgctttcggctaagccttcctttttctccccttcttgccacagccgcccccgtctgctacaatactattggatcattttacaaaaagggagggttttttatggcggcaaaaaatcgggataaactgcggcaaatggctgaaaaaaatgacatcctttttcgggacagagcctgcccccagtgcggcagccgtctggctgtctgcttaaaaccccaaggaaccgatgcgttcccctatctcaacttaggcgatccgcaggctgaaacggcctattattgcccgatctgccggacttatcacagcaccgatggtcccttttccccttatgtccagcccccttccactccctttcccggagatgggaaacgctatcacttcacccgggcctttgttcgggatcgggtcagtcgtgtgctctttatccagggaatcggtgctctctgtgttcttcctctgctgatccatatgctgcgggccactttgcaggatttttccctgttcaactgggcgggaactcttttttgcgccatggccctttttgtattgctttatttcttctcttattatttccgcctgctgggcgtgtgccgccgctccttttttgaattgggagaaaaaggcgttattttctgcgatggcatcgcttctcactacatgccttgggaggatttccgcctggccgaagccattcctggccaggatggcacagaagaaagctatatctttgatacggccacccgcagctttgtgctgaaccagaacctggaaaaccacaaagaagctgccctgcgcatcgcccaccgcctgcgggataccgatgttcccatgaatccccgtttgctccatttggtttattgaccggtctgtttcccacacatgaagcaggaacaaaaagccgtcataaagggaggtgcttgccatgtcacaactggtttttctcatttgccgcacctatcttatcacccttatgaccatcggaatgatggccagtctgacggatttccgctggaaaggtcggaaactgcttcgcattctcatcctttacagcatttggtgcatcatgtccagcgccctccttctgtggctgggcggggagctgcttctccttcgtttgttctttttcacgatctccattccagccatcctgcttgcctactgggcggccaatgataccccggctcaggccgtcttcaattatgccactcaaattcttctgtccctgttgtccgtttccatgatccgttgggccgccgatactcttcatctgtccaattgggccaatcttctgctgacggccctgttttattcggcggccatctatctggaatggcgttttctgcggcggcctttccgcatgctgctcaccgtcattccttcccgctgggggattctcaccctgatcccctgctctttttgtctctatctcatctttctggcctcctggccggtcaattacatcgaaagcagttcccaaagggcctatctctatattgccatcatccctttggttgtggtatatgtggctgtgttcaaacttctcgtcggccagtaccaggtccttttggagcgccagaatgctgcgctgctcaccgtacagatttctgctttaaaagaaaaattgcagactgtacaggaagtggaagaagatatcaagatccagcgccatgatctgcgccatcagctccagaccgtaaccgaactggtggcccgaggcgatacggaatccgcgctgaaatttctggatgcggcgcaaaagcatctggatgagcaaaaaaagacctattggtgccaccttccggtgctggacgccgtattttccgcctattttaaccaagcccaacagcagggcatccgcctggagaccaaaatcgcttccctcagcactttgccggtggaagaaagcgagctggccattgtcctggccaatgccctggaaaatgccattcatgccaataaagacctgcccccagggcagaaggagatccgctgcaagatggtgggcaccccctctgtcatggtggagatttccaacccctatgccacaccggtaacattcaatgatgagggtttgccggtatcctcaaaggagggacacggcttcggtgtgcaatccatcgcggccttctgcaaaaaacatggtgctgtctgccagtttgaagccgctgaaggccgcttttgtttgaagctggtgctgtaaaccagtccatctgttctgcttttccacactatacaatataaaggagcgatccaacatgaacaaaaaagagttcgtctgccaggccatcgaggaaaaacagcagtttttcaacgctgtcagcgatgaagtctggggctatgccgaagcgggcatgaaagaataccaatcggcggaatgtctggaaaaggccgcccgtgaattgggcttttcggtggaaaccggtctttccggcattcccactgcctttgtggcttcctggggcagcggcaaaccggtgattgcctatctgggtgaatacgacgctctccccggcctgagccagaaggccgcctgcccggtgaaagacgagctctctcccggggcctatggccacggctgcggccacaactgcctgggcaccgctgctctggccgccgcctgggccgccaaagagttcatggagaaaaatcacctttcgggcacggtccgctactacggctgccccggtgaggaatacggcagcgccaaggccttcatggcccgggatggtctgtttgacgatgtggacgcctgcttcacctggcatcccggcaccaccaacaatgtgtggctgtgcagcagcctggccaacctcagcgtctttttccgcttcaagggccgcacttcccacgctgcctccacccccttcctgggccgttccgctctggacgcctgcgagctgatgagcatgggcgtcaactatctgcgggaacacatcatccccgaagcccgggttcactacgcctatgtggatgtgggcggcatcgctcccaatgtggtgcaggatcacgccgccgtccattacttcatccgcgctccccgggtgcaccagatgatggagatctatgagcgggtatgcgatgtggcccggggcgccgctctgatgaccggtacccagctggagatccagatccacgaaggcctgagcgactacatccccaacccctccctcaccaagctgatgtaccaggccctcaccgaagtgggtgctcctcagttcgacgaagaggaccggaagctggcgtctgccatccgggagactttctcccccgatcagctgaagagctacgccgagaaatatgccggtgtgcctgaaatgcagcagctgatccagcagaacgccgttctgtgcgatgtggtgctgccctttatcccggaaagctcccccatgggcggctccaccgatgtgggtgacgccagctactgcgctcccacggcccagatcaatatgtgcaccgaggccatgggcacccccggccatacctggcaggtgacagcccagtcctgctcctccatcgcccacaagggcaccatcaaggctgcccaggtgatggcactctccggcctctatgctctggaagatccggagcttttgaagaaggccaaggaagaactgctgcagcaaaacggcggcggttatcgctgccccatgcccccggagatcatgcccaccctgtaagccgggtattttcaaacagcaaaacaccccttctgctctgacagaaggggtgttttctcatttatttttctatttttctattttctctattttgaacacattgattacatcggcatcgggacaacagaacaccgctgtcccttccggctggcctgggatagaaccgccatagcgcagaatatccacatagggaaaggccacatgcatggccatgggacacaattctccccgctgggtatcaaagtcaaaactatctcccacccgatgcccccgatgacatccatgcggtcccttccgatcaatgagagtcagccgaatcctgggtttctccatacagttttcctccttttcctcacttgctcacaatctgttttgctctccccaatcgcacatctgatccagaatagggatgagggattttcctctttcggtcaggctgtattccaccttgggcggaatctgagggtattcctcccgatgaaccagtccatcggcttccagctccttcaaagtggcactgagggttttataagaaatgccgccgatatactttttcatttcgttgaaccgcaccacctcaaaacacatcaaggtatacaggatggtcatcttgtatttgccattgatgagcgacagagtatagctgaaaccggtgtcggccagattggcattggctatacaggttttgtactcttctttttctttcatcttccattacacttccctggaggtaagtatcgcacctgaatgtgcgtacttgttctttggttcattcttgctatgattgtattatcccacctgggaaaagtcaagcccacacaaatgaggaggaacatatatgagcaagaaagtggttgtcatcaccggcagtccccggaaaaacggcaatagttttgccatgaccgaaagcttcatcaaagcggcccaggaaaaagggcattcggtcacccgctttgacgcggccatgatggagatcggcggctgccatgcctgtgaaacctgtttttccaccggaaaagcctgcacctttgacgacgatttcaacaaaattgccccggccatcctggaggccgacgcccttgtttttaccatgccggtttactggtattccatccccgcccagatcaaaggagtgatcgaccggatctattccctggtggtgggaggaaaagacatttccggcaaagaatgtgctctcatcgcctgctgtgaagaagaggatctgtccgtgctggatggagtgcgcatccccatggaacgcacggccgctttgaacaaatggaccatggtgggagaagtgctggtgcctggcgtgctgaagcctggcgatatccaaaaaacagacggctgtgaacaggcagcggccctggccgaaaaaatctgagaaaggcggaaataaacatgggaaagaacatcgtcattttaaacggcagccctcgaaaaaacggcaacacctctgccctggtgcaaaaattcacccaaggcgcccggcaggccggacacaccgtttctgaatttttcctaagtgatatgaaggtcaacgggtgcaaaggttgtttcggcggccacagcagccgtccctgcccctgtgtccaaaaagatgatatggaccggatctatccagccatacgcacctgcgatgtggtggtgctggcctcgccgctgtattattggaatttcagcggccagctgcgcaccgctatggatcggctgtttgctctggaagaaaacgatggcaacctgctgcgtgggcacgatcgggcctgtgtgctgctgatggcggccgagggccatgggtttgaagatgtgctgacctattaccagcacctgatggagcacctgcactggaccgatctgggccatgttctggccggcggcaatatggatgtgggagacattgccggaaagccggaactggagcaagcctatgccttgggaaattccattgcataacaaacagccacaaggccggagcagattgctccggccttcagactgtcgaaaaacctatataacgaaaagggtcgtccgccctacccctatcaatccgcaaaaagccgcaacctgtgcgtggctttttgcacttctcaagggcggggcgccccgctggtccggtggccggacggccatactttctttgcctttctgcatcggacctgcccagcgcgggagcgcagtatgggagcggaggcactccgccagccccttgcaaaaactcgaaaaagtggcctaagccactttttcgacatgcacaaggccggagcagattgctccggccttgtgatttattttttcagaaactccagcaattcttcttttctctcgtgaaaatccttcaatcccagatcgtacagggcctgctcggccttttcatccatggagtaggtgcccactgagctgggctgactgggggcaaacacaaaggctttaccctccttttccagggcgaaaacctctttgaagttttcattgtacacccgatggcgccggcggatggcgttgacgatgttgggatatttgcggcaggccgtccgatacagaaggcgcatattctgaggctttttcacataatcccggctcttggacaaaatgaccaccaaccggctgcatccttcttccaaggcgtgccggacgggaatggcatcggtgaggccgccgtcaaaatagggcacgccccccagtttcaccggatggcaggccaccggaatagcgctggaggccataatgagacgataatcatcctgcttcaccatctctttgccgaaatattccggctgccccgttttggcattggtgaccaccacctggtattctgcgggattttccagcagggccgggtagtccagaggatcttctcctgcggcacagctcaatttcccatagatgtactgcattccaaacagctcgccggtctttaccacgcttttgattccgaaatactcaggggaatggatgtgatcggtgaaaaatcgaagatttcttcccttctgtcccgccagataggaggccagattgcctgaaccggctgaaacaccgatgcaatagggaaaagagatcccctcatccaggaaagcatccagaattcctgcgctgtatgcgcatttcatgcctcccccttccaccacaagcccgattttttcttctttcatatgtactccttttttcttttcacaaatcaattggttcctccctctattgtattcccataacgcagaataaacaaggccgggccttcttcggcggccacgcagttcagtccctcctgcgccagctcatcggcatccagccacagcaccggggtgacccactcaaatccggtgtccactcccggcaacagcacggtgctgtatacggccaccggcaattcccgacgccccaggttctcctggcaccagtctcccaggccctgggccttgctggtatccaccttcaatgtctgtccttcaaaagacagcagtccggcaaagggtgtttctcccccttggctccacatcccctccagcacttgcgtctgctccgcagtcaagctgtcgttttgcgccacagaggccagcacaccctcttccttgggcagcagttctcccagctcttcgccggtgaaagacagttctttctcccatgtcttatgctccgccccgcaggtctcttccagcaccaaaagcagcttttccccaaagggcgggcaattctctccggtcaaagtccactggaacgacacctcacctgcttccagatggctgctttcccagcggccgtattcctgctgaggctcctgggccgaaaccagacgaagcgcactgctctccaccgttcctccccgctgataagacagcgtgatctgcgggcctctggatgtgctttccaccgtcaattccggcggcgtcatccactgaaactccggcgtgcccacacaaagctggtaagccacctcttcttcgtcgttccagcggatggtgatggggatctgctcttccaatgcactgatgggtacgaacactctgagcccttgctccagctcactgtttttcaccgtccactggcgggtcagtccctgattttcctgcttgtaggtcacatcatccccggaatcctcctgggaaaagcccatggccagcaatgttttgctgttccagctcaccgtggtggtgccgtcttctttcagttctccgcctggctgaatgttcagtcccaccatgccaaaaggcgtatggggatctctgtcttcaaaagtttcccgggtctcctgggaaggatatccccacaccagtttttcttcactttccatttccagcttcagcttccgtgtgtccctatcttcttctgcggtcacaccggaaatgggcgaactggtatgggcactctccaacgaaatttgatccataggccacttgtccgcctcatccggtggtgtctccgtcccgcctcccgacgagccagaatccccgtcatccggctcctctggttcttccggcttttcctccggctcttccggccagccagaggggccttgcccttctcccggcgtcaccagactgcctcctcccagcagaactccgccagcccacacatcgtcactccccggcaaaacaatcacctgagtacctggtgtctccacatacagtgcttttccataagcccgcacctgttccacttgtcctgtgcccataatggctccctgatcgccccagctttccatgtaccgtacaaagctcccgggagatgccatcaccacattgtgattggccagcatccgcacattctccacccacgcgctgctgagaagcagccgcacgctgtcgctctccagatccacctgggtgaagaaaccggataaagtcgccatgggtgtcaacactttcagctttgtgacgcatcccatctctaccttcaagtggacgctgtcggcggccgcggacaaaacaacctgatcggcccaggaggcgcccttcatggtcacctgtccgctgccccgcaccaccagccgtccatataccaccacatcctcaagacacacctgtccacaggctccttcggtgaggatcagatcccccattaccacaagctgcgagtaatttccgttttgggtaatcaatgtggttccttccatttgccatccctggctcccggcggtcaagcgctgcggcgccagacgggctcccatctgaacaaattcccctcttgtgatcggctcatgttccgccttttccccctccggcagccagtccaggcaaaacagccgctggaaaatcaaagccgcttcttcatgggtcaatgtttcctggggacgcagataacctccatagccctgcatcacgcccatggccaccacccgcgccatatcctggcggtaccaactgtccctgggcacatccacatagtcctgcatcccggcttcttctgtggctccaaaggcccgcaccactacggccgcagcctctgctctagtgatagggcgatcctctccgccgctttccagcagggtgaacaccgtttcttccggctccccaggctctgccgtttgcgcctttggctgaccatggactggaaaaggccatggcaggatacaaaaaatcaatgcgcaagcccataatcttttgccccatcgtttcatctcgatccctctttctttttctctttctctttacctatccgtatttctgcatcgctttgccattccatctgcaaaggatagctttatcatatcatatattacctgttatatatcactcttcctattctattttccaaaaaaaatgccccaacccgaagtttttcggtttggggccaaagcaaattcccatcaatagagattttttttcttgagcagcagccaggtaagaccggtgatggcgatggagagagtcaccgggaaccaggtatggggcaaaggcatatcctgcacattcatgccatagaagctgaaaacgatattgggaatggtcatcagaatggtgatgacggtgagcactttcatgatgatattcagattgttggaaatcaccgaagcgaaagcatccatggtaccgctgaggatgttggaatagatatcggccatttcgatggcctgtttgaattcgatgataacatcttccagaagatcctggtcctcttcgtacagtttgaggatccggccgcgcagcagcttttccaatgtggtttctgtggacttcagggatgtggtaaaataaaccagagacttttccaatgtgagcagctggatcagttccttgtttttcagggacttatacagctcgccttcgatcttgctggagatcttttcgatctggcgcagatggaacagatattttcccgcagcccgcagcatcaggttcagggtgaagcgggttttcatggcggtgttcacatttttcacaaggccaccggcaaaatcccgcaccaccgaggtctcttccaaagaaacggtaaccacattctgctttgtgaccaaaatagccaaaggcaaagtggaaaacagcataccgccgtctttttgctcctcgctgtagggaatgtccacgatgagcaatgtcacatcgtcctccacttcgatacgggaggtttcctcttcgtccagtgcagcccgcaggaaagcggggtccagctccagggactgggagaccgaggcgatttcttcctcatcgggatggatcatattcacccagcatcccggctccaacgcagggatggagcagatctggttgttttcgcttttgaaataggtgatcatattttcaacgctcctttaaaagcccaggcgcgctgaaaacgcggcggggccgtgtgtagtcattcggtgtctgcaactttcaggctccgggctcacgccgctcactccttcttttcacggattccggaaaaccggttccctccaggggcaaaaccattatagacctgattctccttgtttgcaatcctttttacacaaattttagcttctagagcatcgcttctccccactgctttgtttttctcttcaaatcgcctgttttctcctgttatctctcttttcacttatttcatcctccaaaattctccttggtttttcgtaccaaatgacgaacaactcccccttttcattcggctcccaatcgtgtatactgtgtttgtcaatcaacctgacagagtaggcggatatgggtcaagtgctgaagggacggggagttgccctttggacgaaaagccgttttggcttgccgtagattcgccgcatcccgctgtcacataccggagcggcggccagacctcctctatgtggcaatcacaaactgaggaggtatttttttatgcctgaaaaaacctatctgtcccccctgagccccgctttctggatcgcatcggtgaaggaattcaaacacctgcgcactctggtgatcgccgctttgctctcggccatctccattgccatgggcggccttttcatcccggtgagcgaaagcctgcgggtgtatttttcctttattccccgcgccatcctgggcgcagtgtgcggacctgtggtgggtctggtggccggagcggtcatcgacctgacggagtttttcctctttccttccggattcagctttttccccggctataccctgaacaccatgctgggcgttttcttctatggcctgttcctctaccggcagaagcccaacctgccccggctggccggcgcccgtatctgcatcgcctatctcatcaatgtggggcttggctctctgtggaacgccattctgctgggcaaggccttctggttctatgccgccaaaagcctggtgaaaaacaccgtgatgatccccattgaagtgatcatcctgctggtgctcttcaaggcgctggagccgatccttcagcgttccggtctgatgccttcggccaaggccggcgcccgccgctgatttctactcccatcctaaaaaagacgggctggccgcccgtctttttttatgcgttccaaggccttgccaaaaacaggccgccccgttacaatagatatatgtatgaaaaaataaaagggagcggacactatgggtatacacgacggccacagagaacggatgcgccaacgctatgaccaaatgggcgccgatgggtttcacgaccatgaaatgctggaaatgcttctcagctgcgctctgccccgggtggataccaatcccatcgcccacgagctgcttcatgtatacggctcgctccatggcatctgccatgcgccccgggagtctttgcagaagatccccggcatcggccccaatgccgccactttgctgcggctcattcccggcctgtgccggatgtactattccgagcaggagacccatgtgatcctgaacaccccggaaaaatgcgccgcctatctgatcccccggttcatcggccggacggtggaaacggtattccttatatgcaccgacagcaagcaccgcctgctcagctgcatccttctggccaccggcaacctgaacagcgccgccgtcagctcccgctcagtggtggaaaccgctttgcgcttcaatgccgcccatgtggtgctggctcacaaccatcccaatggggtggctctgccctcggaagaggacctgcacaccaccgaccggttgttcaatgccctggccggcgtcacggtgcacctggtggatcacatcatcgtggccgacaatgactatgtatccatggccgattccggctacttttccatgaacgcttcctattatccataacatccagtatccggcaaatggttgtgccggaacaaatgttctgctataatgttgccagaagcgccgccccatttggcgcggcgccttttactgcccaaagcaaaggaggggcactatgccggaatttcagatcgtcagcgattacaaaccttcgggagatcagccggaggccatcgaaaaactggcccaaggggtggaactgggcctgccggaacagacccttttgggcgtcaccggctcgggcaaaactttcaccatggccaacatcatccaaaaagtgcagcggcctaccctggttctggcccacaacaaaactctggccgcccagctttgctcggagttccgggagtttttcccccacaacgccgtggagtttttcgtctcctactacgattactaccagccggaggcctatattccctccaccgatacctatattgaaaaggactccgatgtaaacagcgaactggaccggctgcgccactcggccacctcggccctgtttgagcggcgggatgtgatcatcgtggccagcgtctcctgcatctactccctgggcgaccccatcgactatgccaatatggtgatctccctgcgcaccggccaggtgcgggaccgggacgagatctgccgcaagctggtggagatccagtacgagcgcaacgacatcagctttgaccgcaaccgcttccgggtgcggggagataccctggagatccacctggcctacaccgacgactacgccatccgggtggagtttttcggcgatgaaatcgaccggatctccgagatcaacatcgtcaccggccaggtgcgccgggtggtggaccatgtggccatctaccccgcctcccactatgtcacccccaaggacaagctggaggtggccatccgggagatcgaggaagaggccaaagagcgggtggccttctttgaaaaagagggcaaactcatcgaagcccagcgtatcaagcagcgcaccgcctatgatatggaaatgctgcgggagatcggtttttgcagcggcattgaaaactattcccgggtgctttccggccgggctcccggctcggcccctcacaccttgctggattatttccccaaagactttttaatgatcatcgacgaatcccatgtgaccctgccccaggtgcgggccatgtaccacggcgaccgggcccggaaggaaatgctggtggactatggtttccgcctgccctcggcctttgacaaccggcccctcaacttcccggaattccaggagcggatcaaccaggtgatctatgtcagcgccaccccgggagaatacgagcgcacccgctcttcccagacggtggagcaggtcatccgccccacgggactgttggacccggaggtcatcgtccggccggtagaaggccagatcgacgatctgatcgacgagatccgccagcgggaaaaacagaaggaacgggtgctggtcaccacccttaccaagcggatggccgaggaccttaccgactatctccgccaggagggcatcgcctgccggtatatgcatcacgacatcgacaccatcgaacggatgcagcttttgcgggatcttcgtttgggcgaattccaggtgctcatcggcatcaaccttctgcgggaaggcctggacctgccggaagtgtccctggtggctattctggacgccgacaaggaaggtttcctgcgcagcgagacctccctcatccagaccatcggccgggcggcccgaaatgctcacggccaggtgatcatgtacgccgacaccatcaccccctccatggaccgggccatccgggaaacccagcgccgccggtctatccaggacgattacaacaagcgccacggcatcacccccaaaacggtgttcaaaagcgtgcgggatgtgatcgagatctcccgggacgccagcaccctggccatgccggcggacagcctgaaaaaaatgaccaagaaacaaaaggaactgaccatacagaagctggaaaaggatatgcgggaagcggccaagatgctggaattcgaatacgccgccgtgctccgggaccagctgaaaaagctccgggaggaaaaatagcctccccatcccagaagaaaggcccccggggtatcatcccccgggggattggtttggaaaaatatgatcgacaaaatcatcgtcaaaggggcccgggtacacaacctgaaaaatgtggatgtgaccattccccgggataccctcaccgtggtcaccggcatttccggctcgggcaaaagctctctggcctttgacaccatttacgccgaaggccagcgccggtatgtggaatccctctcctcctatgcccggatgtttctgggccagatggaaaagcccgatgtggactccatcgaagggttgtccccagccatttccatcgaccagaagaccacctccaaaaacccccgttccacggtgggcaccgtcaccgagatctacgactatctccgcctgctgtgggcccgcatcggcacgcctcactgtcccaaatgcggcaaggagatccgtcagcagaccatcgaccagatcatcgaccaactgatgaacatgggggaaggcacccggctgcaaattctggccccggtggtgcgggcccggaaaggcgaacaccagaagatcttcgaggacgcccagcgcagcggctttgtacgggtgcgggtggacggcaatctctatgacctttcggaagaaatcaagctggaaaagaacaaaaaacacaacattgagatcgtggtggaccggatcgttttgaaagaaggggtgcagcgccggctcaccgactcggtggaaaccgccgccagcctgtccggcggcctggtgatcgcccaggttcccggcggcagcgaaaccctgttttcccagaactacgcctgtgaggactgcggcatctccatcgaggagctgacgccccggatgttctccttcaaca

SEQ ID NO: 4369 - DNA, 29126 bp, Unknown
  16S sequences of unknown bacteria
gacagatatagggtctgtcccacgcagttttcccttatttggattttttattccttactttgcctccatatacaattttttttgacaaaacccctttcaatcgctacaatggtcatagtcattttgtatcaacggaggcattcccatgattgaccaaccctatgaaattgcggatgcccacactcacatctttccgcaaaaaattgcggaaaaagcagctcactccattgcggacttttataaagttaatgccggggacgtgggcacggtggacattctgttggaaaacggcaggcgccttggcattagccattaccttgtctgttcggttgctactactcccaaacaggtgccaagcattaaccattttatttccgaaaactgccgccttcatccggaatttatcggattcggtaccatccatcctggcatgccggaaacggaaatgataacagaggcggttcgaatcaaggaaaaagggttgcgcggcgtaaaactgcacccggatatccaggattttctgctggatgatccgcacatgttcgctctttaccgtatgtgtgaaaaagaacttgatcttccaattctgtttcattgcggcgatgcgcgttatgatcgctcctctcctcaaagactggcacatgtgctggacagctttccggagttgtctgtcatcggcgctcatttcggcgggtatagccaatgggagcaagcttatgctgttttaaaagattatacccggctgcacatggacaccagcagttcattgtcctttctgtctgatgaagacgcgatgcgcctgattgaagggtacggcccagaacgccttatgttcggcacagactacccgttgtgggtcatggaaaaagaaatagaacgctttttctctttaccgctgacagatacgcagcgccggcaaatcctttttggaaccttttccgccctatttcatgtcccttcgggaacaagccgccgttataaatcgcgtgaaatgtgaagattccatgaaaattgctgaaatcaggacaattttttgtttctatttatgatttggacatatttttcctttattatcatttgtgttagtgcgctttttcaaagcgcagcccgtacgcgggttcgaatataggaggtatcacacatgctagaggtcaaaaacctcgtcaaacggtatggcaacaaatatgccgtcgacgacatcagctttaccgttgaacggggagaaatcctgggtttcctggggccaaacggcgcggggaaatccaccaccatgaacatcattaccggctacctctccagtacggaaggtactgtgaccattgatggacatgagattctggaggatccgatcgcagccaagtcccatatcggttatctgccggagcagcctccgctgtatatggacatgaccgtaaaagagtatctgaattttatgtacgaactcaaaaaggtcaagcttccccgtcaaaaacatatcgaggatatctgccggacagtcaaaatcgatcatgtctatacccgtttgattcgcaacctttccaagggttacaaacagcgtgtcggcgtggcgcaggctctgctgggcagccctgagctgttgattctcgacgaacccactgttggtctggatcccaaacaaatcattgagatccgcaacctgattaaagaactgggcaaaaaccacaccgttattctttcttcccatatcctgccggaagtccaggcgatctgcgagcgtgttatcgttatcaacgacggcaagatcattgcggacgatacgccggatcatctggcccgcgccatgagcaatgaaagcggactggctgtgcgtctggagggccctgtaacggatgtcaacaacgcattgcgcgccctgccgggcgttcattcctgcaatcctttgggagaacgggaaaaaggcgtgtttgaatatctggtggagccggaaaacggtgctgatatccgccgcgatgtattccggattgctgccgaaaagaactggccgattctttcgatgaaatccaccgaaatgagtctggaggaaatcttcctgaagctgacttccggagagtatgtggccccacccaagcaggagctcgcttccaagcaggataaaaaggccccaaaaaatcgaaaaggggctgcaacccctgctgccgaaatggcagagaaatctgccgacgacacggcaaaaacaaatgaggaagggagtgaagaataatgtcagccatttttaagcgggaatttaacgcttatttctcatctcccattggatacgtgtttatcgccatgttctactgcctgtccggctttttcttctttctggataacctggcggtaggctccgccgaactgcggtatgtttactccatgctgttcacctgttcagcgctgttaatgccgattttgacaatgcgcatgctcagtgaggacaagcggcaaaagactgatcaggtcctgctgaccgctcccatcgggctgtttagccttttgatgggcaaatttctggcagcacttctggtatatgttattgccatttccattaccttggcttatgcgctggttctgtccgtctttgtttctctcaactgggctgtcatcatcagcagctactttggtatcctgcttttgggcgccgcgctgatcgctgtcggtatgttcatctcttcgctgactgaaagccagctggttgccgccatcgttaccattgtcgtagatgtggcgcttctgctggtggattccctggcgtcgcttatgccgaccacctcgctgcagaatctgatcatgggtctttccatggcagatcactatggcaatttcaccatgggcatattggattttgccgacgccttcttctttttaagtatcattgcgctgtttatcttcctgaccagccgtgtgcttgaaaagagaagatggggttaataggaggaaaagaccatgttatctaatattttgaaaaaccgccgcctgcggatgggcagttttgccacagtgctgacggtgatcttcattgccgtactgatcattttgaacatgattgtatcggccatttcagaacgttatccgatccagttggatctgaccacaggcaagatttacggtctaagcgatgaaaccatcgaatatctgaaaacggtggaaaaggatgtgaacatctacctccttgccacagaggattcttttggcagccccaacgagtattatctgcaggctgccgagaccattaaaaaattccctcagtacaattcgaaaatcaaagtccagtttatcgatctggcaaaggacccggcgtttgagtcgaaatacgcctcctattccatgggcagcagggacatcctgctggaatgcggcaataaagtccaagtcgttaaaaccagcgacctgtttaacctgcagaacgattctagcaccggctatacttacatcaaatcttcccggacagacgaggccattacctcggctatcatgaatgttacttccgattatacgcctaaggtagcaatcctcagtgcccattcttcctttgacgccggtgccttctcttctctgctgagccagaacaactttgaggttgtaacccaggatctgctgctggaggatatcgaccccgaagcagcagccgtcgttctgtttgctcccagcgaagatctggacgaggcgcagctggataagctggacgcttttctggacaacgacggtcaaaaaggtaaaaccctgctgtatttcgccgcggccaatcagcctcagctgccgaatctggaagctttcctgagcgagtggggtattgtgatggaagatgcaaccgtgtacgaaacaaactttaaccgcatctataattatagcccctattacagcattgtcgattttgtcaataccgaaatttacgaggatacctctgcttatctgctgatgcccaacgcccgcgtgatggacaccgcttataccgagcgggacagccggatcgttgaagtccttctgaaattcggctccactgccaaagcgctgcctaacgatgcggcggaagattttgacatcgaaagcgcagaaacctatgcgttccctgcactgattaagtctactcttcaaaaatcgtccggcaacgccaacgccaccggcagcgcgctgctggaatcccacgtgatcgtttcctcctccgctatgagctgtgaatccagcctgttaagcgggagtacctttgtcaacggcaaatactatatctcgctgctcaacagcctgttgggacgtgaatccaacttctccatcaccgccaagacactggatactactacgttgaccatgaccaatttccaaattctgtccatcggcgctgttttcgccatcatcatcccgctggcacttttggttgtcggcgttgtcgtatggctgcgcagacggcataaatagtatcttttccggcttgtgcaacaactgccggctgcaaagaagcaaaatcggcgggcgtatttgccgttgggctgtccgcccgtcctgctttttcaatcgaaatcagaaatggagaacctgttatgtccaaacgtactaaaactttactgctggcgctgattgtactggcgcttttggtcggcctgttttttgttgtgaaactgctgctgccgcaagaggatgaggccacctcctcttctgaggtaagcgcttcggttaaactgatttccatgtcctctgaggaactggcctcagtagaagttagccgtccggaagggggctacgtcctgaagatcaaagacggtgagtcttccattgacggcctggaggggctgcccttagattcagacaaaatcagcagtgtcatatcccaggccacctccatgaccgccaaggaaacgatcgaagaatctcccgccagcctggggctgtatggcctggatcagcccagctactccctcacggtgaccaaaaccgacggcagttcgtttacaatggaattcggcctagaatcctccgcttcgtacggcacttatgtaaagctgtctgactccaatgccgtttatctggtttacaccagtgacctttccagctttgcttataccgccgaagattttgtttccactaaaatcattcctgacctttctgaaaatgcagatttcaaaagcatttcattcagtggggcggattatgcagaaccctttgtcattgaaaagtacgattttgatgcggacggagattctacttattcttatttctcctatgccattacgtcaccgtccttaaaaccggtagatgccgaaacaatctttgcctatgtagatgaaatcttggacacgtcggcacaatccgttctggccggcaactatacagaagaagatcttaaaaagtatggcctggatgagccggacgccaaaatcgaagtgactttctcggaggaatatgaagaggacacggcatttaccttcctcctttcttttcaggataatactgtttacgcaatctgcaacgatgtcccgattatttacactctttccaaagcggactggatgacgttaaaatacgaaactacggttcacagtcttttcctgttgcccagcatttatgaaatatcaaaagtaacggttcagacagctggaaacacttacgctttcgatgtctccggcgagaaaagcgaaacggtcacttacaacggcagttcgattgacaaaacggccttttccaagttttatcagctgctgatcggcgcctctcatgatggtaattacgtaccggatgcgcagccgcagggagaccctgttctgaccatcacctttgactaccgcaacgacaataattccgatacgctgcaattttatgatgccggtacccgaaaactgtacgtggcgatgaatggcaagatcgaattcacgatgatgtcttcctacctggataaggtacaggaggcctgtgaacagattatcaacggcgaaaccccagatcctgactggaaagtttaattctgttttatctgaaaaaagcggcgcttacagcgccgcttttttatttatgcccaaaaaaagcctgatttccctaccttccaataattctgaaaaaagcaggattacatcatcccccttggaccaaaaagatagacgtccgcagatcggaaattttttgaggggactaaattcgtggaatttctcacccttctctctcatacaataaaaaatagccgtctaaaaaccgtaggtttttctaattcaacaaaagaagtagggcggcaaatgcctttttgtcttatttggctttgtttcaagccgctgttaaaaagtatcccccaaactgaccattattctttttctgaaaagccagatagaaaggccctagcagaaaaggcactgtccgttttggctgctgcaaaacagtttacggcagttttgatatatggccccatgtcaaacggcccggaaggccgttttttattccattacgctgagaatcgtttttgctcttcatcgctttttccggatttgctttggcaaatccgaaaaacatatcacacatacaaagaaaaggaagggatttcatgaagaacgatcctggtctgcaggaagaaaagaagatcccggaactcccgaagccctcctggtttcaggtcgccggcgacgtagatgattttattttctattatgaaaccgaaaaaacatgcagccaacggtagcttggtccaacaaaaaatcccggagataactccgggattttttgttggaatcaccaatcggaaatgtgccctcgtttcatggcaccaaacagtcgcttggtaattcccttttgttctttttccatctgccgcagccagttttttgtccattcccgctgcgtcgatccatcaacaggacattggcttttgatgattggatagcccgcctttcgcactgcagaagcgatttcccgctccggtgcgaaaataagcggccgtatcatggtcagatctttacgggaaagataagtcaccggtgaaaagcacccgacccggccttcatgaaacagattcattacaaaagtctccaccgcatcgtcataatggtgccccagtgcaattttgttgcagccgaattgcttggccgcatcgtgcagcgctccgcggcgcatcctggcgcacaggctgcagggattggattcttctctggcctcgaacacaatcggcccaatttccgtttccagtacatgatacgccattcccatactctcgcacatctgcccgatcggcccatagtcggtgcgctgcccattccaccccggatccagtgtgacgccaaccagttgaaatggaatgccgataaatttctgcagtccagccaatccagccgccagcgcgatagaatcctttccgccgctgattcccacagcaatccgatcgcccggttcaatcatcccgtattcctgaatggctttgcgcatataccccataatccgctgcatatcgtttcccgccttgcctgttttttctcattttacttttttcgtaccgaaatagcaacggcaaaaatgaaaatcgagtttaagaaaacaggagaatatataagaaaataggagattttaagagattaaagaaaacaaattaaatttttttcaaaaaaggttgacattcccttttctcaccactataatgatacttgctgcaaacgtctcaactggctttgccgcagccaaaacagtagtttgtgtgaaatgaaacataaatgaagcaacaattcacaggagggaaaaaccatgtcgaccactatgccgaaagccggcgagattacccgtaaatggtatattcttgacgctgctgacaaacccctcggccgcactgcgaccgttgccgcttccattctgcgcggcaagcacaaagtaaactttgcccctcacgctgattgcggtgatcatgtcatcatcatcaacgcggagaaagcagttctgaccggcaaaaaactggagcagaaatattaccgccatcattccggttgggttggcggcctgaaagaggtccagtatgccaaactgatgagcgaaaacccggaaaaagcgatgatgctggctgttaaaggcatgctgcctggtaacagcatcggccgcgctgcattgacccgctgcagagtgttccgtggaacagagcatacccacgcggcccagaaaccggaaaactggactttataattaacgggaggaggcaaaacttatgtacgattctaaaccttatttctacggcactggcagaagaaaacattctgttgcccgtgttcgcgtatatgccaatggcaccggatctatcaaaatcaacggtcgggatatcgatgattactttggcctggagaccctgaagctgatcgtccgtcagccgatggagctgaccgataccatgggccgttttgatattgagtgcaatgttgccggcggcggtatttctggtcaggctggtgctatccgtcacggtttgtccagagcgcttctgcaggttaacgaagaggcttaccgtcctgttttgaaaaaagcgggcttcctcactcgtgatccgcgtatgaaagagcgtaaaaaatacggcctcaaagccgctcgtcgcgcacctcagttcagcaagcgataatttttgttctctgctggcagttgagcttttagtctcagcaaaggcgattgtacaaaataagatattttgtgggaagcttctttctgagaagcttcctttttcttttgaagaaaggaggattcctatgggcaacatttccaaaaaggcgttaaaagcggccttcccgtataccatccccatttttgcaggattttagtttttggggttaacctatggcgtttatatgaatgtatccggattttctttttggtatctggcccttatgagcctgaccatttttgccggatcgatggaatttgtcacagttcatctgcttttgggcgcttttcacccgctgcaggcactggttatgaccctgatgatcaacgctcggcatttgttttacggcatctccatgctggaccgattcaaaagcaccggatgaaaaaatactatctgattttcggtatgtgcgacgaaagcttttccatcaattataccgccgcctctccgccggatgtagaccgcggctggtttatgttctgggtaacgctgctaaaccacttttattggttttccggttccgcgttgggcggccattcggttctcttatccaattgaataccaaggggctggattttgtcatgaccgccatattcattgttatttttctggagcaatggctgaaagaaaagcgctacgataccgccctgattggcattgggctctcggctctgtgtctggcagtatttggacgcaatgattttctgtttcctgccatgtctgggattctcagtctactgcttcttttgcgccatcctttggagaaagcggggtatgcaaattgatgagtattccgcagcagctggtcaccattggtgtgattgtccttggcaccatgctgacccgttttctgcccttcttcatttttcctgataatcggcctactcctccttttgttcggtatctgggctgtgtcttacccgcagcagttttcggcatgcaggtggtctattgtctgaaagacatccgtctgttcaccggcagtcacggtctgccagagctgatcgctgtctttgttgttattgcgctgcatctgtggaaacggcagatgcttctttctattgccggcggaactttcgtttacatgttcctggttcagctggtatttccaggtctgtaactgtgcaaaaccatgacttcccctgccgtgggaatcacattccttcgcagggccgttccttttcaaaaacacaaaaatcactgctttttttagccatagatctttttttgaaagaaaagtgctctttgtttcgttcttaaggtagatgtaaatttacgcagcctttacaaaaaaatccaaaacaccttgcaaatcagttgggtatctcgtataatgctatgtgtttgtgggaaggcaaaacagaaagtggttgtatatgaaaaaattttggaaatggttatgggatcgaccggttctaatgtgcattgctcttgcggttgcactcaatactgcaatggaaatgctcagccgccgttcagtttgggaaggcgtacagtttctggcgctgcatccggttcattttttgtgtaacatcttggttgttttattaacgcttcttttggcgctgctggtaaagcggcgggttttcatgctgtcattggtatccactatctggctgggtcttgcgattgccaactttattttgctgggctaccggacgacccctctagccgctattgatttttacatactgaagcccgttttcagtattctaaagatttatctgaccccggttcagacgattctaattgttctggcttttgcggctgttattaccgggattgtttttatttttataaaggctccgaagcatcaggctttgtaccgtggcgcgctggtttccatcgccatgacttccttagctactttcggtctgattcacttttccattcaggccgacgcaacttctaccagttttgctaatctggccaacgcttaccgtaattacggctttgcttactgttttgccaccagtctgctggacaccggcatcagcaaaccgaaagattactctgccgaggcgatggtcagcctagcggaagatatagagagagaatcggaagaggaagtttcctcttccgatcagcagggttcccctgctgatccggcccagtcgcaacaagctcccaatgtcattatggtgcagttggaatcttttattgaccccaaccgcttggaggggtttacctattcggagaatcccgttcctgtttttaccgagctgaaagaaaattacaccagcggttatctgtcggtacccgccatcggagccggtactgccaatacggaatttgaggtgctcaccggcatgagcctggactactttgggccgggagaatatccctataaaactatcttgcagcaaagcacctgcgaaagcattgcctataatctaaaagagcttggctttggtactcatgtaattcataacaataccggcaccttttatgatcgtcacttggtattccccaatctggggtttgattctttcacctccttggaatatatgaaccatgtagataaaaatccgctgggttgggcaaaagatactatcctgacaacggaaatcatcaaatctctgctttccaccgaccaaagagattttgtttacgctatctctgtccaaccgcacggaaaatatccctcctcccctttgggagatgaacatcccattaccgtcagcagtgacgtcatatcagagcaggatttggtccctttttcctattatgtaaaccagctctatgaggaggatgctttcctccgctctttgatcgagtccctggaaacctacggagaaccgactgtcctgatcctctatggagaccatctgcccagcatttcggcggcggaagaatatatggcacagggagaccttctgcagacagagtatgtcatttgggacaatattggtctggaaaaacaggatcgcgatttggaggcctaccagctctctgccagtattttaaaaaaactgggcattcgcaatggatttctcaacagttaccatcagtcgtttgaggaaaacccccgctatcaggaatatctggaaatgctggaatatgatatgctgtatggcaaacaggccgtttacggaggcaccagcggatacgaacccaccgatatgcaaatgggcgttgttcccatcacattgagtcagtgttatctgctgggggatacgttttacgtattgggggactgttttaccccgtacagccggatttgtatcaatggagatccggtgaacaccgagtttatttctgtcaatgccataaagggaacggatctttctttgaaggacggcgaccaaattacagtgtcccagatcggggaggacggcatcccgctgagcgaaaccgaatcgattgcttttacccacagtgccccagggcgaaaaacggaactagcatcataaaaaagtccgaactgtttcggctgcaagggggaactctttggattatgcagttcctttttatgttgacgatggaacaatattggtctcggaacctttgccgtgtgataagaaaaaataaataatatttaaaaaagcacctgtccgataccggacgggtgctttttctttattggaaagtcgtttttaccggaacacatccaaattctccggcagcatgacataaagatctttgtcatctactaaaaagcagggaatgccgatatcgccgacctcttttgccttgtcaaactccgggcggctgtcacgcagcgcaaggaactttttcagatgggccataccggcggtgatatccacatatccgtaacggattccctctttctccaaaatctcttttgcctctacacaatgcgggcacatggggctgccgtatacaatcactttcttcatcacaatcactccttttatttattgtattttactcaaaggattttgtcaacgcctgcaaaagcagctgttttttcttctttttccctttaaaacatggtataataaggttacttttctcatcttttcccctgttattcgctttttacactttatagaaagaaggtttctcctttggatatgacgctttgcttggctgaggaattccaccttcgcccgcagcaggttcaaaatacaattgatctgatcgaccagggaaataccataccgtttatcgcccgataccgtaaagagatgaccggttctttagacgaccagcttttacgcgaactctcggaacgactggaatacctgcgggggctggaaaaacgcaaggaagaaattctcagttcaatcgaaagccagggtaaactggacgaggcgttggcacaatccatcgccaacgcagccaccttggcagaggcagaggatttgtaccgtccctttaagccaaagcggcgaactcgcgcttctatcgcccgggaagaagggctagaaccgctggcgcagtccattttcacacaggaaaaagacactctttcgccaagcgagctggctaagccattcgtcgatccggaaaaaggggtaaacactgttgatgacgccctgcagggtgccgccgatatcatcgcggaaacggtggccgattccgcgacgctgcgcaaaaccctgcgcaactttttgctgatgcacggcattttgaaaacggaaagcaaacccggtgccgaccctgtctatgagatgtacgccgcttattccgaaccagtggcaaaaattgcgccccatcgtgtgctggccattgaccgcggcgagcgggaaggcgcgctgaaagtatccttggaagcagatctggagcggtgccgcaaaacgatcgtccgcgatttcgtcaaggaaaataccccttgcgcggattttgtgcgcaacgccgctttcgacggattttcccgccttatcttcccttctttggaacgtgaggtccgcagtgcgcttactgaaaaagctgcggaacaagccatccgcgtattcggagtcaacctgcagcagcttttgatgcagccgccggtgaaaaacgccgtcacgctgggattggaccccgcctaccgcaccggctgtaaactggcagtggtagacgctgccggaaaagtgctggatacagcggttatctatcctacaccgccgcagaataaagtagggcccgccaaggaaaaatgtaaacagctgatcgaaaaatatggagtcagcatcattgccatcggcaacggtaccgcctcccatgaatcggaggtttttgtcgccgagcttttgcgggaaatcccccaaaaggtttcctatatggtggtcagtgaggccggcgcttcggtgtattccgcctccaagctggcggcggaggaatttccgcaatatgacgtatcgcttcgttccgccgtgtccattgcccggcggctgcaggacccgttagcggaactggtcaaaatcgatcctaaggccattggcgtgggacagtaccaacacgatatgccccgtgcgcgtctggacgaaacgcttgccggcgtggtagaaaactgcgtcaacaccgtaggggtggatctgaataccgcatctttttccctgttgagccatgtggcaggtatcaatgccgccgttgctaaaaacattgtggcctggcgggaagaaaacggactgttttcctcccgtaaacaactgcaaaaagtcaacaagctgggcaaaaaagcctatgaacagtgcgcaggatttttacgggtgccggaaagcgccgatttgttggataacaccgccgtccatccggaaagctatgaggctgcccgcgcttttctttgcttatgtggctgctcggctgaagatataaaaaatggccggatgccgtctgtgatccaaaatctggagaaatcccgccttccgcagctggccgaccagctgggcgtcggtctgccgacgctgcaggatattgttgccgagctgtccaagccggggcgcgatccccgtgacgagctgcctgccccgctgcttcgaaccgatatcctttctatggagaatttaaaagaaggcatgcagctgcaaggtacggtgcgaaacgtcattgatttcggcgtgtttgtggacattggcgtacatcaggatgggctggtacacatttcacagatttgcgaccggtttatccggcacccatcggaagcggtaaaagtcggcgatatcgtaacggtctgggtgctaggcgtcgatctgcccaaaaaacggatatccctgaccatgaaaaagcctgctgaaaaaaaggagtgaaggtatgaagaaaatcgtcctgcctcgccgcgccctgttcctctggcagctgcgcgccgtcctggtgacctttttggccgcttttcttctgacgcttttgctttctgattttcttttttggtatcgtctgtcgctgattctgatcggacttgcgttccttttctttttctgtgtttactacccgcttaagcggatcaaattttccttttttttgcaaagcggtcagttagtcgtagactgcggtgtattttacaaccggcgccggatcatcccattggataatatccagtatgttacaacgctgcgcacaccggatatgctgcctttcagcctttcctcggtgatgattcacagcgtagggacttctctttatcttccctgcctttcccttgccgacgctcaaaacctgcaggaatattgtgtccgccgaaaaaagcgcggataaggaggaattgttttgtcagagcatcgcacccaccttgttacgctgctccagatgatctggcgttttttgttcctgctgatttttccggctgcccgtggttttctcaccgccttgtccggcggcaatgtggccgagtggttggacggcgcttggaaggacatcctgatcatcgccgctatccttctgctggcatttttgcaatggtggtgcctgcggtatcgctgggaatcggtcggcctttccatccgcagaggggttctgttccggcagcgaatgttcattcccgccgctaaaatcatcactatgtcgctgacacgcccgttttacttaaaacccgttggaggtgttcggctccgcgtggacacctgggcaggagcagggaatagtactgatatctcgctgattctgccgaaaaaagcggcagaatccattttttccaaacgggaaaacgctttgagcgatctggattttgccccgcgggaatatcatcccaaagggctgtatgtcacctgtcttgcagcgattctcagcagttcttttgcaggtgttttgttctttgctacctttatctcacaaaccggttctctattaggccaggaatttgccgaccgcatcaccggcacctttgaacgtttaacccgcgccattgcttggggaatcccccccgcaacggtggccgttgcctatctgatcattttcggatggctgtattcctttatccgcaatttaatccggcataagaattttgtggtgcggcgccgaaagaacgaactgtacattgacagcggcatcattactaatcgaagctactccatccgcctggacgaaatcaattatatcgacatccgccaaagtctggttacaaagctgctggggctgtattcggtttttgtcaatgccgttgggtacggaaaagaaaaagacgatatctccgccatgatccctgcgaatccttgggagcggctgcaacggcatctgcattttctgctgccggaatttgccgcatccccccggcaagtgaaacccaacggcggcgccatctttcgcttcattctggacccgcttcttcccaccctgtccattccggtggcaggttcggtgctggcaatgctgtttcccagctgggcggatttcacttattctattgtctggatggcgatgctcccctgcctgtggtttttggccgtgcggcttctggactttttctcctccggcatcggccgtcagggcgatatgttcacgctgcgctattccagccgcggtcagctgcatattgttgttctgccccgggagcgaatctcccaaatcgttctgcgccaaagcccaatccaagcctttgaccgccggtgcgacgtgctcctatactccatgtcggaaaaaaaaacgcggcatcatatccgaaacttggatatcgcgcaggtcatggagatctttgactgcaacgaaaccagcgctatcccctttaccggcgatcaaaagccgatgatttccctgaccgaatatctgcacccctttcccaattacttgcgacaatggaatcctttctggaaaaaaagataaaaaaagggaaaccaaaaaatggtttccccttttttatcttcagcagaaccttttcctattcttcctcgtcttcctcttcgtcatcgtcctgaattcccttccatttgggatcttcttgctcttcactgctttgtgcctggctttcttcctcttccggcacttctaccggcgggacatatacctgatacatcagctttttcagattgtttgcatggtaaccggtcatagcggaaaaggcgttgtttaaaaacagcagatcatccacgccatttttctcaatcaaatctaccagagaggtctgaaaatatctttcatccaccacatagatatgttcataatggggaatcaaaaaaggaacaaaagcattgccataagattcttttaccaccgcaatgcttttcccattgcgggtcccggtatcaatttgaatcatcggcgcatcgccgcacaaaaacaccagatatccgttactgccggacacgctttccgcccacaccatccacttagatttggaatacggctggtctttttgcacaatataggcctgtgccgaaacatccggaataaagtactccacaaaatcgcctttttccttcattttggaatcctgcgtctgccggtacaagctgcccaaaaagttatcgatcctctttaccgtatagtctgattcaatatccagaggcgtaaagcctgccgcttgtgcaaaagctgtataagcccagtatgcgccgcgtcctgtccagtgatggtcggtgttaaaatacaggtattcgtctgtatgctgcgcaatggcgctgtatgcatccacaccggtaacgccgtccgccaaatatccgtaaatactctgaatcgccttttcttctgcgttggacagttttttatatttttccggcagataaaattccacactggtaggcaccaccatatcaaaaactcgaacggaaccgccaaacgccttgtggtatgcgttgatattgtccgcatacacctttccaaccgactcattgccgccgaacagcgacatacccattcctttgtaaataaagattccgcttttgttcacgccaatgtcatcctcttcctctgtcggcgcagaagagctgctgtcggcattgctttgctgcggctgggaagaactctggctttgagaggtttctggctgggaaaggtgcatctccggctgggaaaccgtttcgtccggcgtttccaccggcgcgtctgcgccgcccagaatccggatatcatcgtagcgaattcccaggctttcctttgttccattggaaaaggccaccaaaaaatcccgcatcgggaaagtatcggcatagtaagcgtcaaactcgctggagaaactcccgtcaaaccagttttgccagctgatcttcggttttttcgccagatctctctgctccatttcagatatatccggcttttctaaaagcagagaacaaacgcccacaatggttaaaacagcggtaaataaaatcatctgccagggaaacagccctttccccgggcgggccggttctcttctctcttttacctgcatctcttttatctcctgtccccttaaaatcgaaaatacaaaaacggattgtaactctgcccggccaaaaaagcggtacagaaaaacaaaagcaccagattccatgccatacccgcaccgctttccagcgccgcagcccagcatgggcgggacagcagacgccacttttctctgagccacggcaccaggggaaggcatcccagcagcgcaatcactagccagatcaaattgtttaacagcacaacctccaactgaacgtcccaaaagcctgtgcccgctgcgccaaataaagtctgtaaaaactcccacaggcggctaagatcggtaaaataaaacaacgaccagccaatcatcaccgcaaagatcagatacagatgtccgaaaatacgcggcaatttttccagcacccgcaggaaaaaccatttttccaaaatgaccagagcgccgaaataaagcccccataatacaaaattccagctggcgccatgccacaatcctgtcaaaaaccaaacgaccagcagattccaaaactggtgccgccgattgccgcccatgggaatataaacgtaatcccggaaaaagctgcccagggaaatatgccatctgcgccagaactcggtagcggagcgagaaatatacgggtaattgaaattttccgcataatggaatccaaacagccgcgccagaccaatcgccatatcggaataaccggaaaaatcgaaataaatctggatcgtaaacatcaaaaggccaaaccaggcgccagccgtgcttaacgccgccaagtctccatccaaatactgagaggcaaagtcccctgccaggtttgcaatgagcactttcttgcccagaccggtgcaaaaacgggaaatcccacctataaaatccgctcggctggtctgccgctcttggatctgggccgctacctccgtgtaccggacaatgggtcctgccaccaactgcggatacatggaaacatacataaaaaagcgccagtaggaccgctgtgcccgggcctgcccccgatatacgtcaatcacataggaaatcgtctgaaaagtgtaaaaagaaataccaatcggcagggaaaaagccggaaccggcagggaaaggccggtcaggctatttacgctctccaccagcatgccgctgtatttaaaaacgcccagcagccccaaattcaaaaccaacgaagaaaccagcgccgcttttgcctgccagtgccctgcatatctttcacaaatgcgcccatgaaaataatcaatggtagcactgaagatcaaaagcgtaacccataccggttccccccatgcgtaaaaaaacagcgaaaatacaatcagaacgccgtttctccaagcgggatttttggtgatatagtaaagtaaaatatttgccggcaaaaacaaatacagaaaaatcaaatttgaaaaaaccatttgctgcacacctcttctttatctaacttttatatcatatcacaaaagaaaacgaatacaaacattcgcccctcttttttcccaattttgggcgaaatttttgcatcttgtccctatcctccgcaaaatatgtcaaacttcttgaaaaaattccctgcctcccctataatgttcgatggagaccggcttgccggtcaatacggctcccgctgccggaaagcgggcttttccgccaatgcggaaatttgggaggtagaaaccatgatccttttgtatctgctgctggcggtactggccgtcatctcagtgctgctgctcatctgtctggtacgcgcctgtatccacaaaaaaagcgtaccgcaaacgcctctggtacgccgcgaaaatcccgacgccatgcgcattgccggcaagctttccaaaatggtacaggtcaatactgtagtcctgcccggcgaggacaatccccatcagtttgacccgatgatcgaaaccttgtcacaactattccccaacgtgttccaaaaattccatcggatggattatttggacaacaacctgctgctaaaatgggaaagcggcaattcgaacaaagagggtattctgttcatgggtcatatggatgtagtcgatgccgcaggagaatggaagcatgatccctttggcggtgaaattatcgacgacgttctgtggggccgcggctctattgacatcaagagcggcctgtgcggcttttttgaagcattcgaacagctgattgccgagggaatgaccccgaaccgcgacctgtatatcttctgctcccgcaccgaagaaaactccggccccggcgctcagatggccgtggattatctgcacgatcacggcattcatctggaaatggtcctggatgaaggctgctccatcggcgaaagccccatggagggcgttcatcgcccctacgcactgatcggactgggggaaaagggctatgtcaacatcaaatttaccgcccgctccaacggcggacattccagcgagccgcctcacatctccaccatcggccgcctgtccaaattcattgcccgcatcgaaaagcgttctcctttccgctgcaagatggaccccaccacacgcaaaatgctggagacttttgcgccggaaatgtccttaaaagaacgctttgtttacggaaacctgtggctgtttgcgccaattctggaaaaaacctaccgctacgcggatggctttaaaggcgctatgctcaaaaccaccgctgcgtttaccatcattgaaggcgcccacgccgccaatattctgccggacgccgcctatgttatctgcaacctgcgtctgtcaccccacgatacggtggaaagcgtggtcgcgaccatgaaagcaattgccgaccgttatggcctggaaaccgagctgatgggcgggcggggtgcttccgaaatcacaccgcttggttccgtaccgtatcaggccattgaaaaagccgtacaaaaacacttccccgaagtgggcgtaaccccttatctgattttgggcggcaccgatgcacgccactttaccaaagtgtgtgataacgtgctgcgctttgtccctcacgcgctgaccaatgaagaggttggaaccgttcacggccgcaacgagcatatttccatccatgcactggccaatgaggtaccctgctataaagatattattctggaactgaaccggtaataccaacaaaaacgcaagtccctattcaaaaagacaacccggacaggctgattgtttcaactgtccgggtttttctttaaaataacgcttatttttttgcgccggtcgcttggccttcatagatatccattcggtcaatcaaattttgaagcatcagtttgtgcgcaatatgctgctgataggtaacggttttcacctttccctgaccgcgcagctcctccatctgagaggccgtcttttccctctcggaatcagcgcatcatatagatcctccagccgtccaagccgttccaaaacagaaaaaggatcaacctttgctttataaccgccctgcggtaacttctgtgccaagcgttccatttgtatctccttttctattgggattttgcgaatccgtttttacaggtggaaatttttcccctctttttttaaaatgcgctgtatggcaaattttccggcagtcgcgcttccaggcaagccgccgggcggattcagccattggcctgccaacaccacattttccaccccttctacgtacgcagacggatatggaagttttgcgctgtatttactgatggaaaacgcctgataaaatcctttatatgcgctacagtaccgagtataggtcattggcgtccaggcgtccagcacgcgcagcctgccccggagcgctggaaaatgctcctccagcatttctctcgtccgctccgccagcagacttttttgccgctgataggctacaggatcctgatatagcctgatccaataggaatatacttcttccgagccgccctgcagtgtttgaatcagttgttttcccgccggtacaaatccgggttcataggcataagatttcaccgtcacccgttcgctcattcctttggtaaatatcagttccggacaattccaaatcgtctccgtttccaacggattttcggggctgtccaccgccattgcggtctgaaaggtattatataccggatatgcccgccggtcctcgtacatctgccgcagcaggctacccatcttttcccggggcagcagacggccaaaagtcactgacatatcgcaggcgggcaccacataatcgcagaaaacttctgtcccatcggccagcagcacgccatcggcttggcccttcgcctggtctgccaggattttttgcaccgcttttccggtgacaattttggcgcccagcgaacgggccttttttgccattctaaaggccatcgcccgagatccccctgccgggattccgccgtctccggaaagaaagttcccgtacgccatcacaaaggagcttgcctgactgtctgccggcgtaaagtcggaaatcagcagccggatcagcggatgggaaaaacgctccattaaatcctgtacattcattccacggaacgcccgaaaaattttcagagccccgctggaagaccacagcatccgcagcccgtccctcgggcccatcagctctgacgggatatccgccggaatctgtaccctttgcgctgaacggcaaaaccgcagcagccggcgaatttcttttttatctcccggggacagggcaatcatttcccgttcggtacgatcaacgtcctgccacagtgtcaaccgctgttcacccagttccgatgtatacatcgccggaaaccggaaaattgggctctcctcttctaaagcgcccactgttttccaaagatcatacagctgggagccgggcgtcgtgcccatcatccagtgaatacagttgtcgatatgatacccgtcccgatcccacccggtacattctccaccgggaatggtatgctgctcgaataaagtcacgtcaagcccggcttttgctccatatacagcggcggtcagaccgctgataccgccaccgatgatgactacttttttcatttttccacacccttctcaatggccgttaaaaacggctccactcttcaaaaacaaaagccgcgggagaaaattctctggcggcttttgtaatgcttctcttatgcctgctcgttttcttcggcagggggtgcaaaactctttttccgctttttcacacactcggtcagcaaatactcaatctgaccgttaatcgagcggaagtcatcctccgcccaggatgccagctcctgccacagcgtgggagaaagccgcagcaacaactgtttttttgctttttcctttttgttctgttcctccatttcgcaggctccggattagtaaatcgaaccgctgttgacgatgggctgtgcgtctttgttgccgcacaaaaccaccaacaggttgctgaccatcgctgctttgcgttcctcgtccagcgcgacgatatcgttttctcccagtttgttcagcgccatttccaccatgccgacagcaccctccacaatcagtttgcgcgcgtcaataatggcgctggcctgctgccgctgcagcatagctgcagcgatttccggcgcataagccaaatgggtgatccgcgcctcagaaatctccagtccggcgatctccacttttctctggatctcttcttttaaaatatccgcaatttcctgactggaaccgcgcagagatttttcttccaccccgtcgccgtcatcctctgaaatatcgtagggatacagacgaaccacattccgaagagcagaatcgcattggatggaaaggaactccttatagttatccacattgaaaaccgccttggccgtattggtcacccgccaaatcacgacaataccaatgatgatcggattgcccagcttatcgttgattttttgcttttcattgttgagcgtcatagctttcaaagagatcttctttccggacaataccgcctggcccgccgcctgcaacgccgctgtcccggggtcggtgcttccctgcaacgctgacgctggctgcgcggccggattcaccgccgtaacaaaggggttgacgtagaaaaatcccgggccggttaaagtaccgtaatatttgccgaataaagtcagaaccagtgcttcattgggctttaacaccttaagccctgcaaacaaaatcggcccaacgatgcaggaaaataagatgcctgcacccagcagaataccgcccaaaacaaaactctctttcgccagaaaaacaatgccaaacacgaccgccgcaatggatagaaccatcaaaagcaacaacagcagtaaaattcccatgccgcctctggcccgaatgcgtttttcttctacctcttttttattttccattttttcgatcatgattacctctcacttttatgatattgttttgatatcataaaaatatcatcatgaatcttttttctgtcaatctcaaaataaaaaatcctttttaagcccaattcttctatcaaaagaagcccctggaaagtttggctgagatgtagaaatattgtgaaaaatcttttgaaaattcgttgttatccatgacgaaatcaggaagaaaacagtgaaaagccttttatttaagccatttcacctctttttcaaaacttgacagcaaccttgcgagtgaatataatggcaacaagtttggtaaaatactgaaaaagcggggattctttctgctttttcaaaaaaccgtagcagctctggctgcggcgggaagccaaaggagagttccatgaatcgattttttcatatgatgcggctggccagttctgttataaaaagccgcgggtttgctgtatcggtgttagctgtcctgatgtcactgactgtttatgccgtttcctccactaccaacacggtctacattcgtgcagatcagcagacgacaatccttactaccagccaacgggatctggacgcgattttagaagaatgcggcatttcggtttcgcagcacgataccgtcgacttttccggatttgacggcaatgttgccgaaatcaacattacccgggcgtttccagtggtgatccgggcggacaataccacctaccaggtgatgatgacggaaggcaccgtggccgatgcgctggccaaagctggggtgagcatcgacgatgacgatctaatcagtcacccattatatgagtttttggagaaaaacgatcgcattttcatcaaccgaattgattaccgtaccatgtcctatgaagaagaaattccctataaagtggaaattcgcacaacgccgcttttacgaaatggaaagagccgtctgcttcaggaaggagccacaggtaaaaagatcctgacctatggcgagacgaccaaagatggtgtcgtgcaggaagcggagctgctgggcgaaaatattgtcttgaaaccagctacccaaattcatctggtgggcggagacgttcccgtttctccttatgatttcggctataccatcgtaaacaatgcgccaacttcctataaaagcgtgatcaccaacgccaaagccaccgggtacagcgtcggcggcaacgcccgcggcgcatccggcaacagcctttctgcaggacacgtagcggttaatcccaatttgattccctatggttccaaactgtatatcacctcggcggacggcagctttgtctatggttatgccattgcttccgataccggcaccggtctgatcgacggaatcatcgacgtggacctgttctatgacacctatctggaaagcctgcttaacgggctgcggacagttaatatttacgtgctggaatagcttttaaaatcccattttccctgctgaaatcgggatttttgtgttggttgggtgaattttacaggattttactggcgtcatccccctttcctttgttatactaaaaggtggtaaaacgtcatcaggaggatggacattggagcatcgtgaatttctttcagttgatcggggccaagaggattttgcccctcaaaacgaatttttcgcccaactgatccggatcgggcaatggattgctaaaagcggccggacactggcctcgattctccggcgggtgattgaccgcgctgatgaagctgtggcgttctttattaggctgatccgtcagtggtatggcacggcggaacgctcttttttcccgggatacggcaaaacggtagccagtgcagccggctgcgtttgctgcgttgtctttgtggctgccgccctgctgctggagccgtttttttcgcctcagatcataccggcggaactgccgcagactgcggaagaagctaccgcggaagaaccttttgacttggaggcattggtcgcagaatacgagcaaaatgcacgcgcccaagcccaagcggcaccgctaaccgtttctgtttcgccggaggatcagatttccctgacgatggactctttgaaaaattatgaattggcctcggcgcccgccggctggacagtggatttatcccagttggaaggttccggacaggaacgggcggcgtattgccacgattatatcaacagcgataccatcgggtggctgcaaatccctggtaccaacattgattatccggtcatgcagggcgccgccttaacgacctacatgaatctggatatcaaccgcaattacagttataacggttctctttgggtggatacagacatcaatgacgccagcaccaatactgtcattttcggccataattggaccaatgtctccggcaatccttcggtaggccgttccagcgacgtaatgtttgctcaattaccttcgtttgcgcatctttggttcgcgcagcgggtaccatacttttattattcttctacttcgcaggacatggtctggcaggtatttgccgcattttacactacggatttggatttttatctttatactacccgcactggttccgcgctccaatctatcattgacaaagggcgcagcctgtcgttgcatcattatgatgtaaacgtctcctccagcgaccggatcattaccctttctacctgcacacgggcgctgggcgccagtgaaaatcaacggtttgtggtgatggcaaaactggtcagcagcggagacgctaatgtccaagtcacctgattttagtctcccattttttctgcagaaaacccccggttttgaaaaaccggggttttcttcttaaaacagtattttgtgccgcctttttagatggtgtttttacagcagaatccactgatacagataaaatagtaagtaagaggatacaaacagccaaggaatgattttcaaatgttctttgtaaaccggccaggtggcgcatcccatgtacttgacagtcaaaagctggcacagatgcagcggagagtaatagtaccccataaaagaccagataaacacaaagaaggtatacaaaagcttcaaggtcggatccatcggaagcgtagccaccaaaggaaggatgataccgatgggaaccagacttaatccggtggtcaggccaaacagcagcgacgcggcggaaatcaccagcatgataccaaagccggaactgttctggaacagccatactaccccgttcatcacctgatccagattttgaatcaggttttggatgaaataaacgccgatgagcatgaacagcgtactgaaactgatccccttccatagattacgaaaaaatgtctttttttccttccagcacaaaaagagcatccataaaatgcaaagcgccaccgaaaggtacatcggcaggtggaatagcccgttaaaaaacaccaccaaataaatcggggaaagatatagcaaaagatctaaaaccgctttctttttactaccgccggtttgcacccgcaccgattttgcccgatgcagataaataaaataagcagctgtgtgcatacacaaaataaaacctacattcaaggtaatcagatgataaatattgatctccggcaccactgtgggaataaacagcatattagtggtaaaaggcataataaacagcgccacatgtcggaacgacaaattcacaaccaccttgcgaggcgccgataactccagatcatcgccgattttatccacaaaaggggcggaaagataggccccaccaggaacggtcaaaattcccatcacagcgggcagcaccatcagaatcgcctttttacttgggatcaacgtctccagcgcagccacaatcttgtccaaaaaaccatattgtttgagcagattgcccagcacgcccaccagaatgatcgccacaatgatctgaactgttttcattgtcgtaaaaatcgaagcaaaagattctgccgctgtcgccacgggcaatcccgcaatcagtgccaagcaaacgccggtaatcaaaagtaccggtccaaagcccggttttttcttggtcagcaggggaatccccttgatcagaagcggcatcagcaaaaacgccgcaaaaattgcgataaactgtctcatcatgctccacctttttatctgtcgtctgtttttataaaaaatccgcttgcgttttattatacaacaacgctttggcagacacaagacggaaaacatgtgccggagattgacttttaagagaatgtttgttaaaataaagtgcatagaacctttgggaaaacagcaaacaaaggaatacattccaaatttattctgcgaggagagttgtccgagtggtcgaaggtgcagcactcgaaatgctgtgtcccgaaagggacctagggttcgaatccctaactctccgccaaaaacccagtcatatcaaggctt

SEQ ID NO: 4370 - DNA, 25519 bp, Unknown
  16S sequences of unknown bacteria
atctaattttaccgttgatagccatttccttgatagccaaatgatagcaaaagttcggcaagcccataggataaggataataggtatcaggaaaaatcaaatgatatcaaatctcccaaacaaaagcgtttagaattaagtttcattttgcgagtgggaataaatagcaaataacctttgatttttatgcatcaaaaaagcgaagagacctaaggtctcttcgctttttttcttgtttttgtccctggaaaaccaggaagaaagggaagacgtctgggacatcatcccagccatttaactttatctgagatttacaataaacttactctgattatcgatatcgctgctttcatcaggaattgaaataattgcctttaatggctcatttgtattttcagccacttgttttggaacagaaaaaacacatgcgtcaataaaaccatccgttaatacaggtaaatcttcgacaaatgcagttgcattttcaaatgtataaccatctgcatattctaatgtaagagagccatatccactcacactaaatccatctgatgtaggagttgatgatattgcctcttgtccaatatttttagcagaataaataataatgacatatactttatcttctgatggagaaaagaaaaatttgcttaattcgctgtcatcatatgtatttacatcagttccactaaagtattctttataatataagtattgttttccatcataagtttgtgtgtcgggattgttgattatatcatcattagttataatatcgtaacttaaaacggatacttccatgcaatttgtagaaattatatcgcccactttatactcatcagataccttgccatcggcattttcttgtgggttatcctcaacctcactatttttcccgtctttgtctccgctgcaagccgtaagggagaggcatagagccgcggccagcaataacgccatccatcttttcatcttcaccatttcctttctcaatctattgtttcttttccctgtatagtgctcatacaggaatcctgatactatgataccacaatcgaaataccattaaaatatgccggctgcatagtgttcagtggaaaaaggagtgacggggccctcaccgggtcccgtcatttttttattttctctcttgacaaaatgcgtctaatgggttagactctccctaaagtctaatgcattagacaaacccatgcaaaaaaggaggagcctttatgtccgctcccaaggtatttgaaagcgaataccggttctgcctgattctgtggcggaatgagcccatcaacagcaccaaactggccaagctctgcaaggaggagctgggttggagccgtaccaccacctataccgtcatcaagcggctgagcgatcggggtgtggtgaagaatgaaaacgccaccgtcaccgctctggtgagcaaagaagaggtgcagctcagccagatggaagaaatgatggaaaaaacctttgagggatcgctgcccgccttcctggccgcctttgcccggcggcaggccctttcccaggaagaagaggaagagatccgccggatcatcgaaaaataaaggagggcatgatggaaaaactgtttttcgccttgctgaaccgaagcatcgccgccagctttatggtgctggccgtgttgtttctccgcctgctgttccgcaaaggaccgcgctgggtcttttgcctgttgtggggcctggtggccctgcgccttttgtgcccggtttccatccaaagcccgctgagccttgcgccggagacgccgtctttggaagaaagattttccccaagcgccggggaagaggccctgccgggcacccttttgacagagggcgcggatcccgattccgcagcacctggaatccaggcatcccaaggcccaaactggggcatggtattttcccgggtgtgggtgctgggctttgggctcatgctgctgtatgcgctgggttcgctcctggccctgcggcaaaggctggccgacgccaccttgctggggaaggggatcaaaggcagccagtgggtgtcgtctccctttgtgatggggctgttccgtcccaccatttatctgccctatcatctggacgaagactgccggaaatatgtgctggcccatgaaaatgcccacatccgccggcgggatcattggctcaagcccatggcttttctgctgctttcggtctattggttccagccccttctgtggctggcttacatcctgttctgccgggatatggagaccgcctgtgacgaaaaagcggtgaaggacatggaaaaggaagagcagcgggcctattcccaggccttgctccagtgcagcctggggcggcactccttcaccgggccgttggctttcggagaagtgggggtcaaagaacgggtgcgccgggtgatgaactacaaaaagccccagttctggctgattctgctggctttggccgcaggtctgatcaccggggtgtgcctgctcaccgaccggccggagccgaaaacacccaaggaagcaggggagatctccaccgtctacatcggcgacgccccaaaaaccgtagccgtggcccagagcctgtcctatccggaagggctttcctatgcttccgttcagctgcaaaccacaaaggagccctacggcctgacggtctatctcaaaggacagggccaggggagccgggaagcattccgaagctgcgctatgcaggcctttgaccgcatcggcaatctgggggtcattgctttttggagcaaatcgccggaacaggagctggcccgcttcacccgtcaggagatggaggaaggggaacccctggccgatgccgtttcccaggccattgtggagcaaaacagcccgggagaaacaggggacagcctggtccgctgcggcagctttgtggagctgggccgggatacattccttgtggacagcgacccaccccaggatggcagtctggttctctatggcatcgccatgtaccaggccttcgcccgcagcggacagggtctggaatcccaggaggggagtcatatcccggccatcctcactttccaggaaggaaaggagggctatgtgctcaccgattactggacaccccgggacggcagtttttatctgtccgacatccaggagcactttccgaaaaatctggcacagagcgccctgaatacccaggactatgtgctcatgcagatgcaggactgctatgcccaggcgatcagccggggcggcgtcaaccccgcccgactgatcccggcattgctggaaaaagtggagtcctcaccggcggcctcttccgcaccgggggattacatcgccgcccatcccgatgaatggaatcagctgctctatctgggagattccaccctggactatgtgtttgacgcctttctgaaaggtggccagaccgggctgcacggccagctgctgcgccagctgctggatgagctggccccggaaagcgccatcaaaacagcggccgaaaccggacaggactattttgacgcctggaaggcccattacgaaagcatactcaagcaaaacggggaagagtggatgcagcagcaccacccggccttctggaaaatggagcagctggcagctgcataaaaaagcagggcgatcgccctgctttttgtttgttataaataccattcccggccgtcattgaggcaaaagacccccagcgggccgtcataggcacagccgcagtctatggcaatgtggtggtttccctgatagatccggtctttcccctggttctgggggatgagccgggtgggggtgtggccggtgaccaggtatttcccgggaaaatagaccttgccatagtccggccagtccagaagcagatcttccagggcgtattccgtcagctttttctccggggaaaaattccccagcccggcgtggaccagcagatattcctttccctccacggtaagctcttcatacagggagaattcttcgaaatactccatcaccgcctgacgctgctccggggagagggcggtgaagtcatccaaagtggcccggccgccgtcggccagccagtccagcagcccttgcagctcctccggcgccagatgctccagagcatcctcggtgatctcccggcacagcaatttcagacaggtcagggccatcatctcgtgattgcccagcaaggggaatacattgggccgctccatcatatccagcaggatgtgcatgggctcaggcccccggtccaccacatctcccagcacaaacagggtgtcttcctcccggagaggcagagcatcaaaaatcttcttgtatttttgataatggccgtgaatatcgcttgtcacataaatctttcccacaaagcatcgctccctttgaccgagtttccattagtgtgccaaatttttcttttcttgtcaaggtgcggtggaagagggaggcgtggtgctgttttgacggccgccgcccattttgccgcccataccaccctggccgccgcccatggccccgggattttcctccgagccgtcgttggtggtcacggtgcccccattgttggcataggagccatcggtatccaaagcggtgttgccgctgccgttgcaggtgagatccagggcgccgccattgatggtcaggtcgccattggaatcaatgcagtctccctgagaggtgatggtgaaactgccgccgttgatcagaataaagctgtccgaagaagcggaagaggcaaactgatcctgctgccgcatcccaaaaccggagctgtcggccccgccggcgtgaatggaatcatcggcggtgacgatggaaaaggcgccgccatccacctggagtgcgccgctggcgctgactgcatctccttgggcatcgatctggaattcaccattttggatatagaccgaacccagggacgcatcctcggtgttttcgctcctgacccagcagtccacctcttcccagcagtcttacacaaacaactattccggctggtatttccgccggtaagcctgccagaaaagctcacacaaaaagccacgccattcaagcgcggctttttcttgtttttccccattgaccaaaaggggggaacatgatacactggcccaaggttagctgacgcgaaccaaaaaaacaccgaaaggagaatgctttttggatcattccattttatacgccttcctgctcaccgccctggccgggctgagcacaggcatcggcagcctgatcgccctggtcagccgccggaccaaccgtaagtttctctccgttgccctgggtttttccgccggggtgatggtctatgtgtccatgactgatatcctggaaaaagcccgtgaattcctcaccggcgccctgggggaaaagggaggaagctgggccaccgcaacggcttttttcggcggcatgctgctcattgccctcatcgacaaatggattccctcggaggaaaaccctcacgaagtcaaaggggtggagcaaaaaggggaaaaggccccgggagagtccgggctgatgcgcatgggtgttttcaccgctctggccatcggcattcacaatttccccgaaggcatggccacctttgtctcggctttgcaggagcctgccctggccctgcccatcgtagccgccatcgccctgcacaacatcccggagggcatcgccgttgccattcccatttaccaggccaccggctcccggcggaaagcctttttctattccctcggctccggtctggccgaaccggtgggcgctcttctgggctggctggtgctgcgcccctttttcaacgacggggtattcggcgtattgttcgccgccgtgggcgggatcatggtgtttatctcctttgacgagctgctgccggcggcccgggaatatggggaacaccatctttccatctatggtctcatcgccggcatggccgtgatggctgtcagtctgcttttgtttttgtagcagcagttttgcatctctctccttgtggagccgggggaaagttgctataatgaatgcaatgatccatgaaaaaaggaggatgtgaaagcatgaaaaagtggatggaatccagcgttgtctttttcccctgtcagaaccagcaggaaacccgggactattataccaatgtactgggactgaccattcatcaggaaaaagagggaaacctgatcctggacaccggctatggctatctgggctttgtggaatatggggacggtcggcccatggccaccggcgtgtgcatctccttcaactgtgagagccgggagcaggtggatgaagtataccagcgcatcaaggacaacccggcctgccaggtgaagggcgctccccagcaccatgcccgcttcccggtgtattcctttttcctttccgaccccaatggatacactttggaatttcagaaactggactgaggtggcagcatgaaaaagctcttgatcgtggtggactatcagaaggattttgtggacggggccttgggctttcccgcagccaaagagatcgaagacgccctgtgtgagaagataagctcctatcaggcggagggccaggacatcatctgcactctggacacccacggggaagattacctcaggacccaggaagggaagaacctgcccattccccactgcatcaaaggcagtgaagggcatcagctttacggcaaagccgccggtttgcttttttcctgcccccggtttgaaaagcctgctttcggcagcatggccctggcaaagtggctggaaggcaaggaatatgaggagatcgagctgtgcggcgttgtcaccgacatctgcgttatctccaacgccgttttgtgcaaagcggccctgcccgaaacccaggtcacggtggattccgcctgtgtggcggccatcacggaagaagcccagcaggcggctttcctggtgatgaagagccttcagataaaggtgctttaaaccggatcaaccagcccttataagctgcaaaaaacatatgtgatggcgcaaaagcccttttgcgttaccccttattcatcggcaaaaagccgcgacctgcgggtggctttttgcacttctcaaggggcaagtgtgcgcccagggcgtgcatgaagccccttgcaaaaactcaaaaaagtggcttttgccacttttttgacactctcaagcggcccgacggccgcttgtttttccatttggaagaattaagaattttgaaagagttttataaaacccatagaaagaaccatctgataccatacagatgtaccgcaaaggaggaaaggggaagtggggatgaacatcttagtctgcgacgatcagcaggaaattgtggaagccattgagatctatctgaaaaacgaaggttatgagatcttcaaagcctatgacggccaggaggccctggaggtgctggacagggagaccatccatctgatcatcatggatgtgatgatgcccaagatggacggcatccgggccaccttgaagatccgggaaagccggaacattccagtgatcatgctgtcggccaaaagcgaggacaccgacaagatcatgggtctcaacatcggcgccgacgattatgtgacaaaacccttcaatcctttggagctgatcgcccgggtgaaatcccagctgcggcgctataccaaactgggcagcgcggaaagccgcgaacatgtgtttcaaaccggagagctggtggtggacgacgagcgcaaggaggtgacggtggacggcgagccggtgcgcatgacgccagtggagtacaaaattcttttgctcctcaccaaaaacgccggccgggtcttttccatcgagcagatctatgagcaggtgtggaacgagccggcctacagcccggaaaacaccgttgcggtacatgtacggcgcattcgggagaagatcgagatcaatcccaaagagccgaaatatctgaaggtggtatggggaattggatacaaaatcgaaaaaatttagtcatccctggtatctgaaggccgtggcccttgtgttggcggcggcgtgcttttccaggggagcctgtcagatcttcgacctggcggggaaagcaagcgcaggcagctttatgcccaccctggccgaaagctatgaaaacgattctgctgtgttccgggacacccttttgctggaggacgccgttttgcatgtggctaccaagtatgaaggggaggagtccatccaggcgggcaaatccctcacccagtccgatctgcgcaacgcctattatcagctggtgtctgaggcattttacaactattcctacaattacgatacggaaggcgtggaaacggcctatgaactgaccacgccggacggaacctattggcaggatgccctggacgaactggtgagccagagcacctttgccctttcccgcagcgaggacgggaagttcatcatgcgccgggaaggccctgaggccccggagccgctggcccggtttgaatcggaaaaccagcagcagatccagagcctgccccaggagctcatccgcatccagctgtccgactaccgctggcagatgcgcaacctgcaaacccagcccgctctccgctactatatccgccatggggaaaagactttcgccaatgcatcggaagaagaggccgtgcaggctcagcaggcggaaatcttccttctgatgaaaaagggggaagtgaagatgcggatgggggaaagccgcgtggagggagatatttatgatgaacatttctcctatcaatcggggggcgctttcaacaccaacagctatggctggctgtcggcccagcttcgggaatccctgctgtcctataacgaggaagatgccgcttacatctggtttaccgatgattatgccacccagatgcagcagcaggtgacagaaaaccggcagctgaccatccagtatctctcccagatcggcggagccttcctcatcacgctgtttttgctgggatatctgctgcgtacctgcggacgaaaacgaaaaggagatgagatccggctgtattttatcgatcgtgtctttaccgaagtcctgctggccatggggggcctggcggtgggcgggtatgtcctggccatcctgctttcctggcagtatcaggagccggaccttctggccctttgttcctgggccgtatttttggtgatcaccgccattctgctctccttcggccgccgcttcaaagcccgcactttctggaaaagctgccttttgcgccatttcttccggcttctggcggctcctttccgcaaggcggcccgggccttccgtgagctgtcccggcaggaactcaccgtcaagcgggcgatgctgttcaccggcctgtatggttctttctgcctgcttctggccatcgtctttccgctgagcatcgctttgatcatcgccgccgtgctttttgtgggcaaaatggcctcggccttccagaaggtgcgggaaggggtgagcctggtgcgccagggagacctgacccatcagatcgacctgggggatgagcgattcttcgccggcctggccgacgatgtgaactccatcgccgacggcctgcacaacgccgtggaaagcgagctgaaaagcgagcggatgaaatcggagctgatcaccaatgtgtcccacgacatccgcacccctctcaccagcatcatcacctacgccgatcttttgcagaaggaagggctggggagccccaatgcctcccgctattgccaggtcatcggccagaaggcccagcggctgaaaatgctcaccgacgatctgttcgaagtgtccaaagcggccagcggcaatatccaggtggaactggcgccggtggaactgtgcagcctgatccgtcaggggatgggggaactgagcgacaaaatggaggaatcggggctttgcttccgcattcagctgccgccccagggcgtatgggtcaaagccgacggcaagctattatggcgtgtggtggaaaaccttttgtccaatgtgttcaaatatgccctgcctgcctcccgggtctatctggatgtggaggagcagggagagaaggctgcctttaccgtcaagaacatttccgcctatgagctgaatgtggacccctccgagctgatggaacggttcaagcggggagacgcttcccgccacagcgaaggcaacggtttggggctggccatcgccaaaaacctggtggagctccagggtggagtctttaccatcacagtggacggcgacctgttcaaggccaccgtcagtctggaaaaaatccagccgcctgtgaaagaggcaccagctgcccctgaggaacatccgcaaatcggataatgtacacacccacaaaaagtgacgaaagccactttttgtgggtgttttttcgcctttttttgctgcgggggaagagatataatgggatctatggaaacttgtcccgcctttgccagaaagctctccttgtggtataataaccgcaaagcgattattatacagatttttatggccgttttctcgtcccgcctacgggacaaccgaaaacctggccaatataccatttcgcattcgctttatggtatcatatcaacagtgctgcaaaaggggagaagccccggaatcttttcgcaataatccaggcccatgagcctgtgggaggttttatcatgttggaaaccattcggaatcgaagaagcgtgaggcagttcacctcggaccctgtgacccaggagcaggtggaaaaactattggaagccggcatcatggccccttcggccatgaacaaacagccctggcactttatcgtctgccgggacagagaaatgatggagcgctttcaaacggtgcatccttactccaaaatgctttcccaggcgcctgtgatgattttggtctgcggcgatacccagaaacagcccggaccccatttctaccagcaggactgcgccgcctgcaccgaaaatattctgctggccgcccaggccatggggcttggcggctgctggctgggcattccgcctcagtcggagcgggaagaacagatcgccgctttgtttggtctgccggagcacatcaagcccttctgcggcatcgccctgggcgtgccttcggtgcagcccccgcagccggagaggagcctgcatggccttgttcacgaaaatcggtggtaagctgctggaggtggcccgggatctccggtatgtggccagccagctggtggaacggtacttcaaagatcatgtggcccgctcttcggcggagctggcctattatatgctcttcaccctgttccccctggtgattttcagcaatgtgctggtcagctcctttcacctgtcggtggaggagatcatggagaacctgtcccttctgctgccggaacagatcgtttccctcatcaccgaatacatcggctatatcaccaacctccagccgggcacactggtgtatgccggctcggtgctcaccgtttatttcacttcccgggcggtcaattccctgatgctgtccatcggcgtggcttatcgccagccgcggaaagggaagctgaactttttcttttcggtgatcgtcaccgtggtggtgctgctgtccatgtatctgctgctgggcctggtgctcatcagcgaaaatctgctggccctggcggcccgggtgctgcccatcccgtttttcctggtgcgcatctggaactggctgcgttttaccgccatgccggtgtatctgttctgcatcatcaccctgttttataagatcgccccggccaaatggctgcggtttctccaggccgcccccggcggactgttctttgtggccgtctggtcggccatctcctatttcttctcgtactatgtatccaatctggccaattactcggtgctctatggttcgttgggcgccgtgatgatcctgatgctttggttctatatgaccgggatcattctgatcctggggggacatttgaatcatatcgtgctggtgcttcgccaggaaaagaaaattcgaaaaaggaacggtgaatgacatggaaaaaatcattgtgggggcctgtgtggccgatctgaccgctcagcgggaagaacggctgcgccagggcgtggaaaagcagggctatactctgaaaatctttgaaaaagggaagttcggcccggaagatgtggccgactgccaggtgttcttcggcaacattcccccggctatgatcaagagccttcccaaccttcgctggctggccaccgcctccgccggggtggacaactatgtggccgatgagctctatcccaatcccgatgtgatcctcaccaactccagcggggcctatggcgtggccatcgccgaacacctgctcacctgcaccctgatgctcatgcgccggatgcgggaatacgaagagggccagcggcagcaccggtggaagtatctgggcaagatccgctctctctatggcagcaccgtcaccgtggtgggcatcggcaacatcggcggcaactttgccaagcgctgcaaggccatgggggccaccgtgcgtggcgtcaagcgcacccccagcgagaagcccgattatgtggacgagctttacctgacaaaggatctggatcaggccatccagggggccgatgtggtggccctgtgcctgcccggcacccatgagacccagcagatcatgaccgctcagcggctgagcaaaatgaaaaaggacgccctgcttctcaacattggccggggcaccgctctggaccaggacgctttgatccagatgctgcaaaagggcctgctgggcggcgccgctttggatgtggcatctcccgaacccctgcctgcggacaatcccctgtgggatatgggcaatgtgatcctgacaccccatgtgtcgggcaacgactctttggactacaccaccgacaccattctgtctcaattcctcgagaatctgcccctctttgctgcgggccagcccatgcatcatgtgatcgaccggaaaatcggctattgataagcatgtcgaaaaagtggcaaaagccactttttcgagtttttgcaaggggccgcatgcacgcctttggcgcacacttgccccttgagaggtgcaaaaaccgacgcacaggtcgccgttttttgcaaattgattcagggtagggcaaacggtttcttttcgttatatcggtttttcgatagtctgaagcccccggccattaggccgggggcttgtgtgcgtgtcatatttttgccaaaaccggaagccttagcagcgtttgccggtcttgcagctgccattttggcagttgccgccgttttccttgatataatcggaatatttcggggggaagaactcatccacggggaacttgaatttctggaacagatcgcagggatcgtcgctgccgccgctgccggagcaatccttttccggcatacagatgtcataggcgggcatgagcagctggatatcccgctccagcttgatgatgctgaactggcccagggtgacaaagagctttttgccctcgtcgcagatgacgatgtcgtcctcgaagcaccggcagatgcaatcggggatgtcattcagaccgcagtcgccgcagccgcagctttcggtgaccttgatccccagagccacagggtccaccacttccaccacgccgatgggcagattggtcttttcgaagttctgcagatcgctctccttgggcatatactgggagctgaaaatgcggacgctgccctcactgccgaagagcacggtgcgcttgtcgtaggtggccagaccgcagatctccttgggacggctgagtccgcagtaggcctcggcggtgatcttgtaaaaatacttcacatccacggtgtagaagcccttgttgaaggcgatgggctccacatccacataggaccaaagcagctcggcgcccttcaccttgacgctggtggcctgatccagaatggcctgggaacaacgggtgggataaacccgcagatcctgcagacattccttatcatggcaagacccgttttataggggaagggagagggaaaagaaatcaaagatacagctctgcttctttccggtcggaacacacctttttcagcatcacatccacggccgtcatcatcacagcgccgacctttcgggcggagtgaggacataccgcaacgcaccgcatgcaggagatgcatttgtctttgtcggtgaccgtaggatcgctcaggtcgatggcctgtaccgggcacttttctgcgcacaccccacagtggacgcagcttttggtggctttggggaccatgccgctggagccggtttctttataagggcgatggccggggatctggggctgccggtcgtcgttggagtccagtttggcctggatcttggcggcaaattccgccaaaacctctgcatccttggagtccggccgtcctgcggcataccgccgggcaatggagtgctctgcaatggccgccaccgccgcaaccacctggaatcctgcctgtttggctccgtcttccagctccaccagggtgtcctcatagtcccggttgccatagacgcacagcaaaatggcccgggccccattgccatggatggccgtcagacgctgaaaggccggtgccggaacccgtccgccataggagggcacagcgatgagcgccacatcttcggccgtcaactcctgagccgaaaaatcggccttgctgtcggtgagatccacctgggtgcaatcgccccatgtttttgtcagcaagtctgcggccttctgcgttcctccggtggggctaaagacgatctgaaccattttcatttttctcattcctcctgattgtgtaatgcttgcctttttcctgagaacattataaaatagagatgtaaatcttggtcttacacagcagatacagtgtaacacccgaaagatgtaaagtcaataattacatcaaaagaaagagtttaaccaagaggggagaggatcgtccatgcagctgagcatgaaatgctctgtggctgtccattgcctgattttcattcatgaataccatggaagcgccaaggtgaccagcaatctgctctccctgagcacaggaatcaatccggtggtgatccgcaatatcctcagcggattgaaaaaagccggcatcatcacggtgccccggggcactggcggcgcccaactgtgccggccgccggaggagatcagcctgtatcaaatctacaatgcgttggaaccggatggtctgtcatcccttatcggcattcatccctgcggagaccgtccctgcccggtggcccagagcatccgcaatgtattgaaggggccttatcacaaaattgaagactccatccgggaagccatggaaagcgtcactctggcctccatgatcgaggaatttcaccggcaaacttcggaaaaaactcagttggagctttaggcacacagcaaaaaagcggcagttcagccgcttttttgctgtttttctatgctcatccattcaaccagcagttcaatgacaaacaaggcccggggcggtatgataaagccaggatcacaaaagaacgagaaaggatggcgagcatatgaatctcaaagatgcattccgcacccaaaacaagctccagctggtgatgaacgaggccatcgacatcctggaagagccccggaacattctcaaaatcaaaaccacccatctgcgcagccgggtgatgaaagaagcctaggatgggatagtggaagaagaggcccccagcgaatacgccggatgcgcaaaccaactggcccagttcctcctgtttctgatgaaagagcgggaaacactcagccaggccatccgcgaagccaagggtaaactgcctctggatctggacagcgaagtggggctgaaccggcagcggcagaccctgagccgtgtttttcggaatatggcttccctccgcagcagcgaaaagatcatccccgacggcgggtgcggctatcggttcaacggcgagggcaatcaggtgatgtatcgctgcgatgccagacaggtcaccaccattgatttcgatcggaacaagatccgcgccctgggggcccagttcggcaagcaggccgacgccctttccatggaaatggacaaatgcctggtgaacacagaggtggactatgcgccgccctttgatctcaatgacagctttgacaccattttcaccgactacatggaaaaaaacgccgattgataacaaaaaacctgtgcccggatggagggcacaggaggtatggcaaaaccaacaccaccgggaaggccggttcaggcgcagatgaactataacgctgcgcatcatgcaaaaagcagctgttttgatcaatggatcataaagcaaacaaagaggaatctaggatcgttcttccctttgttctccgtccattccatggctgcaaatacgctttttcccattccgcttatcccatttttgcttctacgcttcctcgaatgttattttcaagagaaagtcgcccggcggcttggtttcccgcggccctttggccaggaaaacaaagtccccaggcggataagggcctacgcggccgggaagttttgccatatctcctgcgccctccaaggggccggaaaatgatttgagcagcaggggaaatcctgctgctcaaaggaaatcatatgagaagaagagaccagaatctcattcatggagacttgaaacaatgcgctgagggcatagaggttgtcgatgctgggcaggctttgtcccttttgccatttgtagatggcctggggcgcgtcaaagccgaaaaaccgctgaagatcgtggacggtcaatccccgctcctgccgcagccgggtgatgtttgcgccggtggccaccgggtcgatcaccggaaaccggatctgagccataaggtatcccctccgttctgcaaaatagctcttgtttatgggaaggtatctactataattcattttttgccctcatgcaacccatcaggggaaaatgtcacgaaactgtcacaagaaaggagagcggccgccatgcagggaatggttccactgaaaaagcaaagcaagaaaaagcagcgggaattctgggaaagacagcggggagactggcagggcctgtgcccggtgacccgcatcgtgcccagcaaaaagacctatcagcgaaagaaagaccggcagcttctccgccaggaaaggggttggtcggatgaatgagcggccttttgactgcggggaacaggggagaagggatcgggcctatcgccgttttcaaaaaaagaagcacatggaccagctgctttattggataggccatctgccctattttgcctgttcgccctacctcagcgatcattttcagggcaaaagcctgtggcacagcggcgtatacatcaaataccccaacagcaaccggggccagagctatctgaaacggaaggccagccgggcatcccggcgttttcgtgggatgcccgccaaaggcaaccactaccggaaggtgtttgactaccgctgggccatctcctgaattgcaggaatcaaacaaaaagggccggagagctttgcttcttcagcagctctccggcccggtttctgtcttttcaaaaggactatttcaacttggccccatcctggaaggcctggcctaccacttcgcccagcttgcggtaggtgttgtgcaccggatcaaaggtgatgggctggagcttctccgggtcgatttttccttcgccgtccagcacggcctcatccacgctgatgttgacgatctggcccaccatatggccgttttccgggtcatagctcaccagacggcactccaatgccatgggcagctcatcgatgagaggggcgtccacatgctctgccttggtggtgtgccaactggccttttccatcttgtctgccgtgtcgttgccggaaacgatgcccacatagtcgcaggccaccatctgctctgccgtggccatgctgacggtgaaggccttccgggccagaatgttggcggtggtcttgtgccgtgcgccgatgcacatggtcagctctgtgccgccgctgatgccgccccaggctgcgttcatggcatcgggggcgcccttttcatcgtagctggccaggatgaataccggctggggataggtccagggcttggcttcaaaattcttgcgcataatcaatgacctcctgtttatttttcgaatctactatcaaatccagttactccagggaaatgggatcatgggggaaggggttttgttccagcagatccagcagcttttgttgcagctctcttttgcccatttctccgcaggcctggaggatgacttcctgcacccggcccacataagcgctttgaaacagctgccggccgaaccggtcgtcccattccagctgctctaccaccagaggaagcacccggtcattttgcagcacatcctccatatcccagcccaaaaactgccgggcggcttcttcttcctgcaagtgatcttccgccgtgtccagcagcagcttgaccatcttcagggcggtctcgggagcaaattcgccggtctccaccagcagatccatggtgtccagctcttccagctcttccgggctccagtggctgcgaacctctggaaagtccagcaggagcagatcccggcaggccagggggttttcggaaaaatcccaccgggccaccatctgcacaagctcccgccgggaaaaggagggaggttcctccgggggctgcaccgtcagcttcagagagatgtgcagcgcattctgtaacgccgctttaccagccggggagagggaagacacatccccaaaatcaccgcaccagggacactcccaacgctttccccgcaccctcaccgggctgccgcaatggggacatgggacagatgacataggcgataccctccttccggttcgctataaccatgtattttacatggcaaggcaatcagctatacaccaactgaaaatcagcggatttgcttattttatgaattgatcgatggcccggttcagttgctgcaccgtttccttgtcaccggtctcgatggcatccaccaggcagtgctcaatatggtctttcagaatgatcttgccggtgctgcccagggccgaacggacggcggccagctggatgagcacctgggaacagtcctcgccccgctccaccatgtttttcaccgcctgcaaatgcccgatggccttggccagccgattgagcacctctttggtgtgggtgtgttcatgccggtgaaaagggggctgctgtccctcttccagggcctcttgtgaatcgtgggtctgggtttctttgcacatggtcgttcctccgcgaatctgttaaaaccattgtatgaaaaccgcgaaaaattgtcaaggcatccccccggggggcttccgaaaccggcttttcgctggtatactgggacggcaacagagatgcagaagcatctcccggcgggagaaaatctcccgttttttctaaacactccccaggccctcaaaatacggaccgaagtccgctgtgtgcgccgaaaaaccggcgtacacggcgtttttttatgtgcaaatgcaaaaaggaaggaacacaggatggaacagatcaaagagatgatgattgactactggacccagcgggccccggacttttccgctttgcggcaaaaggagctatccggcgaaaaaagccatctttggcttgcagaattggagcaatacttgccaaagaaggaaaagctgcgcattctggacatcggcacaggaaccggcttttttgccgttctgctggccgcccagggccaccaggtcaccggcatcgatctgaccccggagatgatcgacgaagcccggcaaacggcaagcaatctgggtctggccgcagattttcaggtgatggacggggaaaaccccgcttttgctcccggctccttcgatgccatcgtcagccggaacctgacctggacgctgccccatctggagcaggcctacgcccagtggcacagcctgctccagccccaaggagtgctcatcaattttgacgccgattactgccgggaagagcagaaagagctgccgtctcatcacgcccacgaaaacatcagttcccagctctgggggcagtatgaagaaatgaaaagcaaactgcgtccccggcagcgcccccggccccagtgggatgcggagcttttgcagcgggccggattccaccagatcgccgtagatcaaggggtctggcagcgtctctatcccaaagaggacgccttctacaatcccacccctattttcgccatcacggccagggcctgagagggaatcatgggaacttacgctctcaagcgaatcttgcagctgatccccattttgctggccatcacttttttgtccttcgccatgatgcgcctggccgggagcgatgcggtgatgcagaaaatggagaacaccggcgtcaccctgtcccaggaggccatggacgccgcccgaaaagaactggggctggatcagccctttctcacccaatacgcccggtggctggggggcgtgctccggggggatatgggcaaaagctatctgtccggggaagaggtgttttcggtctttctctccaaattgcccgccaccttgcttttggccgcctgttcggttttcctcaccatctgcatttccgttccccttggaatattaggagcagtaaagcaaaacagctttgcagatcagatcattcgttggctcagttttctgggcaacagcctgcccaatttcttcgtggccctgcttttgatgtacttctttgcgctgcgctggccgctgtttcccgtgatctcccggcagaccaatctgcaaagcgtggcgctgcccgccttcaccctggccatcgccatgtcttccaagtacatccggcaggtgcgggccgccgtgctggacgagctggggaaaagctatgtgacgggagccagggccaggggagtggcctttcacgccatcctgctgaaaagcgtgctgcgctgcgcccttgtcactctgctcactttgctcactctgtccatcggcagcttgttgggtggaacggcggtggtggaatccatcttcctgtgggacggggtagggaagctggcggccgacgccatccagatgcgggattatcccatgatccaggcctatgtgatgtggatggccattttgtatgtggggatcaatctgatcaccgatctgtgttatcgtctgctggatccccgaatccggctgggaaggggtgcggcatgaagttatctcattttcttccggcgatcaaggcccttccggcccccaaacgccgtcttcttctgtgcgccgcccttgcggtgctgctgttggctctggccgcttttgcagagtttctttgcccctatgatcccgcggcccagatctttcctacactggaaggccccagccttgctcacccggcgggcaccgaccgctacgggcgggacctgttttcccggcttctgatggggctgcaaaccagtgtgttttccgccctggccctggtgggcattgtggtcattctgggaaccgccctggggatgctgtgcggctatcggggcgggcgtctggacggaatcattatgcgcctggccgatctgtgcctggcgttccctgggctggtgctggctctggccgctgcggctctgctggggggcggggttcgcaacggcgtgctggccctggccctggtgaattggcccaaatacgcccgcatcgcccgcagccagactctggcgctgaaaaacaccgactatgtggccgcggcccgtctggccggagacaatgcccgggagcttttgctgcggcacattttaccgaacgccctggggccgattctggtcaccgccaccctggacatcggggccatggtgatggaactggctgcactgtcctttctgggcctgggcgcccaaccgcccacagcggaactggggagcatgatgagcgaaaaccgcagcatgatgcagacctatccctgggtggtcatggggcccggcatcgccattttcctggccgtggccgttttcaatctgctgggggaggcggtgcgggacgctctggacccgggcaaaaaagaagagcccgtccgccaaaagaaaaaatccggaaaaaagaaaaaggctctggccctattgttgggggcctgctgtcttctgggcatctttttgccgcctctgggcgagaaaaaggggaattctcccgccgcccaggatgccaaaaccacctttgtgctgggtgacaccactttcaacagcgaaaacgaagagccggatgtgaacccccacaacgcctattccggctgggcctgcatccgctatggcatcggcgagaccctgttccgctattccgaaaccatggagctggagccctggctggccgcgggctgggagcaaatcgacgccctgacctggcaaatcaccttgcgggagggcatttcctttttcagcggccgccctctgaccggggagagcgtgaaggagtgtctggaacatctggtgcaggtgcatccccgggccgccggggatctgatgctggacaccatcacggcccaagggcaaacagtgatcatccgcaccacttcccccaatcccaccttgctccacggcctcagcgatccctacagctgcatcatcgatatagaagaaggggtgaaagcgggcatggtcaccggtaccggcccctatatcccggtgtctctggtctccggccaggagctgcgtctcatgcgcaacgagcactactggaacggccagcccggctttgagaagatcaccgtgctcaccatcaccgacggggacaccctcaccatggccctgcaatcgggggagatcgacggggcctacggcctgccctatgtgagctacccactgtttgatcagggggactacaccttttccagctgcgccaccagccgggcttttctcctgcatatgaactttgaaagcccggtgacctccgacaaggcagtgcgccaggccattgccatgggcattgacaaagaccgcttcgtccaggatcttctgggaggccatggctatcccgccggcggcgcttttcctcagggctttgccttcagcggaaaggtaacagccaaggaatataacccggaaggggccaaaaagctcctcaccgaaaacggctggatcgatcagaatggcgacggcatccgggaaaaggacggccagccgctgacccttcgctggctcacctattccagccgccaggagctgccgctgctggccgaatcggcccaggccagcctgaaagagcttggcatccaggtggagatcatcagcaccgccgatcacaacaccaggcgccaggaccccacagcctgggatgtgtatgccagcgccatggtcaccgctcccaccggcgaccccgcctatttctttgccacccactgtctggacagctcggtggccaacaacggccattaccacaatgacgctctggaagagctggcggcgcagctctcccagacctttgacgatgaccagcgggcccagctctctcaacggatgcagcagattcttttggatgacgacgcctttgtcttttgctcccatcttcagatgagcctggtctgccgcaagggcatcaccggccttacggcccacccctgcgatttttacgaaatcaccgccgccctggcctccacgggcgaaaccaagtgacgccccgcggcagaaaggaagtacccatggaaaagccattgctaagctatgaatcggtggaagtctgctatgacggccatgccgttttgcaggatgtgagtttttctctttttccaagggagattctgggcattgccggagaatcgggcagcggcaaaagcaccttgctgaaagccgccatggggcttttgggaaagggagggcaggtgagccaaggggccattttctttcagggacagaatctgtgccaggcatcggaaaaagagatgcgggctattcgtggccggggcctgggtatgatctttcaggaaccgggggcctctttctgcccggtgcgcactctgggaagccagatcacagaaagcctgggcgcccggggccgtgtggcccggaaccaggccaaaacccaggccctgtctctgttcgaagcgctgcacctgaaagacggggagcggctttggaacagctatccctttcagctcagcggcggcatgaaccagcgggtggccattgccctggccatgctgcaaaaaccgccggtgctgctttgcgacgagcccaccagcgccctggacagcttgtcccaaaaacaggtgatggagcagctgctgaagctgcggcagctgttcggcacggccatggtgcttgtgacccaccatatggggctgctttccgccatggcggatcgtatcctggttttgaaagaggggcaagtgatggaatacggcaaggcgtcccaggtgttgtatgaacctcagagcgcctacacaaaggcgctgctggaggccgcaccccggctgaaaagaggctaaaaaatggaacccattttagaaacaaaagatctgaccaaagagatccgggaaaaaggaaaaccggttttcactccggtgaataaagtgagcttccgccttgagccgggggagaccttgggcattgtgggggagtcgggcagcggcaaaagcaccctggcccgcctcatcacccggctgcgggatgccacatcgggccatatcctgctgcgcggccaggatatcacccgggccaaaggagggcagctgcaatgggcctaccagcagatgcagatggtctttcagtccccccgggcttcctttaatccgcggaaaaccatcggctacagcatcggcgaaagcctgcggaaccaaaagatctccccggacagacggcaggagcaggtgcgctccctgctggagcaatgcggcctgcctccggcctgggaaaaccgctatccccatgagctcagcgggggacagtgccagcgggctgccatcgcccgggccctgatagtggaaccccaggtgctgatctgcgatgaagccaccagtgctttggatatgacggtgcaaaagcgtcttctggagcttctatctaggctgcgggaggaaaaagggctgtccctgctgttcatctgccacgacctggccttggtgcagtccttctgccaccgggtgctggtgatgcacgagggccgggtggtggaggaggggacgccggatcaggtgatacacgcccctgcatctccttacacccgtcagttggtggaagccagtctctggccctaaaagccccggagggtgatggaaagggaaaagctgcggctggatgccggggaagggcggatcaggttgatgcgccggatcagggttttcagcagctggtttctttgctctgcatccaaagcagcatatccctccagcacagaggccccagacggggcctcctttttttcttcccgctgacaaagctgccccagctgctctttgatctctttctcccgcgcctccaatgtgctgcggcgctgggcgaatacctccggggtgtagatctcccgctccagaaaatcatggagccg

SEQ ID NO: 4371 - DNA, 11696 bp, Unknown
  16S sequences of unknown bacteria
tcgacttgccgctgccggtgctgccgatgaaggccgtggtcgatccgctctcggccgtaaagctcagatcatggagcacatcctcctcggcgcctggatagcggaaagacacgtggcggaattccaccattcctttcttggactcatcaaacgcctgcggctgactgggatcctggatggacggctcggtgttcagcacttcattgatgcgtcctgccgcaaccgatgcacgcggcagcatgatcgacatcatcgtgatcatcatgaacgccatgatgatctgcatcgtatactgcatatacgccatcatatcgccgatctgcatcacgccggcgtccacctgatgtgatccgacccagacgatcaggatcgaggtgcagttcatgaccagcatgatgagcggcatgagcaggcccatcgaccgtccgacaaacaacaggttcttcatgatgtcgcggtttgctttctcaaatttgccttcttcgatcttctggttgttgaaggcacggatgaccggcataccgtccaggaactcacggacgaccgcattgagccggtccatcagcttctgggtgatcctgaacttcggcaggacgatcgcaaacgcactgcccatgatgccgatgatcacgatgatgaccagcgcgatgatccacgtcatgtccgcatcagaattcagcaccttgagcaatgcgccgatcccgatgatgggcgcatagatgaccatgcgcagcatcatgaccatgaccatctggatctgctggatgtcgccagtcgtcctcgtcagcagcgtattggtcgagaaccggctgaattcagccagggaaaacttctcgaccttggcgaagacatcgcggcgcagattccgcgacatcccggccgcgatccgcgaagcgaggaagcctacggtgaccgcagcggcggcggagcccagcgccaacgccagcatcagcgcaccattggtaaacagataagaatactggatggcatccacatccatgccgatcgcctcgtattcgcctctgatatattgcgcattggccgtatcggcgctgctttgtcccatggcgtcgctcagcttcgtcatctccgccttgatctgatcgatctgctcctgcggaagctggctgagcacatcgctcagtgatgtgccttgcggcatgctctgcatcatcgccagcatctgctgctgttctgcagaaagcgcctctgccttctggggatcgtccatcgcctcctgcagcgtcttctccatctcattgacgccgctcacgcacagctctgcatctgataaagcgaggttgagcgccgcacgctgttcctcatccaccggttccaggatatacagcgtttcttcgctcagcagcggatatcgcgcggtctgctcgctgtctgccgcagacgggctcactttttcataatgttcctcaaacagctgttgctgctgttcatccatgaatactgacagtttctcatattcttgctcacggatcgccaccggcacgccgtcttcgataccgttggcattgatgccgacattgacgatgttggacatgtagtccggcatcgtcagctcacacatcgcctgcgcgaaaagcaggacgatgatggcaaggatggaaacggcaaacggcttcagataacgtctcagtttcagcattctgattctccttccagttttgtctgttcacggtcgtgatgatcgcggtaaaagtcaatcgcttttttcaggatgcgcaccatggcggcggcatcctcctctcccagctgtgcgacgaacgactgcagattgctctgcatctgatccatgcattcctgcatatgcgcacgcgccttttcgctgacccggatgtagactgtccgccggtcatgctccgggcgcacccgctccacccattcttttcgttcgaacgcgcggatcgtctgcgataccgcggccggcgtcactcggaaaaaggcgctgaggtcgctcatcttcaccggcgtgccatccggatgcatgcggcagatcgcctgcagcaccatgacctcccggtgattcatctcctccggcttcggcctggccttcaacatcgtcccgttttccttctgaaacaggtagagcatgtacaggatctcctgcacgaccttctgttcgttcatctcatcacctctgtcagttaagcagattaactgttaacactcttaaccattatatgccttttgccttgatggtcaaccataaagtgtattttcacatcattttccataaaaaagaagtgcctgcgttcagacacttctcttcattgcatttgattactgctcttcgctctttctcctgcgcaggcctggaatgatcatcattccgccggacagggccatcatggcaagcagcgcgcccatgccgcttctggttcccgtttctgccgtatcggcacgatccggagaatcagcgctgccttccgcggtcacatccgatgcagatgtgccttccgccggcttcagcgcatccagttcaacgttgagctcttccacgatcgcatccacggtatcctgtgtcgcatatggatcatcactgatggtcttcgctctggtcaggatcgcattcagcgcttcaacgtccgcttcgtcatacaggctgagatccagcgcggccgcgcgggcaagcgcctcgttcagcgcggtcttgtcggccttcgtccttgcgttcagccttgcctccagcaacatgctgctggcatcatcgatctctttctgcgtcgtcgcgtttgccaggacttcttcagcctgagccagcttgtcctgcaggcccgcaacggtggacgggatataatcatcgatgttttcgatcatctctttgacgatatcgatctcaaactgcagcgcggacttatccagcgcttcgctctccagcgcagcgatcgcatcgctcaggttcatgatggcgccggtcacctctgccgtcgtggcatcttcattgatcgctacggcctgtgccgcgtcgatcgccgcctgcagcgcatccttgctggcctgagtatactctttgctcagatagctctttgcggcttcgatcatatcttccagttcagccttggatacgatctcccacagctcctgggccgccttgctcatcgcttcattcgctgccttcagctcatcggcggttgctttaggattatcaaccagtgtctgtgcagcttcgaccgcatctatcagcgcctctaccttacctggacggagtccttctacgttggtcaggatgttctcattgatgaagtcgatcgtcgcctggacgtcttctctcaaggcatccgtgctttcatccgtattcagcgcctgcatcgcttcgctcagatcgagcagtgcggtcacgacctcggtcgtggtcggtgtttccttggccagcacggcctgtgcgttgacgatggcttcattcagcgccgcatcctcagatcccagagcaacggccttctcgaccatgttctgcaatgcctggaccgccgcatcgctggccggctgcgtgatcgtcagctcatccagcgcgccgcgcaggcttgcgatgacctgctcagtgtcagaagagccggatgcatatactttctgcgcttcgatcagcgcggagatcatgttctgcaccttggccggatccttatcagagatatcggtctgctccgcttccaggatcagatccttcagcgtggagtcttcttcgatctgttcataagtgaaatacacttcggagatctgataccagttttccttgtcttcggtgatcaggatacgtacctgcttgaccggcatctgttcaaattcaaaggtggagtccaggctgtcgctgctcatgtggccgaccgtgacccattctccatcgtcgccggcgacctgcacatcagcgccgttgatgacatcggcaccgacattgcttggctgcacgatgcggacctcgctcatgttcaccgtttccgggaacgtgaaggtgatgtgctcaccagcgatctgattgccgttcgcccagaacttggtggacgtgttgccatcgatcatgttgctcagcgcataatacgtatatgccggcttggacgccgtgatctgcggcgtgttgccatccggcttcatcagcgcggacttggcatcctcgatatcagcgagcgcctgcgccttctgctcagcgctgctgtctccatacaggatctccttggcatcggctaccgcgctctgatatgcgctgtaaccagatgaataaccggtatcctccagcggatactgcgtttcgacatagagggcgaaatcagccagggaaacgagcttggcacttgcttcatcgatggcgttcactgcctcatcgatcgcggtctgctcactcatctcatcatcgttcaccactttgcccgcggcgatggctgccgcatattcaccataagtctctgcgatgcagctgtcctgcgcgatcacgttgtccagcctgctctgcagctcgctcttatccgtatccagcgtatacgtgaaggtgtattccgctccttcttcgctgtaagtgccgcttaccgtgccttctgaaaccagacgataaccgtagatctcatctgcggtgaaggagtagctctcatccagctttccataacggacgacaggatctttcagcactttgccggtatcgctgacataattcatcgtcaccttgcccatgctgtcgctttcctggatctcacctgcatcaggcagcgtggatcctttttcgtatccggccgcatgccccagcttcgtgtagttatcctggaattcatcgaaggtaacgatatcgctgcttgatgtgttccatgacttggatgccagcgcacgcatctcatcggcgatatcctccgcaatccggtcttctgtaacgatatccgggttatcgcaccagatgcccatgctgacgccggcgatgaaatccgaatcatccggaacggtgttgtccacatgcgatgcggatgggaactgtcccggcgtccagttttcaaagatgttgcggtcctggttcagcacatcgaacgaagcctgatcacgtccatcggtcggcatatcgtttctcagcacatagtagaaataacttgagttgaagttgtagaatgtgtcaaatccatgattgcgcaggatctgcagcgtggagatgctgcggttccagcccatctgtgaccagtaatcgatgccgatgtaatcatgcatgtcgatcctctgcggcgtggaggaattctctccatagtatacgccgtcattgaagatacgcggggtaaatccgccctcatgcacgaattcagcgatctcattgatgtaattggcgatggcgtctttccaggtatagcccgcgccccatttttcctgggcatagttgtccagcacacgctgatactgcgtggtgaacggcgcacggtcaaactccatgtactcgtcgccgccgatatggaaatcggtgcagccttcaaacagctccatatactctttatacaggctcttgatgtattcgaccgcctccgggttggtgacgtcgagaccggacgcataatgatttccatagatgtcgacctgtccatactccggatgtgccctcaggatctgatcgacatgtcccggactgtcaaaggacgggatcacattgatgccgtacttcttcgcttctgcgaggatctcacgcacctcttccttggtcagatattcatccgacacgatcgaagggtccgtctcacactcgatgcggaatccgaggttctcggagaaatgcatctgcagcgtgttcatcttcatgtaagacatctcgcggatctgacggatgaaccagtctttgctgatgtacttgcgcgcgcagtcgacgtgcaggcggcgctccgccacatccggataatcaatgatcgtaccataaacgagattgccattgctgatcatcatggtctggatcgtacgcaggccatacatgacggcattttcgctggctgcggtcagcaccgcgccattgtcgccgatctcgatccggtatgcttcatcgctgtcggattcctcacagatcgggttctccgtgtccagcacgatgagcacatcggccggcgtcatgtcttctctcatcccataaaccatcgtaaacggctcagcggagacgatctccttgtccgcaaactcggaattgaccagcttgacgacttctgccagacgatcattctctacattttcctgtgttgcttcgatgatgaaacggcttccgctcgtcagcttccatggatgttccatgtccgcttcgtagctctgcacgatcggattggaccaagcggccggttcaagatcgctcaggttctcgcccgtatcctgcacgctcacgccggtatcgctggcctgtacagggatcacggtgcccagattgctcaggaccatggttccagccagcagcgcactggcggaaatccgtttccagtcttttctttgcttcttcattcctagctcctttcttctccttctcatttactatgataccgctttcccctggtttcgtctatataaagtttcacttgttgaactgttgaaacctgtttcaggagaccataaaacacgataaaagggcataaatttccatatttgtcatacagaaatttacacccttatcgtcagatctgatcccttcggcgaacgtagagcggatgctccggcatgccgaggatctctttgcggtggatgatccgcgccttcttatccacgaccgcattctccacatggacccctttgccgatatagacgcccggcaggatcacacagccgcgcaccacagcgccctcttccaccacgacgccgcggccgatgacgctcttttccaccgttccgcggatcttgcagccattggagacgatgctctcattcaccatcacctcatcgccatactgcgtcgggcaggagtcattggtccgggtatagaacggccagctctgatgcagcagatcatcgcccttgctgtaatccagcagatccatgttggcatgatagtagctgtcaaaatcattgatgcaggcgagatagccgcggtgggcgatgccctgcacgtcatattcttcgctcgcctcgctcacgacatcgcgcagccagtacatcatgctcgtgtttgctgcccgcttgatcagcgtgatcagcagcgtgttgcgcatgacataggtctccagggagatcgagcggttcttggcgttgccgcggttgcggtcgatggacagcacgcccttctgccggttcagccgcagcacatcacagttgagatacgcgctcttcgcattgtccacattctgatacaataccgagatatccgccccgctggcctgatgctgctgcagcagctgatccagatcctggcggtataccatattgggcggcgcgatgatcacatactcctgaggcatcgcctcaagcagctccaggatgctgcgcatcgcacagatatccgtattgttcacatcgaccccttcgctgctgatcgccgggatgatctgcagccggccgcgcttggaattcagattatactgccggccattgcccagatgctccaccagcgaacgcggattgctcttcacgagcaccttgatctgatcgatgccgctgttgctcatgttggagagcggaaaatcgaccaggcggtagcgtcccagataagagaacgcggagaccgggcggtattcccccatgcccttcacatgcacgttcgcgctttcgaaattgacgattccatatgcatcacacatctgactcacctctcacgttcttgctgatcagcgcgatatgctcgctgtcgggatcaccgacgactgcgccggcgccgatcttcactcctgccatgacgatgcaccgtctgactttcgcgccctgtccgacctccacatcgggcatgagcacagaatccgatatccgcgcatcctgcgccacgctgacattggtgaatagcacgctgttttccaccatgccttcgatcacgcagccctgattgacataagcccggcgaagcttcgcctgcctgccgatgaaatgaggcaccgtggagatgtcttcggtatagatcttccatgacggatcgctgagatcgagcggatcatcgggatcgagcagatccatgtttgcctcccacagagaatccaccgtaccaacatctttccagtatccctcaaagcgccaggcgaacagccggcgtccctccgccagcatggatggaatgatgtcttttccgaaatcatggctggaacgctcatctttcatgtccgcgctcaatttcctgcgcagctgcttccagttaaagatatagatgcccatcgaagccaggttgctctttggctgcgccggcttttcctcaaactcgatgatgcgtgcctcttcatccgtattcatgatgccgaagcggctcgcttccttcatcggcaccggcagcaccgcgatcgtcgcatctgcctcatgtgcgcggtggaatgccagcatcttcgaataatccatcttatagatgtgatcgcccgagaggatgagcacatagtccgggtcctgattatcgataaaatcgatgttctgagagatcgcatccgccgttccgcggtattccgcaaaggccgcatcctctttctcgcgcggagggagcacatagacgccgctgtcattggaatccagtccccagcgctgtccggctgccgcatacgagttgagcagcacgctctcatactgcgtcaggacgccgaccacatcgatgccggaattggcgcagttgctcaggggaaaatcgatgatgcggtacttcccgccgaaatacacggcaggcttggcaatcttcttcgtcagctcatacaggcgtgttccgcgtccgcctgcaaggatcattgcgatcatcttgttcttcttcatgttgaccacccttcattctgaatgcatcgctaatgccatttacgctattatcgggcagacagccggaacgatacgccaaaaaccatgcgccttccgcactgccggttttgtcaaaaatgatattcgcaggacatccgcatccatcagccagatcgatcgttattatccctcatccgtcctgcgtgtgttgatcttgttcttttcatcattatacaatttgtttcatgatcttttcagtctgtttttcatcgatcgctcatgttataataaatgatatgtcagaggtgatcatatggccattgaactagtaagagaatacctgaaagcatacggaagagatcgggacatcatcgagctggatacatccagcgcaacggtggagcttgccgcacaggcgctgggcaccggtcctgagcgcatcgccaagacgctctccttcatgggacgcgaccatgcccttctcgtcgtctgcgccggcgactgcaagatcgacaatcataagttcaaagagaccttccacgtcaaggcgcgcatgctgaaggcggacgaagtggagaagtacaccaaccatgcggtgggcggcgtctgcccttttgccgtaccggaagagacacccgtctatctggatgtctccctgaagcgcttcccctggatctatcctgcctgcggcagcgccaattccgccatcaagctgagcaatgaggagctgcaggccctggtgcccggcgcacgatgggtcgatgtctgtaagatctgagcctgcggtacgcaggctcttctgttatatagaataaggagcgaaaaatatggtgaattctgtcatcaccagcatcaagatccgctgggaagacatcgcgagcgacagctggctgcgccagatcccggcgctgcatgatctggatcatcttgccttgcccagaaggctgaccatcttcaccggcgaaaacggcagcgggaaatcaacattgctggaggccatggccatcgcatccggcttcaatccggaaggcggcacccgcaactatcatttcgctacgcgggactcccattcttccttgcatgaggcgctcacgctcgtccgccggccgcccatgctgcgcggcggctatttcctgcgcgccgagagcttctatcagacagccaccatggaggaggcttacgcagatgcgcagcacccctcaaaaaagtatcatgaacgatcgcacggagaaagctttctggcgctggcagacgatcatttcggccgtcccggcttatttttcctggatgagcctgaggctgctttatcctggcagcatcagctcacgctggcgttcatgatcagcgaaagcctcactttgggctcacagttcatcatcgccacccattccccgctgctcatgtccattcctgatgcctgcctgcttcactttggcccggatggcatctctccatgcaccgtggaagagacagaaagctggcagatcatgacgctgctcgtcagtcaccgggatcagctgttcagccatctgctgaacaaaacagaaaaataaaaagaaccccttttggattcttctcacgaatcggtcatcttaaccactctgcgatgaccgcgctgattccgtttcagccatttctcggcagcctgttcatctttcagtctagtaatgatcgcgttcgggcaggaggccagcagtctctgcacgtctgctgtcgtgcctttgatgagcctgatttcccgccgcagtttgattccgtaaatgtactctcgtcccggctgcatgtcatcactcctctttttcattgtaatacaaaacggaatttttgtcacaacgattccgttttattttacggttctgatcacatgattgccggtttttcccgtttatttcacgattctgccattcttttgttatttgcgtaagaaccgaccgcagtggcgaccacttctccgtccttcagcctggccgtcgccctggtcatgatcatgcggctgccgctgtgatcacagactgcatcgatccacaattcatcccctgtttcgcttcctttgacgaagtttaccgacatctggatcgtcggcgtgaacgccgcctcgctgtatgtgtaggcagcgccgcccatggccatgtccagcaaggtgcacaggatcccgccatgcgtgcggcccaccggattcatctcccagccgcgcaagggaaacttcaatgtcatggtccgtgtctgctcatccatgcgcaccagttccatctccaccatcgcgttgatcgtgccttcggcccgggtgcgcagcgagatgaactgcgcagcacgctgttttgctctgctcatcattctcctcctctccaagagaaaaggcagtccatgcggactgccgcgctttctgctcattcgttattctgacagacggttcatcaacggaaactgcgctaagcgcagttctcttccaattacatcagcttcttgatcgcggagacccatgactgatacttatcgcacagcgttttcagcacttcttctccctttggttccaggtgataatacacgcgcattctgcggccctcgatcctgtcggtccccgtgatgcatccgtcattgacgaaagcgcaggtatccggctatgaatgggacgcattgaccagacggtacagcaccggatacagcgtgccgaggttcatgtcgatgatgccgtcagtctgttctttcatgtaattggcgatctcataaccgtaacaatcctgctttttcagaacaagcagaaccagcatttccatcttaaagaaagcattttcttttgacataattcaacctacctttcgcctatgcgaataaaataccatatttttgtaaaa

SEQ ID NO: 4372 - DNA, 25734 bp, Unknown
  16S sequences of unknown bacteria
cccgccactttctccttggtgcatccgcagtggaaccgaaccggcaccgtctcgaaaatctccggattcaaatctcccagcagggcctgaatcatatcctccggtgtcatacccgcctccatcatctcactgacggatttgctgttctgcagcaccttctcgatggtcgcgatggtttcctcttccacgtccggcatcatctggatgataaaaccgccggcatggcgaaccgtggaatccgtattaatcattacgcccagtcctaccgcggacggtgtctgctccgaagtggtaaaataataggcaaaatcgtcgccgatttcaccggtctggagttccacctgaccattgtacggctccttcaatcccaaatccatgcttacggtcatggtaccggcacccacggcagcgcctacatccaatttccccgcatatttcagcggaatgtccacacacggattcgccggaaaaccctttacatttccgtggctgtccacggtgacggtcatctggccgatgggaccgtctccttttatggtcaccgtcagcttatcatcttctcccttcatcatggagcccatcatcgccgttgcacccatcagccggcccatggccgcagtgactaccggaaaggtatgatgcttctctctggcggtcgccgtcatctccgtggaatcgatggcaaaggcacgcaccgtttcgtttgccgcagttgctcgtactatatagtctgacattttcgtcctcctgtattcttttaaatccttccccgtcctcacaatagaatcatggaacaggggtgcatagtgtgctataatacattagatattgtaccatacatctgaaataaaggagttaaaaatattatgaatctatgcatcgattcccgcaaggtacaggaaggcgatatgtttttctgcatcgacggttctgctctggacggacacgatttcgcagaacaggcggttgataacggggcaaaagtaattatctatgaacacgacatgccgatgaaggatcaagaaggtgtgatttacatcaaggtgccaagcacgctggatgcactgaacgaggcggcggcttctctgaacggatggcccagcaagcacctcaccatgttcggcgtcaccggaaccaacggcaaatcttccatttcctatctgatcagcaagatttacaccaaatacaagggtgagtgcggatatctgggcaccatcggcggtcagatggagggaaagaaatacgatgttcccctgaccacgccggacatcatcccactgcagcggacgctggaggagatgcgcagagacggagccgaggcggcagccattgaggtcagctcccacggtctcattcagaagcgcgtaggtgcggtggatttcgattatgccatcttcaccaacctcacccgggagcacctggattatttcaagaatatggaaaactacttccaggccaaatccctattcttccgaaatctgaagccgacggccgtagcgatggtgaacatcgacgatccgtacggaaagcgaattgaagagctgtgcaccggcaaattcatgtcctatgccatcgaacagccggcggattacatggcaaaagatatagtctacagtccggaaggcatgtccttcacgctggtgcacgagggcaaggaatatccggtcactaccaatctgcaggtgacctataatctgtacaacctgctggccgttgccagcacactggatcaggccggtctgaatctggaggatgtgattcgggaattcgagtacatcccatccatcccgggaagaatggacgaaatccgtttcggtcaggactaccgagtaatcgtggactacgcccataccgacgacagctacaacaagctgctccactacgtgcgccacgacctgccgggcatccgccggattatcaccgtatccggtgcaccgggaaaaagagatgcgggcaaccgggagattttcggacactacttcagccagtactgcgactattccatcctgacggaggaggattgccgcgacgaagccccgaaaaaggtggcagatgaaatcgccgccggcatgaaggacggataccctcacgaatacatcgagaaccgcgcagaagccatccaggctgccgtggacatggcgcagccgggagatatcgtcctggtgctgggcaaaggtgcggaaaagtatctggacggcaccaccggaaagcgctactgggaaggggacgatgtgagtgcccggaaggcagtgcagaaccgcttggagcgggagaaataagatatgcagaaaagaaaaggagatgagccgcgggctcatctcctttttggttgcgcggcagcggacttggtgcaaggaaacccgcaaagccttattgtaccgtttcgcttgcaccaagttttaggggcttttcgccggtgtgcacctctgctatgggcgtttccccaaattatcaaacaaaagcaaataaatatacaattattcctgcaattaatgaaatcaacagtgttatactcactaagagttttgcaggcactagtttgctgctccatatatactgtataagtagtgaagctagcataccaactatccaggatagaataaatacaacaatccctgacttatttgtagcatatgcaattgcaaaagaacataacgccatcactattaccgaggttattatcttattttttttcatttatgcctcctctatcgcttgtaatatgacactgcctttatttatagtaaagcacttcgaaatccgacgctgctctttacggtatagaatactgtattcctggatttattgcaagagaagccacaccttccggacctccaaggagaatttgaagttgcttttattcttcactaacaccatttgaaaaagaaccaaaaaacatcctccctgccggtttaccggcaaggaggatgcaatcaagtttccgctattctatttgaagttgtgaaccgactcaccgttatcgttcgatgatactagttcagaacctcacactcgtcaaagttgacaccaatcatctcttccagctctgcgctgacacttacaacgaagtcgattccgtaatccttggaaatcactttgatcttctcgataaattcaggaagtacttccagagaaatatccgcatgcttcataattccatccagatagaatttctcaatgtcgctgttggaactgataattccgaaaataaaaccgatgtactcgcttacatttgtgatgtgaacgaagtcctccatgcagataacacgaatgcggtgatccagatcgtaaatcaggcgggaattcttgttgatgaatacaacgcttcccttgcactcttccgcatctctattcgcgaaatcaatcatgttctttgtctttccactccccttgtgtcctactaacagtttaaccatggcagtgtcctccttaaatttatttttgatgattgagtcatatgacaaatatgtcttatgttgcgttaattatacaacatcttgtgtagcggttcaataactcaaattatttttccgctgctttttctgcatccagctgcttcacgacttcgtcgatgcggtgtgccaccttgatgaagtcttcttccttgaatccacgggttgtcatcggtgcagtacctacacgaacaccactggtctgcatcggggaacgcttttcgttcggaacgcagttcttgttcagggtaatgcctacttcatccagtgcgttctgcagatctcttccggagaattcgtgatctgacagatccagcaggaatacgtggttatcggttccgccggttaccacattgtagcccatcttgatgaattcctctgcaaaagccttgcagtttacaacaacctgatgagcgtattccttgaattccggacgcagtgcttcttctgcgcaaacggcttttccggcaatgatgtgctccagcggaccgccctgtgcatatgggaatacggcgctgtctaccttctttgccagctcttctctgcagaaaatcattccgccacgaggtcctctcagggtcttgtgagtggtggtagtgatgatgtccgcataaccgaatgggctgatgtgctcaccaccggcaaccagaccggcaatgtgtgccatatctaccatgaagtatgcatctacgctctttgcgatttctgcgaatgccgggaaatcaatcgttctggaataagcgctggcaccggtgagaatcagcttcgggtgcagctcgtttgccttctttttcaggtcttccatatcgatgaatccgttttcatctacgttatagaaatgtacatcgtacagcttgccgctgaagtttaccgcggatccgtgagtcaggtgaccgccgttgtccaggttcagggaaagaatggtgtctcccggttccagcacagccttgtacgctgcaaagtttgcctgagatccactgtgcggctgtacgtttacgtggtagtcggtatcaaatacctttctccacatgtcgcagcagtattcttccaactcatcaacgtaacgggttccgccgtaatatctgcccttgtttccggaatgtctttcaatcggctttgccggataaccttccgcatacttccaggagaggcagcttccgcatgcagccattaccgcttcggagcagtagttctcagaagcaatcagctctacgttgttcttctgacgattgtattccttctcaatcagatctgcaactctcggggaggtcttgcggatttccgcaatgttctcctgattataagtgctcgaatcatttccgtttctgtcaaacattttttaccatcctttcgtttgatacagtattctcatatctccaattaaatatatcgatccgatgaacagtacaacatcatagcaaccattaaccgctgttgtgtatgcttccctctcatcaggaatcgcagtgcaatggaaccccttctcggtcagcttctccgtcaacacatcacacgaaagtgctcgctcgctgtgaggctccgtaatgatgaaatccgcatgagccggtgcttttcccagctcctctgccatttcgtcgtattccttgtccttgaaacatccaaagacaatcaaaacctttttatcttcgatttcttctccgtaatactgcttcagcgcagtaattccggcccgaattccgtccggattgtgtccgccgtcgatgatgaccgccgggttttctttttgaagaaattcaaatcttcccatgattcgggccttctgcagtccggctcgaatatgctcctcggagacggagacctttccttcttcacacgctttcagcagagccatcatcgccgtaaccgcatttcgtacttgatggtcgccctgcatggacaggtgcaaatcccggtattctttctctccgatggtcacatcaaacagcatctccggccgccgggaaacaatcttgtactccgaatcggagacatccagaaattccgaacctttctgttccgccttccaacggatgaattcctgcgtttccggttccacactttccgaaatcaccggaatgccggctttaataattccggccttgttccaggcaatttcccgaagggtatctcccagaatgcccgtgtgatcccgtcccacctgcgtgataacggtggaaaccggatgctcgatagtattggtagaatcgatgacgccgcccagacccacttcggaaatcatgtagtccacaccgttgtccgcaaagaacaggtaagcaatcgccgtcagaatttcgaactcggacaggtatccgtatccttcctgattcagccattcattgtagttcagcaccgcctccccgtatcgggtaaaggcttcatcggaaatcaggtggttgttgatcataaatcgctcattgtacaccataacgtgcggcgaagtatgtacgcccaccgtatatcccgcttcctgcaagatggaagaaaggtacgtggccacggatccctttccgttggtcccggccacgtgaaaaatattcagtttttcttccggatttcccagaaggctgagaagtcttctcatccggtccaatcccatcggaccttttcgcgcagtgctgtcatgaatagcatcaataaccttttgactattcgttgtcacttttcgctcccatagattccaaacgggcaactacggttgctagcatttctttatacttttcttgtttttccttctcctggtttacgaccgcttccggtgccttctccacgaagcccttgttggacaatttcttctccacgcgggttacttcgccttccaggcgcttcttttctttctgaagtctttccagctccgcctcgaagtctaccagatcttccagcggaatcaggatttccgcaccgtcgataactgcggacattacatccttcggcgcatccccgtcggtgccttccacggtgatttccaccacgttggcaatcttacggatgatgtctccggtaccttcaatggtatccgccagggaatccgtccggacaatcatgttcagtttccggctcggtgccgcatccgcttctacacgaatgttacgaaccgccttgatggctgcgattgccgtttcgatgcgagccgtcgcgtccggatattccagattctcgtcgtactgcggccaagatgcccgaatcagcattgcatccgcaccggtttccgatccttcttttggaaggaatccccagatttcctcggtaatgaacggcatgaacggatggagcagcttaatcagatccttcagcgttttctgcaggacatatctcgccgtcttcttatcctcctcgtcctcaccgtacagtcttctcttgacgatttcgatgtaccagtcgcagtactcatcccaaataacttcatataccttctgtccggccaggcccagctcgaacttatccagagattcggtcactgcttttgcggccgcattcactctggaaatcatccacttgtcctcgtcctggagaacggcagtcgcttcatctgccatcggcaggaaattgccatcttcatcctgtaaattcataatagtgaatcgggatgcgttccacagcttattggcgaagtttcgggaagattccagacggctggtcaggaatcgagtatcgttacccggagaaattccggtgcacagcatgaatctcagtgcatctgcaccgtactgatcgatgacaaccagcggatcgattccgttgcccagggatttgctcatcttccgtccctgttcatcacgtaccagaccatgcaggaatacgtatttgaacgggatttcatgcatcgtttcgcatgcggagaataccattcggataacccagaagaacaggatatcgtatccggttaccataacggaagtcggatagaagtaatccagttccggtgtcttctccggccagcccagtgtggagaatggccacagagccgaactgaaccaggtatccagtacatcctcgtcctgatggaagtggtgtccgccgcacttcggacaggtctccggcatgtggtctgccaccaccagttcaccgcattcgtcgcagtagtatgccggaatccggtgtccccaccacagctgacgggaaatgcaccagtcgtgaatatcgttcagccaattcagataaatcttctcaaatcttgccggaatgtgctccagctctccggaagttgccgcctcgatggccggttttgccagctcttccatctttacgaaccactgatccgacagcatcggttcaatggcgttatggcagcggtagcacttacccaccggaatgaccatatcttccgtcttaaccaggtaacctgcctcttccagctcctttacccacgccttccggcactcgtaccggtccataccttcgtatttgccggccagctcgttcatggtggcatcgtcattcatgcagctcaggatttcaagatcgtgacgggcacctacctcgaagtcgttcgggtcgtgtgccggcgtaatcttcaccgcaccggttcccttttccggatccggatactcgtctgcgatgaccggaatctcccggttcagaatcggcaggtatacgttcttgcccaccaaatccttatatctctcatcactcggatgaaccgcaatggcaatatcgccgaacatggtctccggacgggatgtcgccactacaattccctctccgccatccactgccggataacggaaataccaatattttccgttttcgtcctcgtgctctacctctgcatccgacagggacgtcttgcagctcgggcaccagttaatcaagcggtttccgcgataaatccaacctttgttgtaaagatcgatgaagaatttcgttacggccttgttgcagccctcatccatggtgaagcgctctctccgccagtcgcaggagtcgcccagcttccgacactgcttcgtaatccggctgccgtactcctctttccacgcccaagcgtgctccagaaactcctctcgagtgaattcactcttgtgcttgccggtatcttcatagagcttgtttgctacttttacctcggtggcaatgctggcgtgatcgctgcccggaagccacagtgcgctgtagccttccatacgcttccaacgagtcagcacgtcctgaagagtctggtccaaagcgtgtcccatgtgcagctgccccgtgatatttggcggcggcattacgatggtaaacggttttttgtccggatccacttcggcgttaaacgcaccggactcctcccaagtctcataaatacgatcctcaaagtcctttggatcgtatgttttcgcaagattctttttcatttagttctcctatcttcaatccggcaaaaataatttccggtatttcgccatttttcgtacagtcatcagaaaacctgatgccgaattcgctccatctgttcatccacatccgacaaggtcttcgcgcactgggtcagctgtttctggatgtcctccgtcagagcacctttattcttatatttcaattcgtgttccaggctggcccaggtatccatggcaatgcttcggaactggatttccacaggtacggtggtcttgctgttcaccaggaacaccgggatcgaaatgaccacgtgaaggcttcgatatccgcttggtttcggattcttgcaataatccttgattttaatcaaatccacatccgattgcttcaggagaagttcggacatggtgtaaatatcttcccggtagttgcacaccactcggattccggcgatgtcgaatacctccgcccgaaccgtatccaggttgtgaatcggatcctcaatgccgtaacgctccgctttatccatcaagctttcaaaggacttcagccgcgactgcatgtggtgaatcggcacgtaggaatgcttcatccggaaatcatcacccagcacatccagcttcgtgcttacctcgcgaatcgccgcactgtacagcaggttgatgtccataatctgctgctgaagatcctcgtccgtctggaggtgttccggcacgctggcggacatatcgtccggtttgtaatattgggtaaaggtcattgtattttacctttccttttctatttggtatttaagtttttgatgttctctttcttataaaaatgctttgcagccttcattacattccgcagcagcagggtggtggtcaccgttcccacgccgcccggtaccggtgtgtatgccacattttccgaccaatcgcaggcagtcagtgccttgacattcagatctccggccatctttccgtccgatccggttcccgcgccggcatccacgataatctgtccttcccggaaaaattccggtccgtaggattctatctgtcccgtcgccagaatcacaatgtccgcctcctcacaggcggtcttcaggtcttccggtttcgtgcgggtatgacacaccgtcactgtcgcgttggcattcagcatcatcagcatcagcggctttccgattcgaacgctccgtcccacaatggtcactttctttccctgcagctccacatcgttcttctgcaggatttccatgcaggcctctgcagtgcaggcacaaaaataatcatccaaaggtttcttcgcatcaaaaagattggcataggatgcgtccgtgatggcatcgatatccttctccggtgccagcaatcgtttcatccgggcttcatccacaaactttgggaaaggcatcagcatgatgattccgtggatggacgggtctccgttcaattccgccagtccctcctccagctcttcctgggatgtttcctctgtgtagactcgactcacgcattcaatgccgtatttatcggagttcttccggatggcattctcgtaatacacatccccggaacgatctcccactcgcagggtcgccacctttggacataccccattttcttttaacttcgtcacatcactttggagctgatccgcgatgaaatctctcaccggcgctccgcgcaataatttggccattcgttctaccctttcagtgattcttcataaaatagacaggacaattatatcacacagactaaaaaagtccaatagcgtcttttgccagacggtccgccatctcgttatattttaccccagtatgggcttccaccttgataaaaacaatcttcatgtttttccgggcgtccgccacgaactgcttgtactttcgggtcagtgggagattcgccttccactcgtcatctccccacttgccgattccgttgtagtcgtgatagatgtacacttcatcaatgtcgtgttcttggcaatagcgaatagcgttcaccgctcccatcacctcgccggcaacgtttctcagctccgccgatgccgggtcgtcgtatccgtgcttcaaggtaattacttctcctttatacagaatcaccacgccgcatccgaactttccggtgcgcacatcgaagcttccgtccacatagatttccgccgctgtttccggaatagcctgcacgtcctgcttctttcccaggtattcctctgccgcttcccaggtggtaaagctcttgtactccgcaccgggatatccggtaaccagccgctgacactccttccaggtctgaaagatgccggtctcccggccggcccgaacggcatagaccttctttccggtcatcttcttggccccggtgctctccaccgccttgccgccatgacggctttccagattcttgagaaagctcttccgatgaatcggcgtaatgccctgcgcccgaattccgtcgtaatgggcagcagtgccataccccttgttgctttcgaacgcatatccgggatatttttctcccatctccaccatgtaggcatctcgcgtgaccttcgccacgatagatgccgccgcaatggatacggaactggcatctccgtgaacgattccttcctgaggaaccgaaatatccggcaattccagggcatcgatcagcaaatgctgaatttctgcccccggaatcttccggcccagcttctcattggcatcgtgaaaagcccgtaccatagcacacttggtggccgccagtatgttcatctcatcgatttcctccggtgatgcgatgccaatgccgatggccagcgcccgattttgaatctcttggttcatggccagccgccgcttctccgtcagtttcttggaatcgtccacccccggcacgtgaaaatcctccggaagcactacgcaagcggtgaccaccgggccggccaacggaccgcggcccacctcgtcaatccccgcaacgtattgaattcccttttcgtgcagcgccttttcctgacggatcatctcctgaaaacgctgctccatcttttccagccgttcctgcttagtcattctccggctctccttccgacggcaccgtctccagcgtaatgcgccccagctttccgctccggaattcgtcgattaccgtccgaccggtgcgctcgtagtcaattctctttcccggcatcagaaatccccgcttaaaggcaatggcttccatgttgtccagtgtctcttcctgtatttcatccagcttatagcgattctgcaatgattccggatatcgcttctccagcaccttaatcagctcgaacgccaaatcctgggtgtccagaatttcgtcccgaatgcttccgcagaaggccagatacagacccacccgctgatcctcgaacttcggccacagaatgcccggtgtatccagcagctgcatcccgtttttcagtgtcacccactgcttgcctcgagtcacgcccgctttatctccggtcttcgcactcttctttccaatcaaccggttgatgagggaggattttccaacgttcggcacgcccaccaccatcatccggatggaacggttcatctgccgctgctgattcttttctcgctgcacgtcatccaagatgctgaacaggcgattgatattctctccggagcgggcatcaatggccagggttttatcccccttccggctaaaataacgttgccacttctcggtctcttccgaatctgccagatcggatttgcccagaagtacgattcttcttttgtcccccaccagttcgtcaataatcgggttccggctggaaatcggaatccggctgtccagcagttcgatgaccaggtccaccgctttgaggttttcctgaatcagttcccgggtcttcttcatatgccccggataccagttaatattctgaatcatccatttgcctccttcttcgtcgtcgcaatggaaaatatcggataaaaaagagcataccttcggcaatgccaaggtatgctctttaattttcagcaaatcgttcttattttgcagacttgattcttgcagccttaccggttctttcacgcatgtagttcagcttcgctcttctaactcttccgcgcttcagcacctcaatctttgctaccttcggcgaatgcattgggaaagtcttctctacaccaataccctgagccagtcttcttactgtgaatgtttcagaaattccgccgctctgcatcttcaggacatatccttcgaatacctgaattctttctctctgaccctcaacgatcttaacgtgaactcttacggtatcaccaacgttgaattccggaatatcgttcttcttgtattcctttgtgatcgaatcaattacgttcattgttattcctccttcctttccaagacgctcgtggtttctctttaaataataaatgtcgttcccggcttctttagccatgctgtcaattaccagaggaccgcccgtaataactatcaaagtttatcacaatgagtgactgatttcaacacttttttcaaaaaaaatattatttctatgccctcggatgggtccgctggtacacgtcccgaatccgcacattcagcaccgccagatacgcaatgcctacggacatatcttcaaagcccatcagttcctgaagggtcttcaaatccccgccgttctgaaggatgtgtaccgcaaagctgttccggagaatctgcggtgtcatccgctcctcgatatccatctctttgccgtattccttcagaatcttccagattccctgacgggtcagcgcctggcctcggaagttgatgaaaatgtagtcgtcctcttctctcggctcgcccttgatttcttcgtaagcttcgtccatatacttcttcatcgcggcgtgagcataagatccaatcggcacgattcggctctctccgtcgttgtccttcagcgtaacgaagttcatccgcagattcatgtccgagaatcgcaggcgcaccagctccgtcacccgagcgcccgttccgtacatgaactccagcagcgccttgtcccggatgcccttggcagaatcatccggaagggacagcatttgattcacctcttccaccgtcagaaactcaatctggcgcttatcgtttttcgccgatttgattttctgaaaaggattggtttctcgttccccttcatcgattttgtaatcgtagaatgcccgcagagaagaaatttttcggttaatcgtcgccttggacttactttcattattcagttccaatatgtaagcggctgcatcactttccttgcagtcgttcaaactctttccgccgcggccctccaggaagacctcgaaggctttcaaatcccggcgataggcaacgagagtgttttccgccttgtttttcgtattctttaaatattcaatgaaggcatccatcttcgtctcctgtgtcttctatatttctcctgcggttcgggcaaaaagaactcccacgatggtctttgcgtcctgaatttcacccttcataatccgatccaccaactcgtccgccgtgtattcataaaggtccaaatcctctgtatcgtcgaaatgggtctctcccggcgtcaaatccttgcagaggtaaatgtacaaaagctccgtggtgtatccgcagctcgggctgatggtggtcagatgccgaatactcccggctcggtagcctgtttcttccttcaattcccgaagtgccgtgtccatgggatcctcatcgccgtcaatctttcccgccggaagttccagcacctcccgctccaacgcctttcggaactgccgcaccatgagaattctgccgtcttcttttaccgccagaatcaccgccccaccgttgtgctccagaatatcccgataggaggtctttccgcccactaccgtcactttatctttgcgaattcgaaaaatcggaccgtcatataccacttccgattgcaatgttttttccggaaaagccataaaacactccctatatatattaatctctttacaaataagttttatcgtttatttaaatattctatcacttttttattccggaataaagcgtaaaacaaaaaagtggcggcattgctgccgccgatacccagatgcactcgcatcttaaaataatagaagtgaaaacaatagagacgttacgtcattcgccagtaatttcgtatcgctctatctgacagccccatcatatcataaaaaaaattccccttcagtacacattttacggaatcaaccgcaggttctccgccagcatatagataaaacgctgcttccatttcttccaggtattttcgtgggcagaacagggatacccggtccttcgggtctgaatattctcgatgattccctccctgtaaatctccggaatctccatcaatgcccggtggatgcagtccagtttaaacatcgcctctgccgccaccggactttcctgcattgccgtatttccgtaggtgagcacatcctccgccagcatctcccgtcggaattccattccggcaacctcttggagccgattcatatcctttaccacccatagacactgataatacacttcgctgggaagaactcgcttccggtccttctgaatctgatattccttcataacaaaacaccatcctttcggctccattgtatcgccaaaggatggtgctgtacattcacttgaaaaagaaaggactgaaaccctcaaaaaaagtactttttcccgggattcttaaacttctcattcagaatctcgcccttcttccgcttcctccaacagcgtcgctttcaggttggcttccgattccgccagttcctgaatgatgttgttgatttcaatcagtcgttccggactgatgttctttccggtttccaccgcagcggtgttcagcaaatctccaatcgaactgctgagtccggagatcttgttccggagggcattgatttcatccgcatccagctggaacgtggataccggttccatatgagttccttccggccggcgtcccggaaccagttcaaactcactgttctgctgtatcacaatcggatggatatccagattctctcccaggtaagcggcaaaatcttccttggattccttctcgccatgcaccaagaataccaccggatgggtaacgaaagagcccacccaatgcgccaatccgtcccgatccgcatgaccggagaagccttccagattcacgatttccgcattgacctgaatctcctcgccaaagaggttcaccgattccgcaccttccaccaatttccggcccagggtgccttccgcctggtatcccacgaacacgatggaacacttcgggttccacaggttgtgcttcaggtgatggcgaattcggccggcttcgcacatgccgctggcagaaatgatgatcttcggtttccgatcgctgttcagcgcctgggattcctccgtagactgggtaaaatgaaggtttttgaattccagcggatgatcgcccttatccataaacgccttgaagtcgtcgtcgaacaccgccgtgttcttcttaaagacctccgtcgccgcattggccatcgggctgtcgatgtataccggaacgttcttcagctttccgtaaatctccggattctcatcgtaaagcatgttcagctggtagatcatctcctgagttcgtcctacggcaaaagacggaattaccaccgttccgccccgctccaccgtgcggagaatcacctttaccaatttctcgatgctcatggcgttctccggatggagacggtttccataggtgctctccatgatgacataatccgcatggcgaatgatggtagggtcccgaagaatcggccggtgattcacccccaggtccccggagaaaacgattttcgtctccgcatcgccctcctgcacccagagctccgtttccgccgatcccagaatgtggcccgcatcgttgaagcagacgtgaatgccttcactcacctcaatgagctgatcgtacagaaccggatgcacatagcgaagggattcctccgcgtccgccaccgtgtacagcggctgaaccagcggctgtccttttcgttccgcctttttgttggcccattccgcttccttctcgtggatatacccgctgtcccggagcatgattggaagaagatccgccgtcgctttggtgcagaagatgtttccgcgaaaacctctttttaccagaagaggaatccgcccgcagtgatcgatgtgtgcgtgactcagcaccagacaatcgatttcggacggttcaaagggaaactcccggtagttcaggcgatcctgggctttcccgccctggaactgcccgcaatccagcagcacgtttgctttgtccgtaatcagaaggtgacaggatcctgtaacgccttcggttgctccgcaaaatctgattttcatttctccgcctccttgcaaggttgtccggaattattgtttattttccttcgttctgaagatagctgatgtacggcaggtttcggtacttctggtcgtaatccaggccgtagccgatgatgaacaggtcctccacctggaagccgatgtaatccgcatggaaatcggcggttctccgggacggcttgtccagcatggtgcacaccttcagggttttcggatggcgctcgttcagcttctccagcaggtatttgagggtggttcccgtatccacgatatcttccaccaccagtacgttcttgttgtacaggttcagttccgtatccatggaaatcttcaccacaccggaggtggtggtgctggaaccgtagctgctggcctttacgaagtcgatgacggtgtccagatccaggcacttcatgaggtcgcacatccacggaatggatcccttcaatgtgccgatgaccaccagctcttcgcccttgaattcattgctgatttcttcacccagctcttccgctctcttccggatttccgcctccgtgaagagaatttttccgattacatgatcatttgtgctcatcttccgatccctccttgtttaaaatcgactcaatgacatccagcagctcctcctgtccggtgcgcttcagcgccgacaccggaattaccgcatcttcttttttcatattcagcttctgccgaatctgccggatggatttctgctgctggttcttggaaatcttatccgccttcgtggccacaaccacgccgtccagaccgtagtaccgaaggtaatcgtacatctgcacatcctgcgccgacggctcgtggcgaatatccaccagctgcaccaccttcagaagacccggtctcttgctgagatacgcctccatcatggcgccccacttctccgtctcggaacgggacagcttggcatacccataccccggcaggtccacaatccggaaatcatcgttcaccaaatagaagttgatggtacgcgtctttcccggacttccgctgaccctggcaagggccttccggccggtgagaagattcagcagggaggatttccccacgttagaccggcccgcaaaggcaatttcatagcggttcgcttccggatactgtgccggttttaccgcaaccgcttccaattctgattttgtgattctcatcctagttctctttctcgctttcctccgaaatcagcacctctcggaacgcctcctctgctttctccagcaagacgaattccaatcggctgcgcacggatttcggaatttcttcgatgtccgccgcgttatcctttggcaggaggattttgcgaatcccctgctggtacgcagccagcaccttctccttgattccgcccaccggaaggatattgccttgcaaggtaatctctcccgtcatggcgatgtcccgccgtgccttctttccggacagcagggagaacagcgccgtgcacatggtcacgccggccgacggaccgtccttcggggtggcaccctccggaatgtgaatctgaatatcgttatccttaaaaacagatgcgtccagaccgtacttttccgacagggacttgatgtatcccatggcggtctgcgcggattccttcatcacatctcccatctgtcccgtgagaatcagatggccgcttcccggcatccgcacgctttcaatctgcagggtcacaccgcccactgccgtccaagccatgccggtggtgacaccgatacccggttccagattcatcaaatcttcccggaaaatcttcgctcccagataattttcgagattcctcttagttacagtatacttgtttttcttttccgttacaattcgctttgcaacttttctgcatacggatgcaatctgccgctccagattccgcacgccggactccctggtgtagtaccggatgatttcccgtattgcggattccgagaaggtgagctggttcttccgaatcgcataggacttcagaacctttgggaccaaataatcctccgcaattcgaaccttctcctcttcaatataactggaaagttcaatcacctccatccggtccagaagcggtctcggaatggtctgagtggtgtttgccgtggtgatgaacatcacattggacagatcgaacgggatttccagatagtgatccgtgaaatccttgttctgttccggatccagcacctccagcagtgcagatgccggatctccccggaaatcatttcccagcttgtccacctcatccagcaagaacagcggattgttggtccccacctcgctgatgctgttgataattcgtccgggaatggcacccacgtaagtgcgacgatgtccccgaatttccgcttcgtcccgaacgccgcccagggacattcgaacgaactcccggttggtcgctctggcgatggaacgggcgatggacgtctttcccacgcccggcggccctaccaggcagagaatcggaccctgaatggatttggtcaggtgcatcaccgccaaatgttccaggattctttccttcaccttctccagtccgtaatgatcctcgttcagaatcttttctgctcgtttgatattgatgttggtcttgctggcctcgtgccacggaagctccagaatcgtttcgatataggttcggctcacgttggcatccggactcatggccggcattttggcaaaacgctggatttcctttcggatcttcgcatccgtcttttcttccaactgcagctcatccagcttcttcagccactgagccgcatcgtcatcctcgccggtctcccgtcccagttcgtcctgcattaccttaatctgttcccgaaggtaatactcctgctggcttcgatccatattcttcatgaccttggtttgaatcttctgagacaacatcgcgatcctcgtctcgccgttcagaagttcaatcagctgttccagccggccgggaatgtaatcgatttccagcagtgcttgtttttcatcaaaggaaacatccagatcctccgcgatgatgttggtgagcaccgccggatcctccacttcctctaccatggcacgggcttccgccgtactgccgggatgaaggactttggcatactgaatgaaggcttcttttaccgcccgtacgtatgcttccaattcctcctcatcatctgccggcaaatcctccgcctgcacataatcgcagaacagcgcaccgttctcctcgtaaatattctccaatcgaatccgttgaccgcattccgccagcacccgaacgtaatccgtgcggcgaacaatctgcttaattcgaatcagcacaccggtaaggtaacaatcctctccggacggatcgtttacttccgggtttcgctgggcggacaccgccaccagacgctcccggttcattgcaatttcaatggatttcagcgacttatcccgacccacatcaaatcctaccaaagtatccggaaaaaaagcctttccccgaagtgcaatgtaaggaatgtgcgttctactttctctctccatctgcgcctccctttatctatacagaacaggcggcaagaaataaccctgccgcctgatgttttcttatttcgcaccgttttcagcgctattttgtctctaataccggttctgcgccgttctccacggtatctttcgtgataatgcacttggtcacatcatcccgagaaggcaattcgaacatgatgtccgtcatcatcttctcgaagattccccgcagacctctggctcccgtatgcagctcaatggccttgttggcaatggcattcaccgcatcgtcctcgatttccagctccacgccgtccatacggaacagctcctgatactggcgaatcaaggaattcttcggctcccgcataattcgtaccaatgcctcttccgtcagttcccgaagggatacgatcatcggaagacgaccgatcagttccggaatcagtccgaaacggagcaagtcttccggttccaccttcagcagaatctcatggtcctccgtcaggtccacccgatcctcatcggaattgaagccgatgaccttgttgcccaaccgacgtttgatgatggtggacaatccggtaaaagcacctccgcagataaacagcacatccttcgtatcgaaatggatgaactcctgcagcggatgcttccggccgccttgcggcggaacgttggcaacggttccttcgatgattttcagcaatgcctgctgaacgccttctccgctaacgtcacgggtgatggacatgttctcggatttccgggcaatcttgtcgatttcatccacgtagatgatgcccttctgtgccctttccaggtcgccgtctgccgcctggtacagtctcagcagaatgttctctacgtcttcgcccacatatccggcttccgtcaatgcagtggcatccacaatggcaaacggaacatccagaatttttgccagggtctgtgccagaagcgttttaccgcttcccgtcggtcccagcatcaaaatgttgctcttctggatttccacgttgttcttctcatcgccggcattctcctccaaatggcggattcttttgtagtgattgtacaccgcaacggccagatttttcttcgcctcatcctgttcgatgacgtagtcgctcaggaaatccgcaatatcctttggcttcggaagttcctccatgtgcttcggttccacgaactctttctcatccagaagggattcgcacagctcgatgcactcgttgcagattgctacatccggtcccacgataattttcttgacttgcgagctggtcttcccgcaaaaagagcagaccagctcatggttttcgttctttttactcacagattctcctctattacttcttcaatacccgatcgatcagtccgtattccaccgcttcatctgcgtacatgaaattatctctgtcggtatcctgctcgataatggaaagatcttttcccgtattttcagcaagaatgtggttcagacgttccttggttttcatcatccaatcggcctgaatcttaatatcggaagcttggccctgtgcgccccccagcggctgatgaatcataatctccgcgttgggcagagcatatcgtttccctttggttcccgccgaaagcagaacggcccccatgctggcagccaggcccacacagatggtggaaatatccggttttacgtaattcatggtatccagaatcgccaagccggccgtcaccattccgcccggagagttgatgtagatattaatatccttttccgggtcttccgcttccaggaacaagagctgcgccaccacaatgctggccaggtgctcgtccacctgctggtcgatgaaaatgattcgatccttcagcagtctggaataaatatcgtaactgcgctcgccgtttccggtctgttcaacaactactggaattgtattcatagattattcttcttcctttgccttagcagcaacaaaatttgccttctcgaacatcatgtcgatggccttcttcatcttaacatcctcttcgaagtagtgcaggtcgtttccgatcatcttcttcacatcttctacggactgtccgtactgagcagcgaaatctgccatttccttatcgatgtcctcttcggttgcttcgatgttctcctgacggattacggccttcagcaggattctggatgcaactctcttctctgcgtccatacgagcctggtctctcattgcagccatatccattccggtgaacttctgatactgctccagagacagaccctggtatgccagctgctgcttcattccctgaatcatggtgtcgatttcggattctaccatggatgccggagtgtctacgctgttcacgtcgatcagcttctgaaccatgctgtccttcatgatgctgtctgctctctcgtcatcctctttctgcattctctcacggatggagttcttgtactcttccagagtctcgaactcgctgacatcgcttgccaactcatcgttgattgccggcagaacctctctcttaatctcgttaatcttgcattcaaagagcgcttccttgcctgccagatcttctgtctgataaccttccgggaaagtaacgtgaacgtctacttcctcaccggcttcttttccaaccagctgatcctcaaaacccgggatgaactgtccggaacccagcttcaggtcgaagttctctgccttgccgccgtcgaagtgaacgccgtctacggaaccgtcaaagtccagaacaacggtatctccctcttccgtcttgcggtcggttacggtttccatgctggaatgagccttctgaactctctccagttctttctggatatcctcatcggttacatcgtgctcgatcttctctacttccagaccgaagtaatcctttgcttcaacttccgggaagcaagcaacggttgcggtgatttcaacatcttcgcccttcttcagctcgcccaggttcagtctcggctgatcgataacttccagttccaactcgttcagagctgccggataaccgctctgcagcaggtcgttcagcgcttcatcgtagaagatatcttcgccataggtgttctcgatcatctttctcggagcctttcccttacggaagcccttgatttcgaagcgatccttgttgttcttataagcattcactacagcattttcgaactcttcaccggtaaaaaccatagtaaactttgcatcattgccttcttttgcgataaaagtagttttcattaatattcctcctgaaaaacgaacttaatttgttttatttttccggctcgtcgtccggtaaaaatcctctttgcagcttcgagatgtcttccggctccagagaatatttctctgccagagattctgcaatgtcccggaaatcttccgaatttccgtagtaccattccagctccatctccaatacgtccttgtctccgttcaatccatgaatcacgccctcgtcgaaggaaagcgcactgatggaattgccggtgtccaccttaatcagcttccgggtgaaatccatttccaccttcttgtgaagctccttatgaccggctgccttcagcagcacatcatacgcatcactggactcaaatgcttcaatgttcggatgctctgcgaaacgctcatccgttatgactagattaaattcttctctggaatgacgtccattctccacgtgattatcccacttaatcgttgctgtaatccgatcgttctcatatcgaattcgatacgcaattccggattgtctcaaatccatgtcgtccgtatcaaaatacacggcatgcatccgaatcttctccaaggaatcccggtctacatattcatccagcatgggatcgtcgataatctcctgaatcaaagatacatcatccagacgatacttgtattctgtttccatattatctcccactggccgcattgcggcaaaatatcaacaatatcaagtaattttacataaaaaagccattattgtcaatggatagggctcaatcttgcacatatccattccataaaatgacttttttggggataatcccccttattcttccatttttttcagttttatcctggaattttttccctctgtcagccgatccgtcatccggataaagttatccgataagtcactggcatagaaccggtcctcctcggtccgttgctcggcaaactgatcccgagccgccagcacctcctccacctcatcgatgaccgcttcggaagaactgatcagattcatgttggggtagattcgcttcagattatccgcaatcatcggataatgggtgcatcccagaatcagatgattaaatccgttttcccgaacgaaatcgtccatgtagtagcggatggtcaaatccataatttcgttgtcgatgatgccttcttcaatcagcggaacgaacgccgggcaagccaggctgctggtccgaatggacggatctaggttgtgcagcagccgcgcatagacatcactctgaatggtcgctttggtagcgatgattcccacattcggacagcggctctgcaccaccttccgaaccgtcggttcgatgacgccgataatcggcagttccgggtgctgctgccgcaaatcgtccaacgccagagacgtcacggtgttgcaggcaatcaccaccattttcacatccttgctcaccagatagtccacaatctgggaagcgaactttcgaattgtctccggggacttggatccgtaaggggttctcgccgtgtccccatagtatatcacccgttctttcggcagccggctctgcagtgcagatacgctggtaaggccgcccagtccggagtcaaaaaaaccaatcggtctgttatccatttatttcttattttcctccgataaaagtaaaaagcgatattccgcagaatatcgcttttcttggtgcggatggtgggactcgaacccacatgatttgtggtcacacggacctgaaccgtgcgcgtctgccaattccgccacatccgcagatttatttttctgagttgtttctttcgcaactcacaatagttattatacacactttggggtagctt

SEQ ID NO: 4373 - DNA, 2192 bp, Unknown
  16S sequences of unknown bacteria
cctacggcggctacgcctgccacggcggcggcgccttctccgggaaggacccgaccaaggtcgaccgcagcgctgcctatatggcccgctacgtcgccaagaatatcgtcgcggccggtcttgccaagcgctgccagatccagctggcttacgccatcggcgtggcccaccccgtctccgtcctggtcgagacgaacggcaccggcaagctgccggatgcgaagctcgccgctctggtgcgggagtgctttgatctgcgccccgccgcgatcatccaggcgctggacctgcgccgcccgatctatcagcaggtggcggcctacggccacttcggccggtccgaccttcagcttccctgggaagagacgaacgccgtatcccggcttctggccaaagcgtaacgcagccgcttgaccagtttgtagagttatcgctgcacggaaaaaaggagcacatatgaattacgacgtcattatcatcggcgctggccccggcggcatttactccgcctacgagctgacccacgcccgcaaagacctgcgcgtggccgttttcgagacgggcaatccgctgcataagcggaaatgtcccatcgacggcaagaagatcaagtcctgcatccactgcaagacctgcgccatcatgaacggcttcggcggcgctggcgcgttttccgatggaaaatataatatcacgaatcaattcggcggcaccctgcacgagcatattggaaaaaatgaagccatcgagctgatgcagtatgtggaccagattaacctggagcacggcgcggcgggtacgaagctctactccgccgccaatacccagatcaaaaagctgtgcctggaacacaacctgcatctgctggaggcgtcggtccgccatttgggcacggatatcaactatgtcgtgctggaaaagctctatgaggagctctccggcgtcgtcgatttcttcttcaacaccccggtggagaaggtctctaagatcgaaggcggcttttccatctgcgccggcggcaaggagacgacctgcagccgctgcatcatctccgccggccgcagcggcagcaagtggatggagacagtctgcgaggatctccagatcccaacgaaatccaaccgggtggacatcggcgtccgcgtcgagctgccgtatgagacgttttctcacctgaccgatgagctctacgagagtaagatcgtctaccgcacggagaaattccaggacctggtccggaccttctgcatgaaccccaagggcgccgtcgtcaatgaaaacacgaacggcatcgtgacggtcaacggccacagctatgaggacccgctcatgcacaccggcaacacgaacttcgccctgctggtggcaaagcatttctcctatccgtttaaggacagcaacggctacggcgagagcatcgcccgcctgtccaatatgctgggcggcggcgtgattgtccagcgcttcggcgacctggttcggggccgccgaagcacggaatcccgcatcgaagagagcttcacaacgcctaccctggcggcgacgcccggcgacctgagcctcgtgatgcctaagcgcatcctggacggcatcattgagatgatttacgccctggataagatcgcccccggcaccgccaacgatgacactctgctctacggcgtcgaagtcaaattctataatatggaagtcgccatcgattccaacctggagacctgccacaagggcctgtatgtcattggtgactgcagcggcgtgacacactctctttcccacgcctccgccagcggcgtctatgtcgcccggaagatcctggagagcttgaacgcctgagtgggccccagacagaccaaacagagcaaacaataaacgcggaagcagccgcaccgctgcttccgcgtttgtctattcttattgtgcccccaaatgatgcaagtttgagggggcgtttcgaaagacacaggtactctgagcggtgcagtccctcaaaaggatcccctgaaaggggaactgtcagcgtagctgactgagggattgctgcactgcaaaaacaagtttgtgtagcagtactcgactactccaggcttaaaagccaaactagaaaattttagcaagccaatgtctgccagacaaatctgttagcgccctccgggggcccgattctttcttctccagcgaagaaagaatcgggg

SEQ ID NO: 4374 - DNA, 5980 bp, Unknown
  16S sequences of unknown bacteria
ccccgcacatgaaaagcacctcgtcaagattgccgagctgatttatttttcccatggtttcggggcaaatgtgaacattcgaaagaccgttttcgtcgagagccgcctgagcctttttgagagtttcacaggcaagagccgttgcgccttctctcgaaaggccgccgagcccgccgggatgaaccacgattcggtcgccgcccatggcgtttaccgcctcggcgctccttaaaatataattcaccgaattgtcccgtttgacctcctccttggaggagagggagatatagtagggagcgtgaagagacacgcccttgtttgcggctttcatgacctcgccgaattttctgcaggtctcggcgccgatattgacgcctcggccgcattgatattcaaaccagtcaagtcccattttttcaaggtatttcggggtgtcaagactgtttctgtatcccatttcggcaaagcttatggaatttccggcagggccgaaaagcgctctgtcaaagctcataaaatatcatctcccttgtgtttttcatatcgcgccaaaaaaggcttttcaaaaaacctttttattttaaatccgagcttatcctcggcatgagccggcgtgacaagcagggtctttattccccaaagatttccgcacagcatatcggtgaaaagctgatcgccgcaaagcatgacctgatttttccgaagtcccatacgggcggccgcacgctttgccccgccgcacagcggctttttcgcgtcgcattcgaaatcgagagaaagcttttttgcaaagggctccacccggcttttaggcgaatttgaaagaacaatcagctttatgcccttttggcgcatttcttttacaaactcggtcacaccgtcaaaggggaccttatcaaaatggcgggacagcgtgttgtccacatcaagaagcagacctttgacccccgctttttcaagcatttcgggggtcagatcggtcagcctattaagcatcatatagggcttaaaaagtgccattattttttgtttatcttgcgggtttttatttcttcgtcggccttggcgataaaggcgtcaagctccatggagccgagatcgccctcgtcgcgggagcgaaccgaaacggtgccgctttcgacctctttttcgccgactatgagcatatagttaaccttttcaagctgggccgagcgaatcttataaccgattttctcgcttctcgcgtcgcaggtcgtgcgaacgccggcagccttaagagcggcggtgatttcatcggcacgatcaaggaatttttcgctgatgggcagcactctgacctgctcgggagagagccacatgggcagcgcgcccgcatatttttcaaggataagggcaagagtgcgctcgtagcagcctatggaggttctgtggattatatagggatttttcttggttccgtcacggtcgacatattccattccgaatttttccgaaagcatctggtcgatctgaatggtgatgagggtgtcctccttaccgtagacattctttatctgaatgtcgagcttgggaccgtagaacgcagcctcgcctataccgattttataaggaatttcaaggtggttgaggattttctccatggtaccctgagcctcatcccattgttcgggggttccgatatatttttctctgtccttcgggtcccactgagagaagcggtaggaaacgtcctcataaaggccgacgctcttcagcatataaatggcaagctcgaggcagctcttgaactcttgttcaagctgttcgggggtgcacatgaggtggccttcgcttatggtgaactgacgcacgcggataagtccgtgcatttcgccgctgtcctcgttgcggaaaagggtcgaagtctcgtcataacgcagcggcaggtcgcgataggaacgggcgcggttgagataggcctgatactggaaggggcaggtcatgggacggagggcaaaaacctcgtcgtccttttcctcgtcgccgagcacgaacattccttctttataatggtcccaatggcccgaaagcttatagaggtcgctttttgccatatagggggtcttggtcagcagccagccccttctttcctcttcgtcctccacaaagcgctgaagagtttgaataaccttggcgccctttgggaggagaatgggaagtccctgtccgataatgtcgacggtggtgaaatattcaagctgacggccgatgagattgtggtcgcgctttttggcctcctcaagcatttcaagacgagctgtcagcagcgacgccttggggaatgcggtgccgtatacgcggcaaagcaccttgtttttggaatctccgcgccaataagcaccggtgcactgagtcagcttaaaggccttgaccgtaccggtagacataaggtgagggccggcgcaaaggtcggtgaaatctccctgcttatagaaggaaattttctcgcccttgccgctgtgctcttttatgagctccaccttatatggctcgttttccataagcttttcggcgtccgccgggtcaagctcaaaacgctcgagagcaatgtcttccttgacgatttttttcatctcggcctcgattttttcgagaatttcgggggtaaaatgctcgtcgacgtcaaaatcataataaaatccgtcctcaatggcgggtccgatgcaaagcttgacatcggggaaaaggcgcttcacggcctgagccatgatgtgggaagcggtgtgattaaaggcacgcttaccctcctcgtcgtcaaaggttaaaaactcgagaacgcagtcgttttccacgggggtgcgaagatcgcacacctttccgtcgattttgcatacgcaggcggccttgtaaaggcccataccgatcgactttgcgatttcgaaggcgggggttcccttttcaaaggaacgctcctcaccgcgcaaattacatttgatttccgacatatctatcactccaaaaataattttaaaaaaacaaaacactccacccaaaaacagggtgaagtgttactccacggttccacctgaattacggcaaaagccgtcactcgcgcgttttataacggaaacgacccgtccgccttgaatacggcggctctgataagggcggtcttcacgcaatttctcggtttgccgctttcagccggtgacggcaattctctttaccgaggggaaaagcgctactcttcctcgtcgtagatttgtttttctttatattaacacccgaaaaagtcaatgtcaagtgtcatatccgttttttttaggcaaaaatcagccgtttttgagaaacctcttccatggctttattgccgcaagcgaaaatattgccccgagagccgcaacggccgcccatattttaaccgtcgttccccaaccggaattttccgttataacggcgactccgtatatcgaaagagcgctccccacatatgtgcaggcgttaagcactcccgaaacaagggacacatggccggttttgagaaaatacggagggagcatacaaatcagcataacgtttgcgccgtgcatacagccggtggcaacggtcaggcagacaagggaaaccaaaagacccgccgaacccgcaaggcacattatgccgagaaagcaaaggcaaagcaggaaaaacaccgcggcgcaaagcacctcgttcgggaaaaatcgtcgattgaaaacctcggcaagcttgcagaaaattatgctgaaaatcggcattcccacccctgtgagaatggacgcggcgttttcaagagaaaaattgtcagaaatgtatgtgggaagccaggtggtgaccccgtcgcggagaatgccctggcatattatggccagcattattatgccgagcattacaagagtggctctgccgagcgttcttttttgccgaaggaaagccgtgtttttttcgaaattttccggcacaacgggttcaagctccttttcaagagccgtcatccttctgttccaaaagaaggccgtcaaagcggcgacggcggccacaaaataaaaaagcgaacgccaaccccaaagggtcacgcaaacgggtgcgcaaagataaatcgctatggtgccgagagaactgccccaggaaacctttaccgtggcgtttttataccttgacggcgtaaggtattccgagaaaattcggactatgggcggccacataagagcctgtgcgaaaccgtttacacaccacacggcggtgatgcccgcgggagatttgcaaagaggaacggcaaaattcataagcgccgaggcggcaaggccccatgtaatcagctttttggggttgattttatcccccaaaaggccgcttattatctgacccgctccgtaggttataaaaagaccggtaaccgccgctccggcagcggccttggtgaacccctcgctgtctattatttccaccataacggcgctgtaattcagccttgtcagatagctgacaaaataaaccgccgagcacagaaagacgaggaccgaaagatttttgcttttagctgtattttccaaaccctattttaacctctgtccaccgttatcttatgctttttataaagctcgaaaatatcatcgtcaagctccgggtcggtaacaaaggtcatacccgtctcgatgtcgcttattttcagcatagcgtttttttcgaatttattgctgtcggcgaggacaaaaatcctgtcggccgacctgaaaatggccttttgcacaagagcaaggtcataattgtaatcggtaattccgttttcgatggaaactgccgagggaaaaataaatccctttcccgcatggagcctttcaagggcgcttaaagtcaaatcaccgtagaatgtattttcgtccctgttgaacactccgccgagcattatcatatttattccggcgattcccgaaaggttcacaaaaacgtcgttgcttgccgtgatgacggtgagattgtcgaaacggcctgcgattattttggaaaattcatatgccgtgcttcccgagtcgagcattataatgtcgccctcgtttatgtaattgcaggcaattctcgacagcgcctgcttttggcttctgctgtcgtccattctcgattcaagctttttcatgggaacggatttttttatggaaatggcgcctccgtgtgttctgcggagaagcccgtcgctttcaagcttcataagatcctttcgcagggtctcgccggttactccgaaaagtcttataagctcggaggattcgaccgagccgtccttttccaccatctgatgtatctttgttcttctttcgaccgccaacatatgcatttctccttgtcgaaatttaggttatcttttgtttattctaacccaacttttcgcaaatgtcaacaaccttaagaacacttttttccaccttaaagaatatttcccattttccgtaggacataccgtataccctctccggatctgactgataggacggtcgcgggtcctcggaaagaatttttttgataatttcaaggctgtcaaaaggcaaccttttttcaattttttcgggcacctccaccgaaagccgataatccgccgcctcctttgcaaagccgccccttgccgacggcttgctttcgatgtgcggaagatatggctttatgtcgaaaatcggagttccgtcacagagatcggctcccgaaatttcaagcacggtgccgtattttttgtcttgaataatatgttcaagctttacaagcgaaagccctatgggattgggcctaaagggcgaacgagtggcaaaaacgcccattcgcttatttcccccgagcctcggcggacggacggtcagcgaaggctcttttcttgtttctgccctgtcaaactcccacaaaagccagatatgagaatacccctcaagccctctgaaagcgtcgggagagcggaacttcggctcgaaaattatccgagccgaagtttccacaagcccgctttggcggggaattc

SEQ ID NO: 4375 - DNA, 26273 bp, Unknown
  16S sequences of unknown bacteria
cgactttgaaagcaggcgcagcagaatatatgatcactgcgactgcaggcgcgaacggcagcatttctcccagcggtgcggttactgtgacggagggcggaaaccagacctttataatcatcccggacagcggctgccacgttgaggatgttctggtagacggtaagagtataggcgtggtcacgagctatacgtttgaaaaggttactgccagccatacgatttccgcggtttttgaccgtaacagctccggcggcggaaccgcctattacaccctgcactacgagtccaacggcggcacgaattacaaggatgagcggtataagagaaatactaccgtggaactggaaaaagcgcccgcacgtgagggttatacctttaccggttggtatgacgatagagatctgacccggcgcgttaccgagatcaagatgaccggcaataagacggtttacgcgggctgggaacccaccggcgttccggactggctgaatggaaaagatcattttgcttatgttgtcggttatgctgatgacacagtgagaccgctggcggatatcagccgcgccgaggtcgctgcaattttcttccggttactgaatgaagatattcgagaggaaaacctgatcgccgtcaataccttttccgatgtgaacgaagggatgtggtataacactgctatttctaccatggcaaaactgggcattgtcaagggccgctccccagcgtcttttgatccggacgcttctattacccgcgccgagtttgcggctatctgcgcgcggttcgatacctccacgcgcaacggcggcagtaacttcacggatatttccggtcactgggccgaatcagagatcgaacgcgcggctgcattgggttggattgagggttatacagacagcacgttccgcccggaaaacaacatcacccgcgctgaggctatggcggtgatcaatcgtgtgctgaaccggctgccggaggatgaggaggatctgcttgacggtatggatatctggacggacaaccaaccggagacatggtactatttggtggttcaggaagcgactaatagccataattttgaacggaaagatgatggcgttcatgagtgctggacggtgctgaaagaagatccggactgggcgcagtatgagaactgacaaatgacagagtagggcgataaattgtttcataattttaatttcttgagaagccggggattctttcccggctttattttatagttttacgaacctggacattttacagagggacttttttgggcgggaggatattcaatttacactaaatatagttaaattgcaataaacaatataaagagaagtctcccggtttcctctgaaatatcgttgattaagttactgttggatagcaggctgaacaggatatagatgaatgaatatcgaagctaaaatcattcagttaaaagaggaacttcatctttcaactacaacagtcagtaaaatcaaattgtcgtctcctgtattaatgatactgtgctctgatcctttcttacagatgtggcagtagcctgctgataatggttcttcttttccgtcacagatcgcttttcctgtgccggacagaacaaagttgatgtcatcgcttgtttcatgtttatgcatgccgatcgaactgccgacatgtattttacacggaataacctttccttcgtcgtctgcgtacatttttgcggtcatgattcctgtaccgttattcatcccgggaagtctcgcttcttttatttcgttaaaatttataatcataataatatctccttaaattccgttttgttagattgcttttatattagcggatacgtcaaccacgcggaatatttacagttacgctctgaaaaagagagaggaagaggctgcgctgactttaggcgaaatgctcggaagaaataaaataaggacccaaaatacaatattgagaaattgtatataatgttagataaaaaaagaaaaacgccgaaaccattgatattattgtttccagcgtttttcttttggcgcgccatgtaggattcgaacctacgaccttcacattcgtagtgtgctactctatccagctgagctaatggcgcatggataaattatcccatctgatgaagacaatcggtctccaacggacaaagaatattataactcttctgtcctcttttgtaaagactaaaaattccatttatcgcgcataacgcacaattttatatcattatctgaatgatctgatccatcgtcgctttggcagggatatcataagttccgtatttcagctgtgtggcggcgccggcggcctccaccgcgtcgatgaacagctgcgggtcagagatgacgcctgcgctgacgagggattgtgcgatatcagagacggtgtcattctgcattacattgatcgtaaccggcgcggaatttttgccggccgatgcagtctccgtatctgctcctccggaaatctgtgcatcgtctttcgtctgttcttccgccgggctggtttccgatgcggaaccggtgtctgtctgctttggcgcattatcctctttggtctctgtctgaaccgctgcaattttatcgggatagtccataatcgtgtttacacgccatccgatgatgagtaccgctgcggcgataatcaggagagcgacgaggatatcgctgatattgtaaatgaagttcttaaatgtattcatatgaaatctcctttaatctgaagtaattttatcataaaaagaaaaaacggacaatgaagatgaggtgaattcgcattcggattatttaaaatgccttggatgaattgcggcgcgcatgatataatgatttccgcgattggctttgcggaagcggagcagagagaaaacagccgcggtgtatcgtgaggcaggccggagacggcgggatctgaaacgagagtgttatggcagcgtcggccggattgtattttttatgagagaatgctgcggatgcgaagaatccgcagcggggatttccggatgatgcgaaagcggacagagggcagtgagatggttgagattgaaataggaagaaatgaagcggagcagcgtctcgacagatttttgcggaaatacctgaaaggcgcttccctgagttatatttacagaatcatcagaaaagatgtcaaagtaaacggtaaaagagcagctaaagacacgatgcttttttgcggagaccggatcttcctgtatctttctgaagaggaactgaaaaggttccggccgaagcagacagtacgaaagagagtaaaacgccaattcggtatcgcctacgaggacgagaatatcctggcggcggagaaacctcctggacttttgactcacggcgatcagcacgaaaaaaagaatacgctggtcaatcaagtgacggattatcttatcgaaaagggcgattatgttccgcgcgcggaaaagagcttttctcctgcagcggcaaatcgtctggaccgtaataccacaggactggttctgttcgggaaaaacagcgccgctttgcgggcgctgaacgggatgatcggcgacaaggatgcggtgggaaagtattatctcaccattgtctgcggagaattagaggaggagatgcagctcacgggaagtctgtcaaaagatcacgcgagaaatatggtgtcggttgtcgaagatcctcatgtttctgacaatgcagtatttagagagccaaagtccgcggataccagagtgaagcccatttcttctgcaggcggctttactctcgcggaagttcgtctgatgaccgggcggactcaccagattcgggcgcatctggcggctgcgggttatcctattatcggtgatgctaaatacggaaattttgcggaaaatagaaaaatcgcattaaaatacgatcttacgacacagtttcttcacgcatacatgttaaaattctatgaagcagaaagtgtgctgtcttatataaaaggcagagaaatccgcgcggcgctgccgcagaattataagcgcatcgtcatagatctgtttggaaaagcggaacctgttcggaaatatgcggagatctgaagtgcatcagcgaacgccgtgcggaggcgcaccgggtgttttcgcctgcgcatgagtgtatgaaaaaaaggcaggagggtattataaattatgaatattcagagcaattcgaaaaacgtcgatacggacggaacgaatgcggcggaaccagaaagaaaggaaccggcggaaaaagaagagacggcagatgaagcggattttgtttccggagtcggtgaagtcagcgaagaagagccgcggcaggaaggcaaaatcaaaaagaaaaagaaacggggttccgaagctatggcatggatcagagatattgtcgcagcagttctcatcgcggttatcatcgcacagtttattcagccgacgatcgtaagagaacattccatgcaaaatacgcttcagcccaacgactatctgattctttccaagatggcgtacaaattcggcggtgacgtggaatacggagatatcgtcgtatttaaaagcgatgtggagcaggagaacggaaagaaaaagctgctgatcaagcgtgtcatcgcgaaaggcggagataccatcgcgatcgctgacggtcaggtataccgaaacggtgaaattctcaacgaaccgtatatcaaagacggctacaccaacggcgggatcgacgagactaccgtaccggaaggagaactgttcctgatgggggacaatcgcgtcgtcagtatcgacagccgttcccctgaagtaggatttgtggatgaagatctcgtcatcggaaaagccgttgtaaggctgtatccgtttgatcagttcggttccgtctacaagaatcttccggaaagtcagtaaaaatataaaacagaaaatccggtacgcggttctttttattacagatcggttctcttcaggtttttatccgccgcaggcgttcttctctcgggagggaagaaaatgaaacagagcaagacggcggtacagtcggggctcagaggcgcgaaagcggcgctaaaatatatcatcgtcagtctgtcggctgttctgactgcggttattctgtctgtgctgttttcggtaacggctgtttccgacggcgaagcaggtctgaccgggggagggtttgtcgtggcgctgaagcccgcttatctgttttccgtacctgtggagggagatctcgttatctacgaaggagaatccagcgtttcaggcggaagaagtctgaagacaggtgtttatgacggagaagagattccgatggaacaggttcggggaaaggttctcgccgcagtgccgtggccctttgaataaaacgaaagcttcagatgttttattttaccggcggcgcaaagtcggccttaccggtagcagtccgctttctctgcagtcggcaagcgagaaacaggagcgccgtttcctgcggcagggtgaagagaagaaagcgctttcgcgcgcaggagcggactgctttcgcaaatggagccggcccgcttcgggaggacgacggagaggtagatgaaaatctgacataaattatagaaaggggtgtttctgtgggaagaaaactcatcgcttccaataagaaggcgaaacacgattactttatcgaaaatacatatgaagcgggtctcgtcctcaccggcacggagatcaaatccgtacgtcagggcaaagtaaacctgaaagaaagttacgcccgggtggaacggggcgaagtgtttgtatacagtatgaatatcagtccgtacgatcagggaaatatctacaatgtcgatcccatgcggccgaggaaactgcttctgaacagagcggaaatccgcaaaatcgacgggattctgcagcagcagggactgactctcattcctctgggtctttatctcaatgaaaagggcattgccaagctggatatcggcatcgcgcggggcaagaagctgtacgataaacgagacgatatcgcaaaacgcgacgccaagcgaaatatcgaccggattatcaagagccagaatcgccgataggcggaggtttcaagatccggttctgtcgaaaaagttgtaaaatgacttctaattgtaatgttaaatcccgtgaggatagggtatacttttaatagcttcccgggctgccggtttctgcagaagataaaacggcgccggccaagatacgggggtgtacaggtttcgacgggggtgttgaagccggagaagcgagccgcagtctcccagtctgcgttaaaaagggaaacttaaaaataaacgcaaaaaacaatagaagtttagcggtagcagcttaattcagctgcgcttgtcggcctcggctcacctgtaggcggagatcagcggcataatatatacaggaaaacttcgtgtgaatgcccggcagcacgggggaacgacgggatagctgacgatatagcctgcctgtaggcgatgtctgaagcgaaacttaaaatacaggctgcgctcggagacgcttctgtggatatgctttcggacatgggttcgattcccatcaccttcaccagcaaaacattgaaaaaccgacggtttcagccgtcggttttttcgttcgcagcattttagaaatatcttggcagattcagctctgtcagaatgttttctaccgattttctcacgatacttttttggcttctccgttggtttgacttggcctgggtttgcctgatacgagaaaaggggcgggccttttggaggcctgccccttttctcgtattgtgaagatttcgcttactgcagatcatttcattttctgtggtctggcggagcatccctattcgtttccgctggaagtgtcgccgggctgattggcatccgcctgttcttctgccgcagaagcggtctttctggcttcccgcgcggcggtattggtacggacgtcgccgtcggtaacttttttgagtgtggtctgttcgttggtaaaatcttcatcagcgctgaactgcagcatatatttgcagatctttgtgacgtcgtcaaaatttctgctgttgtatgcctgtgcgatatcgtagaatgcctgcgccttgaaattataatagtcatcgaggatcgctcctgagatttcgtcggaataatcgagactgtactgcccggaggattccgtgatttccatcgccagtgtgaaggcgtcgccgaaactcttctcgctgcattttgtcttaaaggtttcgtattttgtctttatggcctctacagcggtgatattatccgatagagcggagatttcatcggagaactcttcacaggaagcatcattgtagtttttgaggagcgtcgccgcatccgtactgctgagttcgcctttggtatagcggtcgtatgccgcggtggcggaggaagtgacggaatctttgacttcactgacgaaaccatcgtcataagcgtttgcggcgaagatctctctgcatatatcgaagtcgctgttgtcgaaagctcgtgtgaatttatccgccgggctgaagaacgtcttataaactgtaaatgcagcagcagcgataattaaaatcgcgatgaccagaatcagagcggcgcgccgctgttttttctttctgttctgtctgtgctgaaagtcgtttccaaatcctgaattgtactcgggaaggaagcggactgtgttatagtcgttctttttgatctcgtacattgctctatatcctccgtcggtttttgctctgacgtattgtgtgaaaactttcctatatgataaaatataccgtatttgaacagaataataaagaacaaaatttttttacgctttctaatgatcgccgggaaacgggacgacagaaggttgtccggcatctatgacgccgggagatttacagaatatgcgggctggctcagagacaaaaggggcggcgccgtggatacggagagggatttatgattgaaatgaaagatattctcgtcatcgttgacgttcaaaaaggctttacgaaggattatacggtagaaaaaattccggtaatcgaagatcttctcagcagacgtgtttttgatactgtaatagcgactaaatactggaatacgccggacagcaatatcagccggctgatggggtggaaggatctctgtacagaggaagaacaggatctggtgccggagatcgagccgtatgtggaccacatcactgcaaaaaatatttattcgggtgtgactccggaactggtggagctgctgaaggaactcggcgggggccggctgccggagtacgtatttctgctgggatttgatacagaatgctgtcttctgtccaccgctgcggatctcttcgagatgggcgtgcgtccgctggtcctgacggagtattccggttctcatgacggtccgaagtaccatgatgcggggatcgtcgcaatggaacatctcatcggtccgaattttctcatagagaaaaatgatataaaatgtaaggaagatatcaggactatcgtacttgatgttatgagcaaatccgtataacatagtgacgacggcttcctcatccgcgggaggagagagctgctttcggaattcggtggggggatgggatgcttcactgaaattccacgatgaaaatccggagaagcaggggcttttccggtactgtgctgaatcgtctgcagagttcggatccggctgattcgtcggagttttgctgcgatttgaagatcacatgatcgaaagacttcgaaatttccggtgtgcggcggagagtctcttttcaccggcgggacacaccggatttttccagtcgggggtaaaggaggtaaatcgatgagatggatgaaaaagctaacttcgatatcactatgcgcggcgctgatcacagggagcgcggttttcgcatctgcggatgccagggatacttatgtgtctatgggcgcggatctgacagtagaacagcgggcgaaagtgctggagctcatggatctgacagaagacgatctggcggatatggatgtggttcagatcaccaatgaaaaagaacacgagatgctgggaggttatcttccgaacagtgtcatcggttcccgcgctctttcctgcgtacgggtagataaaaagaagtcggacggaatacaggttaccacgaaaaatatcacttactgtacggaggggatgtatcagaacgcgctgattacagcgggcatcgaaaacgccgacgtcatcgtcgcggggccgacgaatatttccggaaccgcgggactggtaggagcgatggaagcttatcaggaattgaccggcaaagcgatttctgaagaaaataaagacgcggcggtcaatgaaatcgtcgcgaccggaaatctggcggatgatctgggaagtgctgaagatgcggaaaatctcatggctctcgtcaagcagaaggttatttcggcagatctgaacagcgaagcggatatcctgcaggcgatcgaggacgccgcatctcagatcggcgtttcccttaccgatgcggaaaaggaacagatcctgtctctgatgaagaagatcggcgatctggatatcgacatggatgcgctgaagcagcaggcttccgatatttatgaccgtctcaaggatctgggcgtagatatgagcgatttggataaagacacgatcgtcagcgctatctctaaattttttgcaggtattatagagttttttaaaaacctgttcagttaagccatttctcagggtggaagatacgcggcttcagagatggtaagaagaatccggagactatcttttcggtcctgtttcagaaaatgagagcgccggctgtaagcttacagccggcgctgttgttttttgaagatgcgagcgctatattaccgtcggattcggatctttgtccagcaggcgtgtggtattcgtaacggcggtagccataagccagccgtattcgctgtccggttcaaaagggttgtcctctccgtagatctccggcggacagtagacatctgccgaggcgaccaccacccggcgtccgacgctgagaatcttggattttaccaggatatattccgcttctttcggtacgccgcggataaatgttacattgatatccaccgtacccaccggttcgcagtccacggaaatccaggaaagcgttccggcagccgcgtcgatataatagcagagcattcctccctgcagattatggaaaggattgcactgccacggtttgatataatattttacgatatattcgtcgtcctccgtgtaatccacgaattccatctgaaaaatttcgctgcccgcagcttcgttcagttcgggactgcggtcgctcatttcaatcagtttttgcttgcgctcttcacgagaccatttcattcgtaaaacctcctgtatctttatgggaatacttttatgataacatgttcctgtgttatttctcatttattttgccggcggctgaaaaattttttgccggctgcgttcgaaaaaaatatcaagatatgggatttgatgcaaaacggtcgaagcccttgtattttaatggagcgagagggttcatttttgggggactcatttttgatgatagatgaaacatactatatatagtttatgaatgggggatatgacgaatatgaatacattatattgggggagtgtcgattcgtttctatagacatggattctgcattctgataaaataaagagcaataaaaagactattttccgcagaatggatggaaacgctttctgtggaaatatatataaaaacacaagatgttgtacagaggcatcggaagagcgaggggaattatgaaagtcataaaaagagacggcagtacggtggaattcgatcgcagcaagatcgagaatgcgatccgcaaggcgaacgcggcggtggatgagaacgagcggatcgaagagtgtgaaattgtctctatcgcggattatatcgcttcgaggaagcgcacgcgtctgctggtggaagatattcaggatatggtagaacacaaactcatggaagcggaaaagtttactctggccaaagcatatattatctaccgctattccagggctttggtgcgcaaggcgaacacgacagatgaatccattctcagcctgattcagaacagcaataaagatgtgatggaggaaaattccaataagaatgccgtgatggcctccacgcagagagatctgatcgcgggagaggtttctaaggatctgacaaggagaatgcttcttccggacaagatttccaaggctcatgaagagggtgttctgcatttccacgacgctgattattttctgcagccgattttcaactgctgcctggtaaatatcggcgatatgctggacaacggcactgtcatgaacggaaagctcatcgaatctccgaagagttttcaggtggcctgcaccgtcatgactcagattatcgcggcggtggccagcagtcagtacggaggtcagtcggtagatgtgtgtcacctgggaaaatatctgagacgcagttataataaattcaggaagcagattgaaaaagactgcggcgatcaggtggatgaagctattatcgaaaagcttacctgcgatcgtctgagagacgaattgagatccggcgttcagacgattcaatatcagatcaataccctgatgacgactaacggccagtcgcctttcgtcactttattcctcaatctcaaagaggacgacgaatatgtgcgggaaaacgctatgatcatcgaggagattcttcgtcagcgtctggaggggattaaaaacgaaaagggcgtctatgtcacgccggcttttccgaaattaatttacgttttagacgaacacaactgcctgaaaggcggaaaatacgattatatcacggagctggcggtcaagtgctccgcaaagcggatgtatccggattatatctccgcaaaaaaaatgcgggaatattacgagggcaatgttttcagctgcatgggatgcaggagttttctgtcgccgtggaaggatgaggacggaaattacaagtttgaaggccgtttcaatcagggggtcgtcagcatcaacttgccgcagatcgggattatcgccgcaggagatgaagataagttctgggaacttctggacgagcggcttgagttgtgttacgaggctctgatgtgccgccacaacgcgctgaagggcgtaaagtcggacaccagtccggtgcattggcagtacggggctatcgcacgtctgggcaaaggcgaagtcatcgataaatacctgtacggaggatattccacgatttctctgggctacatcggcatctatgagatgacgaaactgatgaaaggcgtcagtcacaccgatccggtgggccgggaattcgccttccgcgtcatgaattatatgaatgcaaaatgcagacagtggaaagaggagaccggcctgggcttcgctctgtacggaacaccggcggaatccctctgttaccggtttgcccgcatcgatcaggagcgcttcggtactatcgaggatatcacggataaagggtactacacaaactcttatcacgtggatgtgagagaagaaatcgacgctttcaccaaatttaaatttgaaagtgattttcagaagatttcctccggcggctccatttcttatgtggaagtgccgaatatgaagaataatctggaagcgctggaggatgtggtgaagttcatctatgagaatattctctatgccgaattcaatacaaagtcggattactgccaggaatgcggatttgacggagaaattctcatcaatgacgataacgaatgggaatgcccgaactgcggaaataaagatcagaacaagatgaacgtgacgaggcggacctgcggatatctgggcgaaaatttctggaatgtggggaagacaaaagaaatcaaatccagagtgcttcatctgtaaacccggaggaagaggcgcgtcatgaattatgcaaaaataaaaaagcacgatatctctaacggtcccggcgtccgcgtctccctgtatgtcagcggatgcacccaccactgcaaaaactgttttaatcccgagacctgggatttctcattcggcgaaccctttgatcagagtgcggagacggagattctcgaggcgttggagccgccgtatatcaaaggtctttctctcttgggaggcgaaccctttgaaccgcagaaccggtcggaactggcggatttcgtaaaaaaggtcagagagagatatccgggaaagtcggtctggtgttataccggttacgactacgagaaagatcttctgaccggccggatcggcagtccggaatccgcagatgagcttctgtcgctgatcgatgtcctggtggacggagagtttatcgaggaagagaaagtgatcgatctccggttccggggttctgagaaccagcgcatcatcgatgtaaaaaaatccctgcaggcggatgaagtagtgctttggagcgacggcagcggacaagacggacaggaggacgaactgccgcagaaatgaaaaagcggagcgccggacagaaggaaggcgaaggacaggacaagagcggaattgtttttaaaatgcggcgaattatcctgcggcgaacacgcagagaacggaatagggataaaaaagaagaacccgtatatgattgcgtcatatacgggttcttctttttctgtccggacatgtgttttgcatcagtccgaaaagtacagcgagatgttctgaggattctttcctctgaatgtgtgattgagattgggagggggatcggcggagacctgttcgaccggcctttgacagaaatgctattttgcattacaatatagataaagataaattgcaatacaagataggaaggaggggaggcaatgattccttctcagatgctgaaagggactctggaaggctgtattctaacagtcatagggcagggtgaggtttacggatatgagatttcacagaaattggagcggtatggtttcggtaaaattgcggaggggacgatttatccgcttttgctgcgcctcgaaaaaaatggttgtgtgtcgtcattctaccggaaatcagaggtgggacccaggagaaaatattatactctgacagagcgaggatgcaatgagagagacgccttttttcagaattacgaaagattgacagcggcagtgagccgtctgcgcaaagagatcggtgcagaaatccggagaatgccggactctctgatgacgggaggtgtcgggggggaagaagccgcggtatttttcaggaaaaaagatgtgaaggaaaggaagagtgagggaggagcttcagatgaataagaagacgagagaactgctgagggagaataatctgctggaagagcagctgggagacgaataccggtctgttctgacagatatcgtcgtgtatctgcgttctgcggatatcacatttcttcgtcaggaaaggatacgccgtgatatcaccgatatgtttttcgacggagaacagcggggcgattcggtgcgggacatcatcggacgtgactacaaatctttctgcgacgacatcatcgatgagacgccgaagcggaactttcggcagaaaattctgtctgtgatgggagacggctgtctttatctgagcgttcttctgtcgctatggcttgccgccggagccgcggcttttctcgcgggttcctctgatcggccgtatctgacgatgactgtgggaaacgtcgtcaacctggcaatctttttgtttgcggctgtatttttggtcgagttcatctctaaaaattcttttcgcacggaacttctgcgaaaaccgttcgtctgggggctgaccgcggctgcgctcgccgtgggaattgccgcaggcgtctttctgagagcggagttgtttgtggttcatatcgcagttgctgctgcagtcgtcgtcttattttttatattgcataaaataatcagcagccgggaagaatgaaggcagaacgatgaataacgaaccggaacaggcggccgcagtacatgacgcggcggatccccgaagcggcacagacagagctccgcgcttatggtataatagcttcaacttagcgacttgcaagagaagcgaagcaagagcttagttggacttatacctgtccctcggcgacaggcgagtccggacagaaggaagacgaagactgagccgtagctgacatggtatcatagcttcaacttagcgacttgcaagagaagcgaagcaagagcttagttggacttatacctgtccctcggcgacaggcgagtccggacagaaggaagacgaagactgagccgtagctgacatggtatcatagcttcaacttagcgacttgcaagagaagcgaagcaagagcttagttggacttatacctgtccctcggcgacaggcgagtccggacagaaggaagacgaagactgagccgtagctgacatggtataatgaaatattcgaaaaattgtgtatagtctattgcatcggaggaatttatgcggaaagtacctgtaaatatcaaaaaactgaaggcaaatgcggctctgccggtgtacagttcggcagctgcggcgggggcggatctgcgcgcctgcctggaggaagatgtgataattcgtccgggaaagacggagatgatctctacgggattggcgatggaagtgcccgaaggctatgcgggtctgatttatgccagaagcggcctggcatccaagcgtggtctggcgccggccaataaggtaggcgtgatcgattcagattacagaggcgagatcatggtggcgctgcacaaccactcggaagaagccgctgtcatatctcatggagaacggatcgcgcaattgatcatcacgccgtatttgaccgcggaattcacggaaaaagaagtgctggaagaaactgagcgcggttttggcggttttggttccaccggtataaaatagtctgggagcgggattatctacggctctcagtaaaaattggaaatattttcttcttatggatgtaaaaatatactgaaaatgctatttgtaaaagcgaacaagtatgttatgataaaaaacatccaggatatgttagaagtgtagcgaaacaattacggaggataacattttatgaacaaaacagaattgattgcagctatggctgaaaaaacaggcagcacgaagaaggatgcagaggcgacactcaatgccatgattgcgagcatcaccgaagcgctcgttgcaggagataaggttcagctgatcggttttggcacatttgaaacgagagacagagctgcaagagaaggcagaaacccgagaaaacctggcgaaatgatcaagattcctgcatgcaaggctcctgccttcaaagcgggtaaggcactcaaggacgccgttaataaatagtcctgttgataatcgaatgaaaaaccgcgtctttcagaagacggggcagcggaagcgaggatgtttttgaagcggacttcgcgcggcgtttaagatgatttcacagatgagtcggtttgactgatctgcggaggccggcgtaagaagtaaagtttcggaaccatcctcgttttgcgtctgaaaaagatgaaatcttacaggcggcgcttttatggatggtatcgaaaagattcttttaaggaacttcttgacaaacggaaaaaatgtgatattattttattagttagtttaaactaacaagggaaaattgatttcggctctctgatcgcagcagttgaggaaaaaatctttcttcaggaaggatcagaaaaactccttctcgatgagagagccattttttttaacacttggttagctgttgctaactaaagagatggaattaattttactgtaagaaatgcagaggaggtcgcggctgtgctcgaaaaatatctgatccggcattgttcccctacgctggcgtctctgaagacggcaaatctgtttaacgtaccgtttgagacggaagaggatcttgaaaatcagattcacagctggaatgcatgtctgacggataagggcgtgagcctgacaatcctgcgggtcaggcgcaaaaatgcgctcgtctatgtatatcggaaatcgagactgcacagagagcttacacaggctgcaacagcggattttcttctgaagtacggatatgaaagcagcgatgtggacggggcggtagagcgcttaaagcggaggctgcaggagaaagaaacctttccgcatgaaatcggggtttttctcggttatccgctgggcgatgtgatagggttcatcgaaaatggcggagataactgtaaatgcgctgattgctggaaggtttactgcgatgagagggaagcgaagaagacgtttgcgaggctgaaaaaatgtcaggaaatgtatttccttctctggatgaggggaaaaagtgtccgacagcttacagtggcagcctgaaggctgttttaagggaggttatcatgagtaaaattgcggtagtttactggagcggtacgggaaatacggagatgatggcgtcgaaggtactggaaggcgccagagccaatggagcggaggcggttttatatactgcgtcgcagttcagaggatctctgatggaccagtatgatgccgtggcattcggatgcccgtctatgggtgcggaggaattggaagagcaggagttcgctccgatgtttgcggaatgtgagccgaagctgaaaggaaaacggattgcgcttttcggatcttatggatggggcgacggtgaatggatgcgtctgtgggaggattcctgtgtgagcgacggcgcactgctggctcacagcagtgtaatctgtaacgaagctccggatgagaatataaaaaaacagtgctcagagctgggagcagctctcgcgggataacgggcggatacggtacggtatcgttttgaacacggacattcatcgcaaacatcgaccgtctgtccgattcaaataaagagaaataatgacgatatgttgaggtgcagaaaaaatcgtacagaaggaatcggctgttttgaccgaaagagaggaggtatctatgagtattttagtagaagactgatgagagcgtaaaatttatgccacttcttatgtaaatgtgtttataattttgaaggtattgtgtgatttgcagaaagagaccgcggcagacatctgccgcggtctctttctgtagggttgtagtgtattaagagaaagttttttctggttgtcaaatgatgaaagatccgatgatgccggcctgtttccggagaaacaacaggcggtcatctaatctatttatacccggattctccggaaaacaacagattattaaaaaattttacattttaccgaaaaatgattactcaatcgcgatatatttcttttcctcgatctgctgaggcgcttctttcgggaaagtcagagaaagagttccgttgttgtaagccgctttgatatcttcttcttttacgctgttgccgacatagaagcttctgctgcagctgccgcagcttctttcgcggtagacatagccggattcttcgtcggatttatcctctgaagtatttctcgcagcggagatcgtgagatatccgtcgttcagctcggctttgatgttttctttttcaaagccaggaaggtcgatatccagcagatacatgccgtctttttcctttatgtctgtcttcatcgaaggcatctgcgtcctgcttccgcggaagaaagggctggaaaacatatcgtcgacaaagtcgttaaaacttaaagctccaaaatttgttctcggtgttaaagataacataatacatacctccttatttattttttcctttcgggatttttttatactttatttcatctgtaggactttttccttacgtcatatatatagccactgttttagcactctaaacatgagagtgctaattttttgaaaaattttttttcattgaaatattttgataaaatgaaatgaaaaacgagcgcgaacagatcctgtgatgcggattgtttccggacggcggcgatctgcgccgccttgagacgttgctgaatcgaacagaagaaagttgcagaggttgtgacatgagacgaattgcaaggatttacactgattttggagagaatttcgggattccgaggcagagcggtctggcggaagccctgagaggagagatcatatttgaaaaagactttcggaacgatcatgcggtgagagggttagaggaatttacccacatctgggttctctggaagtttgatctgccggaggcaccggcggaatccggcgggggaggaggcgaagaggcgcgcgtgttcgatgcgccgggagctctgaaatggcggccgaccgtgcggccgcctcgtctgggagggaatgtgcggatgggggttttcgctactcgttcgccttttcggcccaatcccatcggtctgtcctgtgtgagactggattgtgtgcgtatcgataaggaacggggccccgtgctttctgtcagcggcatcgatatgagaaacggtacggagatctacgatatcaagccttatctgcctcatatcgacgcccggccggaggcaagaggcggattttcagagactgcggctgttcaccggcttagggttgattttcctgacggactgctgagaaaactgccgctgggactcagagagggcgcggtccaaatgctttcgcaggatccccgtccgggataccagcgttcttctgaacgcgtgtacggcgtgactttcggaggctataacatctgttttcaagtgaaagacgactgtctgacagtgacagatctcggaacacatccgagcggatagaggcggacggtctccgctgccgcaggagacgggagcagcggagttgtacggcagccgattctgacggcacagtctgcgggaagattgacttgaacggctctttcgcataaaatcaatgtggaaaaacggccggatgcgcagtctctcagaagcagaccggaagagtgcgtgccagcggccggaacgatatgtttttatcttatttcaattatttcaggagaaacaaattatgaacagtaaagaaacgaataagaatccggcgcaggagggcatttttgacgcgcgtcagctgggcgcgccgaagatgctgatactgggcgttcagcacatgttcgctatgttcggcgcgacggttcttgtgccggctctgaccggtctcagcgtatccgccacgctttttttcgcgggagtaggaacgcttttgttccatctgctctcgaagggggtggttcccgcatttctgggatcctctttcgcttttttagccgggtactgggcgatcgctccggaaggggaagcggagctcctgccgtatgcttgtttcggcgtagcatgcgcgggactgctctatctgattctggcgggactgatccgagcgttcggcatcggacgggttatgagattctttcctcctattgttacgggtcctattattatcgcgataggactcaatctttccaaatcggccgtggataattgttcttccaactggtggatcgcgctcgtggcgattctcgtcgtcgtgatcgcaaatatctggggaaaggggatgattcggattattccgatcattctgggcgtggcagtctcctatgccgcggcggcggtcacaggcaatgtggatttcacagcggtgaaagaggccgcgtggattgggctgcctttccactgggattccactgttttcggcattctgccagaggcggatccatcgcttctcatcacggcggcggtcacgatcattccgatcgccctggcgacgatgatcgagcatatcggtgatatgtcagcgatttcttccaccgtcggccgaaactatatcgccaatccgggacttcaccggactcttctgggggacggtctggcgacgattctggcttctctgttcggcgctccggcaaacacgacctatggcgaaaatacgggagtgctgtctctgacaaaagtttacgatccgagggtgatacggctggcggccatctttgcggtgattctgtctttttcgccgaaggtggcggctgtgattaccgtaatgccggcggcgaccatgggaggtgtttccctcgttctctacggtatgatttccggtgtaggcgttcgaaatctgatcgaaaataaggtggactttgcgaagagccggaatatcataatcgcggcgctgacgctggtgctctccatcggtatcaactacagtacggcgggggctgtttcttttggtgcgggctctctgaccatcagcctgtccggcctggccgtaggcgcgctgaccggtattcttctcaatgctgtacttccgggcaaagattatgtttttgccgaagatgatgcaacggcacttccaaagtaaggggaattatgatattatgtcttcggtattccaaactgctcggacgcttgcagtcactggcctgagagggattttgcggacaagtatacaaaatcggcctgtacgaaactgctgccggcgaaaactgcgtgaggaatcgcaatgcaatgaaaaactgcaatcgtaaaactgaaaacaaggagaagaaaaatgaaaggcaaacttgtaaagagagttgtttcagtcgctctcgccgctgcaatggtcttttcgatgactgcctgcggcggcggctccgacagcggttccgctgattccggagaaaagacgaagctgtatgtcgtcaactggaaggattacgcttctgatgacgaagaactcatggctgcgtttgaaaaggaatacaactgtgaaatcgtcaacacctatatggacagtgaggaagaccttctcacgaggcttaagacgggagcggaaggcgagatcgacgtctgcctgccgaactgcacgattcttcctgcggctatcgaaggaggctacctcgaacagatcgatacttccaagatagaaaacttcgaaaaactcttcgacaggtttaagacgcagaaagagtgcctcgacgctgacggaaatatgtatgcggttccgttcgtgtggggttctacagctatcgcgtataataccgatgatgtgaaagaagctccgaagagcatgaaagttctcttcgatgaaacttacagcggtaaaatcgcgttccgcgacgactacaacgatgcgattatggcagcggccatcgttctcggacaggatccgaacaacccgagcgatctggatgcgatcaaggatcttctgatccagcagaagaaattaaataaaacttattggcagacgggcgacgaattctctaagctctttgccaacaaacaggtttctgtaggtctcatgtggtccggacagtccgcgacaatgaagcaggacggtcagccgatcggatttgtggttccggaagacggagcgatcggctgggtagacaactgggccattgcaaaatcctctgagaataaagaactggcgtatgctttcatcaactatatgatcggtaaggatgttcaatacggctgggcgtcgaagggcggtccttctcctgccaatcaggaggctgcggacgcgatcgatccggagtacgcggcttcctgcgcgatggatgaagcatccctcaatcgtctcgtcttcatggaatacagaacacctgaagtcaaaaaggcatggaacgatgtctggacggaagtaaaggcttcctaatcgtttcaccgatgcctgcggcattttccgcagaaagcactttgctgcgaaacaccggggcaggagtcagagggattcctgcccttttcctgcgttttgcggcgcgaacctgaacaaactatacgttatcgttttcgtcacaggtgattatctattatgaaatttgataaacgacaggcactgacgtggcctgctatgatcacgctgtttctgtttgctctggtgcctctgatcacgatgctgatcacgagttttcagagtgatgcaggcggcggattcacattagaaaactacaaagaatttttttccagctcgatttatctcagactgacaggcaagacgatcgtcatgagtcttatggtcaccatcgtcagcctcgttatcgcttatcccctcgcttatatcatggcaaaaaaactgaagggactcagaaatgttattctgatactcgttatcataccgttttttacaaatcagctggtgcgtgtgtacagctggctcatttttcttcaggacgggggaattctcaataattttctgaatattttcggtctctgtgaagacgggatggggcttctctatacccagggcgccgttatcataggcctgacccatgcgttttttccctatatggtcgtcacgatttatatggctctggagcggatggatgattctctgctggaagccagcaggagtctgggggcttccaggtttaccactttccgcagggtcgtgttcccgttatctctgccgggagtgctctctggagtcatgatcgtcttcgtgccgacactgggtactttcgtcgagccgagaatcctcggaggcaccgatggaacggtgatcggaacgatcatcgaagaccagttcttcgaaatcgcaaactggaatttcggcgcgtctatcgcgtttctgctgctggcgctggtcattctcagcatggcggcgctcaataaagcgggaaagaggtgggagacagaatgagaaaacacaatattttaagcaaaattttcgtcctgctcgtcctgctctatctgtatgttcctatcatcgtactcatggtgctgagtctgaacgaatcccgttataattctctgccgtttgaatttacgacaaaatggtatgaggatatgatctccaatgagtcgctgctgctggccgcgaagaattcgctgctgctggcgctgataacgggtatcatctgtaccgttctggcgacgctttttactctcggccagcgctatctgtccaaaaaggtcagcgggacgtttcacagcatcgtcatgatgccgatgagtatcccatggctgatcatgggtctgtcgttgctgctgatgatccgttctctcgggtttacaaagaacatggcgtttgtactggcgggacatgtgatcatttctcttccttacgctctcctggtcttaagagcccgcatgagttccctggacaagtctctcgaggagatgagcgcctccctgggcgccggtccgatgactacgtttcgcagagttacgcttccggccatcgctccggcgatggtggcgggaggatttctcgcgtttatgatcagtttcgataactttgcgatcagttatttcctgatgccgagcggcgtcactacacttccgatcgaaatacagacatcgatcaaattcggcttcacgccggaaatcaacgcgatttcgacggtgatcatcggtttctcactgatcattctcttaatcgtcggtatcatcatgaggtcgaacctgaaagatatgttaggaggcgcgaagaaataaatggcaaaggtagaattaaaaaatctcacgaaaatctacggtcagaatacggtggtagatcatatcaatctggaaatagaaaacggaactctcgtatcgattctcggtccttccggctgcggaaagacgacgactctgagaatgatcgcgggattcgagcatccggaagacggcgacgtgctgtttgacggtcagtcggtgggacaggtcccggtaaataagcggaatatcggcatggtatttcagagttatgctctgtttcctcacatgacggtagagcagaacgtagcttacggcctggaacagcacggtgcggcaaaatcggaaatccccggacgcgtcagggaagcgctggaaatggtccatatggaggaattttccaagcgcaagcccaagcagctctccggcggtcagcagcagagagtggctctggccagagctctcgtcatccgtccgagggttcttctgctggacgaatgtctgtccgccctggataagaagctccgtgtggaaatgcagagtgagctgagaagaattctggaggaaagccaggtaactactttcttcgtaactcacgatcaggaggaagcgatgacgctgtccgataccatcgtcgtcatgagagacggtgtcatcgagcagaccggcacgccgtacgaagtctacgaacgtccggccaatcgttttgtggcgggattcttgggcaaagccaactttatcgaggagaacggcgtgacgtatgccgttcgcccggaaaagataaaaatcggttctgccgatgatccggcggcgaggatgagcggcgtcatcgaatctctggtctattccggaaatctgacgacttgtacggtgaactgcggtcagataaatatcgtggcagaactggccaacgcggatacggctcagcgtctttccagaggtgaaaaggtttcggttctctgggatgacagcgcgcagattaaactggcggattaggcggataccggaagatgaaaaaagaatgtctcatattaggcgggctggtgcccgatgtgtactatagtgtgagccgctggcccgaccgcggacaggacggttttatctcggacgaaaacgtggtggtgggcggctgtgcggtcaatatggcggtcaccgcggaaaatctgggcctgcgagctcacgtggtctcctgtgtgggagaggatgagatcggcggcagaatggacggctacctgaaagaacacggattgtcccggagactgatccgtcgaacgggaggcgtaagcggaaaatgtctcgtatttgtggaacccgacggagaacggacgtttctgactcgtaaaggagcagaggggctgtttccggaggaactggcggaagcgattcttcagggagagtatgcggcagccggagtgacgggctattatctgctcaacgatgatgcggaacggattatggctgtgatcgaggaactctttcggcgcggcacgaagattttattcgatccgagcccgctggcagatgcgatccggccggatatcctcaggagaatggcggaagtcagccatatcatgaccccaaatgtgacggaactgaaagtgctggaagagaaaacggggaaaagactgatttcaaaaggcggagtgcagaattctctgaaggatcagatctgtcagagtaaagctccggttctcatcgtcaaggatggatctgccggcggcacggtctatacgccggaacgatcttttccctaccttgcggaaaagtgcaccgcggtggataccacgggcgcgggggacagtttttccggagcgcttctctattcgatggctgaggatattcctgtcgatgcggccgtgaaactggctgcccgatgtgcggc

SEQ ID NO: 4376 - DNA, 7992 bp, Unknown
  16S sequences of unknown bacteria
tgtagcacacctctggagagaggtctataaatactactcttatataatacgaggcttttggtagggcaacttcttacggtagtgccactaaccaaaaggctcccctgtgtaaggggagctgtcagcgaagctgactgaggggttgtcacatcacgctgtcggcgctagccgaactgaggagttatcaccgccccagcagcttctccggcgcgctggccgtgcgcaaacccagccccgcgagcagcagcatgaacagcgcggccgccagataggcgcgcgcgcccagcagccaataaaacgccagcatcagcgcgccgtacagcaagtagcggggcgcttttttgcggtctgtaaaccgcgttgccagctcgcgcaggcgcggccgcgccacccgcggcgcgcgcttgggctcgatcacgggcagatgccgggccgcgagcttttccaacagatcccgatccaccacggccacgcgcggcccgctcaagctgggcatgcgcgcgtcgttgcccgcgggcgcggtgctcacgagaacggcgctttccgcgccccgatgcgcgcgccaggcggccagaacatcgtcgcccagcagcggcgcgcgccgttgcaacagcaccaagggcaccagcgcgcccgtatcccgccggatcaattgcccgttcaccgccgcgatttccccgggatacgcctgcgctagcaggtgcacaatatccgagcgcgcctcggcctcgctggccaccagccagccctccaccctgcgcttggcgcagcgtttgcgcgcccgcgcgccgcgcttgcgcaagcgttccatccagcgcgcggccgttttgagcacgcggcgcaaggccagcatgcacagccctgccagcgccagcgctaagagcgggcggccggtcgccgccagaaaaaacagataggcggcaaacgcgcccagcgccactgccaccagcgaatccattctctttcccatgccaacagtatggccgaaatgtgggaatttgataccatactggcgaaatttacccatgcaggcttttctccgaacaaaaaatggtatataatagagtgaacacctgtaaggaggcgcttcaccattggcaattgggattttgggcggcacgtttgacccggtgcacaacgcgcacatcgcggtagcgcagcttgccatgcgccaactcaacctggaaaatgtgctctttctgcccgcaggcgatcctccacacaaacacgcgcgcgcaagccggtgggcgcgcatggaaatggtgcggttggccgtggcgcaaaccgggttttcgagctgcgatatcgaggtcgtccgcgagggaacgacctacacggtggatacgctgcgcaccctgcgcgccaggtacccgcaggcggaatttttctatatcatcggcacggacacgctctatcaactcccttcctggcgctgtttcgcgcaggtgaaggagctaacgcaattcgccgtggtgcgccgcgtgggcgaagacgtggcgcacgcgcacgcgtttgccaaatccatcggcatccgcgccgcttttatcgaaatcgacgcgccgcccatctcttccacagacgtgcgcctgcgcatccagcgcgcgcaatccatcgatgggcttttgccggaaagcgtgtgcatgtatatctacgaaaccgggcaatatgctcccagcgcccacatcatggagcaactgcgccgcgcgctgcccatccggcgctttgagcatacgctcggcgtgatcgacacggcggtttcgctggcggcgcgctatggcgtgaacgagcggcaggcgtacctcgcggccgcgctgcacgattgcgccaagggcatgaccacagaacaaatgttcgccctcacccacgcggggccggaatggcagcaatatccgcaaacgctgcacgcctgggcgggagaaatcctggcggagcgcgattacaacgttttcgacccggaagtgctctccgccatccgcaagcacaccacggcgcatgccgtcatgaccatgctggacatgctggtttacgtggcggacgcgatcgagcctgggcgcaaggttttcaccggcctgaataccctgcgcgctctggcggcgcgggatttggttgccgcggcgcacaaatgcgccgaatcatcgtatcgctataacctgagcgccgggcgcacggtgcatccggacacgctcaaatttcttggcatagaaacggaggaagaggcatgaatccacaaaagctggcactggaaatcgcgaaggttctgcacgaaaagcaggccaaggacatcaccgttttgcaggttgatcacctcacctcggtcacagattattttgtgattgccactggccgctccacgcaggccgtgcgcgccctggcggaagacctgcaggacaagttggaagcccaggaaatctacccgcgccgcaaggaagggttccgcgaatcccgctggatcgtgctggattattccagcgtgatcgtgcacattttccatcccgaagagcgcgagtactacaacatcgagcggctctggacggatggctccaaccggatcgcgctccattttcaggatgagtgagaatgaatagcaacacggtggatttgcacattcccggcggagaaagcatgcgcctggtggcgcggctggcaacggtgggctatatcgccagcgccgggttgacgctggacgaggcggaagacatgaagattgccgtggcggaagcgctgggcgccgtgggcggcgagcggctgcacgtgcaattttccacggcggacggcgcggtggaaatcgcggtcgtgggcgatggcaagggcaggccgcgcgaagaggtggaaagcgaaatcgcgcgctatgtgctccgttcgctggccgacgaggtggaaatcgaggaaaacggggctggacagatcggttccattcgcatgaaaaaacgcttaagcggaggcgcgtaaggtggccgaaagtattctggagcgctatattgcgcagcggtcgccagccttgcgcaaccagctcgtggaagcgaacttgggcattgccgcggccgtggcgcgcaaattcgtggggcgcggcgtggagtacgacgatttgtaccaggtggcctcgtttgcgctgctcaaagcgatcgaacgctacgatccggatcgcggggtaaaactcacgagctttgtggtgccctccatggtcggcgaaatcaaaaactattttcgcgatcgttcgcgcgctatccgcctgccccgcaaaggcagcgagggcttggcgcgcgtggaagaggcgcgcgccaagttgcacgcgcgccttttgcgcgaacccacatacgccgaacttgccgccgaagccgggctggccatggatgcgctgattgaaatcctggaaatgcgcagcgcggccttgcccgcctccatggatgaggcgcgcgaagacgacgtccccctgggcgaaacgctgggaaccgcggaggaaggctacgcgcgcatcgaatcgcgcgatgcggtgcgcagcctgctcgccacgctgccggaaacggagcggcgcatcatcgagctgcgctttttcgcgggaaagagccagcgcgaagtggcggcccaactgaacgtttcacaaatgacggtttcccgcgcggaacgccgcgcgcttggcaatatgcgcgaaactctttcgcgcgaatcgcaataaacgcatggaggatgggaacatgaagctgggatttatcggcgcgggcaatatggccggcgcgattttgctgggcggcgcgcacggcgcgaatgtttatgatgtgaacgcggaaaccatgcgccgccgcgaacaggaatgcggcgcggtgcccttttccagcgcggaggcgctgatccgcgcgagcgatgtgatcctgctggccgtgaaacccaacgtggccccgggcgtgctgcgcgaaaaccgcgcggcgttcgcgggcaaggccgtgatttccatcgtcgccgggctgacggtcgccacattgaaggcgcttttgcccgcagaggcgcggtttctgcgcgtgatgcccaacacgcccgccatggcgggcgcggggatgaccgcgctgtgcatggagcacacgctcaccgatgcggaaaaggcctttgcggaatcgctctttaacgccattggccgcaccgtgtggctgcacgaatatcagatggacggcgcggtaggcgtatccggcagcgggccggcctatgcgtttctgttcctcgaggccatggccgatggcggcgtggccctgggcctttcccggcaggacgcctacctgatggccgcgcagaccctgctgggcagcgccaagctcgcgctggaatccggcaagcatcccggcgaactcaaagatatggtctgttccccggcgggaaccaccatccaggccgtgcgcgcgctcgaggaaaagggcctgcgcagcgccgtgatggaggccgtgatcgccgcgggcgaaatgtccgccgccatgtcgaaagaaggcgcgaaatgaagtggattgccagcgcggcctttggcctggaagggcaaacgatgcgcgatttgaagcgcctgggcgcggccaacgcgcagaccatgaacgtgggcggcgcgacctttgagggcgatttctccctggcctttgccgccaacctctggttgcgcacggcggaccgcgttctgctggtggccgccgaattcgaggcgcgcagtttcaaagaactgttcaacgccgtcaaggccatcgaatgggagcggtacatcccggtggacgggcgcttccccgtgcgggcgcgctgcgtgcgctcgcaattgatgagcgaaagcgatacccaaagcattgtgaaaaaggcgattgtggagcgcttgaaagaggtctaccacgtggaatggtttgccgaaaccgccgcgaccgtggccatagacgtacacatccgcaacgatcatgtgaccatcggcctggattccagcggcgcgccgctttccaagcgcggctaccgcacctggaacggcgaagcgcccatccgcgaaaccctcgccgccggtctggtgctggccagcggctggcatccctggcagccgctgatcgatccctgctgcggcaccggcaccctcttgatcgaggccgcgttcatcgcgctggcgcgcgcgcccggcctgcgccgcgaattcgatatggaaaagtgggcgtttgtggaccgcgccgcgctggacgccgtgcgccgcgaagcgcaatcgcgctatgattccagcgccgcccggcaaatccgcatcagcggcagcgatatcgatcccgaagcgctggaactggcccgccgccacatccgccaggccgggctggcgaaccgcattgtcctggagcagcgcgacctgcgcgacctccaccctaccggcgaaccgggcgtgatcctggcgaatcccccctatggcgagcggctggataaccagcgcgccgcgcacgtcatcgccaagcagctgggcttgctgcacgcgcgcacgccgggctggaagatgtgcgtcatctcggcggacatgggctttgagcgcatgtttggccagcgcgccacgcgccgcaagcgcttttacaatggcaaaattgagtgtgaattccgtatcttcgaatgaggtgactatccatgaagccgatctttaaccgcgccccccttacgcccaattcccgcgccgcgctgtccctgggccacattgagccggaaggctggctcaaggagcaattgcgcgcgcaggcggacggcctgtccggcaaattgttcgacatttggccggatgtgggcgaaaactgcggctggctgggcggcaatggcgacgcgtgggagcgcgccccctattatctggatggcttggtgcccctcgcctggttgctcggcgacgagcgcctgaagcaaatttgcctgcgctatatcgaatggatcctcgccagccaacgcgaggatggattcttcgggcccgcttccaacgaggattggtggccgcgcatggtggttttgaaggcgctgatccagtatttccaggcgacgctggataagcgcgtgctcgtgttcatggataaatacttccagtatcagaaaaagatgctggacgccaagcccttgcgcgattgggccgtggcgcgcggcggggaaaacatgcaggccgtcatctggctttacaacatcaccggccagaaatacctgctcgatctgctttccaagttgcgccagcaaaccctggattggcccaaccacttccacaccttcccgcaaacccgccccatgagcgcctccaacccctggtacggcctgcaaaaggcccgcgcgcaagaaatggagcaggaagcgctggaaggcatccaccgtcccttgtacagcacgctgtatcactactcgcacggcgtaaacgtggcgatgggcctgaaaacgcccgcgctgatcagcctgttcaaggcgggcttcaaggagcagggtggcttccgctttggctgggaaaaattgatgaaataccatggcgtggcctacggcatgttcacctgcgacgagcacctcaacggcgcgagccccacgcagggcaccgagctgtgctccgtggtggagctgatgtattccctggaatccatgctggaagcgggcgatttttccgaagaaatccccgatattctcgaaaagctggccttcaacgcgctgcccgcgatgttcaccgccgatatgcgcgaccaccagtatttgcaacaggccaaccaggtgaaagtatcgcgcgagccgcgcgactggtacaacaacggggacgacgcctccctctttggctttgccccgcatttcgcctgctgcacggcgaactatcaccagggcttccccaaatttgccacgcatctgtggtacgcgacgaatgaggacggcctctattgcgccagctatgccccgtgcacggtgcgccacgtgatcggcaacgtccccgtgcgcctgcgcgtggacacggaatatccctttgagcaaacggtgcgcatcgaggtcagcgtgaagcaacccatagaattctccctttccctgcgcattccgcagtgggccaacgcgcccatggtctatttgcccggcggcgaaatcatgcaggtgcgcgcgggcgaaaccgcgtttgtgcgccgccgctggcgcacgggcgacgtggtgaagctggaattgcccatggaaccgcgcatcacgcgctggcaccaccagtccgccgccgtggagctcggcccgctgctcatggcgctgcaaccgcgggaagagtggcacgcgctggaaaacggggactgggccatcgacgccgcctccccctggaactacgccatcgccaaggacgaacccatgaaggccgtgttccatcccggccgcgcgcatgcctttaagcacggcgagccgccggtggagctctttgtgaaggccgcccgcttggacgattggcaaatggacggcgccagttgcgcggcgccccccatcctgcccagcgtgccggcttcgcaactggaaaccatcgcgctcgtgccctatggatatacctcgctgcgcgtatcgcaattcccttatgccagcgtcgaaaacgacaacggctgatctgccaatccttattaagaaacgtattttggcgcagaaaaatgggggctgcgcccaaaaggggctgtgaaaaaaccaaaagttttttcacagcccctggcggcgaagccgactgaggggcgcacgaagcgcgcgccctgtgggcggagcagcgcgaagtaagcccagtggggacggagcttcgccgcgcgcagtgcgcgaaacaggccgtagccgtcgaagccccgaaggggtggaggggcgaggacacgcccaaagggcgtccgcagccccggaataccgggccagcgaagcgcaggccggtacgaagaccccaatgagggcgaaagaggcggcgcagccagtggctgcaatagccgtcgatgagcccagtgaagcagggagcaccgcgagtgagcttgcgaacatcggaggcccgaagggctggagtggcgagcacac

SEQ ID NO: 4377 - DNA, 21119 bp, Unknown
  16S sequences of unknown bacteria
cagcttggcaaaaaagccggcccttttttgagattccagctcgttgccgccatgctggcggtaggaagcgtctacctgttctttggtaagccctagcatcgttgtgcgtgcgtggatggattccatgcttcctcctcctttttggatagcgtcttttgttttgttctactgtatgaggacgaccctatgatttagaaccacaaatacgccatatatagacacagggaagggtttgcattgccaaatggaggagggcatgctataatatcctacgttgtatgtacctgtagctcagttggatagagcgtcagactccgactctgaaggccgctggttcgactccagtcaggtacaccataaaaaacctaggaataatgcggatttgcgggttttcctgggtttttattttttgtttgaaataggcgccatttggcgtgcccgataaggatgctttgcataaaacaaaaaacagcgccggggcgctgtttttttacatgtttactgctttggcagggtggcataggtttcctccagcatatgcagcttttcggaatcggaggcggatttaggccaattttgcacatagatgctgttgcccggctcgctctgcttttctacgctgttccaaaaattttggctcaacgtttcgtactctgcctgggaaatcggggtcttgccgtcgctgccgtaataggtcttgctctgtttttcattggaataggaaaacagcggcgttgccacgatggcgccgttttggttttcgatgcgcgcccacatttcgccataatattcggcgccaccgcgggcataatcatgggctacgtaaaacatcttacccgtcgccttatccttgcaaagcgtaaagtcatccggcccgccgttttctccccaatccgtcaaaacctgggaaaagccgccgttctggtccacctgatagacaaacagataggtaaaccggccggtcccctccaagggggactgtacgataaattccggggcgccattgcaatccagatccataaagtagacaaaatagggcccataattgctggtttctccaatgtggggctcccattcatcggtgtgggactgcactacctgcgggatgctgccagacggctgggcgggcgttggttcctggctggcggcaaaaagcggctgccaatccagtgcgatgagctgatagctgctgcgtatcgcttcaaactcctctttggaaatggggttgtccgtaccgttgcggtagtatttgtccccctcccagccagagtagacaagctcctctttcagctgcggcttcacgctgtttttcggcagggtatagtaggtatacgattgatcgaacgcactgctgctgcccgctatggcaatcacgctgtcctcacagatggtatagagggcgcggtatcccatggagtatacatcaaacagacgctgcacctgtttgccgtcccatccgtagagatcgtagatattatagccgtttgtcagctctgggctgcattcggcgatgataagctctggaatggcgtcgccgctgatatcctccaacgcatagtataggtcatggccggcagaggataggtatagctcctggtttacatgaggcagcgtggaaaaatcaccgttgtagtagttgttttgcgcgcccttgcggtattcttccaggattgggtcataacaggaagcatcaaaatccgcagagggcgtggcctgaaaggcggcttctacggccagctttgcgttgagcaacggatagctgcccaaagcctttggggaattgggatgatctagcacattggccgcggtattttcgcagaggattgccttgatatcccgtcccttcaaggcggggttggcgccccacaccatggcggcggtggcggccaccatcggcgcggccatggaggtgccctgcatggcatcgtacccgccggcaacggtgctgtatatgcttacgccgggcgctgcaatgtctacctggtcgccgccgttggaaaatgacgcctgcatgtatacgccgttttcatcctgttcgccggcagcgcccacgatgatgacgcggtccataatatcctgcgccgttaccgttaccttgccgttggccgttacgcagttgtccgcatcgatggcagcgaacaggccgttatagcgcgcatccacgccaagaccgtccgccgcgccattgcccgcgctctgcaccacaacaaaatcatacccacggatcagcagcgaggccatatactgcgaggccagcgcgccgtttcgatccacagcttcctcggaaaaaacgtcgttgctggtggggagggagccggtctgcccggccgataggttgatgaccattttgcggtccgttccgccatttttcaaggaaagggaaaagccggccaagatggaggaggtggtgtcccagccgccgaccagctcttggatccagtcgggggcatagtcgtagccgtgcagcacggcattgggcgccagcccggctatgcccttgccgttgtccatttcggcgccgatgatgcccgccacatgtgtgccgtggtcctcacggttgacaacatcgggattgacgatttctatcgaaagatcttcgtgcttttggtcaaagccgttgtcgatcacgcctacttgcaccggggacagcctgtccttatattcccaagcgccgggtgcgtccaccgcttccgcccaccagttgttgccgctgggctttgcagtatcccaggtattgtccatccaaaaattgtaccaggtcttgccatacgggtcgttgggcagataatcccctgtatattgggaggcggtatccaccatcgcggcctgcacgccctccatgccttccgccttttcacagagagcgtccagatcggaaagggtttgggccgctacacgcacctggatctggtcgatcatatccagccgcccggcaatctcgccgccaagcgctttggcaatcgcttctttctgattgtccgccgtgcctggttcgcaaaatatcaacaggatgttgttgacataggaaatccccgtttcctcgtcctgagcaatgtccgcttgctcgtatagatacgtgccctcggaggcctgcgttggcttttccaccttggcatggcaggcaacgacggccgtgccgcagaacagcgcacaaagcagcaagcacaggctgcgtataaaaacagagattttttgaccaaacattcgagaaatcccccttttggatgcatctgaaaatattgtagaacaggcaaaagcaaaagtaaatatgtcgcaaacaaggcaaaaaacggcccgccaaacggcgggccatagtcggctcaagggcggatgaaatttgtgcggctgccgcgctctgttttgggcaggggcagcccggcttctttgcctgcctgaagacatttgagcatccaggccaggttgtggccaatgttgcgcatcgtttgcagcccttctgcatccagcactacctcctccggccggttgccatgcaccatattccaataggtggagccaacggtgggcatttgcgaaataccaaaatacttttgcagcgcatcgagcgaagccgtggtgccagcgcgccgggcagaggccactgccgcgcccggcttatacgcaaacacgtggcctgcgctgtaaaatacacggtccaaaaacgagagcacacggccgctgggatgggcataatacaccggcgtgccgaaaacaaagccatcggcatgccgcgccttttcaatgaaggcgtttacggcgtcgtcggtaaagatgcagccgtgttcggtgcattggccgcagccgatgcagtcgcggatgggcgccggccccagctgaaatatttcatacgagacgccctcctccgccagcgtacggccgatctcctctagggcggtgtaggtgcagcccttgggcttggcgctgccattgagcatcaaaacattcatacagatccctccttggataaagcatgggcattggcccctttcatgctttgagtataggcgtggggagaaagcattgtcaatcttactacaaacaaaaagggcgccttttcggcgcccttgggagaaagcgaattatttggcggccagcagattgtctgccagcgtttccagctgggcttccgtttccggctttaggctggaacggatagagaccagcggctccaccatgcgaaggtttttcatcggctccaggattgctttcatgcacttgcccgcagaaggcgcccaagaaccgttttctaccagcgcaacaacgcggttttggtaggccttggcgcgcagcttgtggaggaaggcctccatcggcggaaacagaccagcatcatagctggcagaggccagcacgagatggctgtaccggaacgcatcctctacgcactctgccaaatcgctgcggcaaagatccgccagcaccacctttttcgcacctttttcctctaagatatgcgccagctttttggcggcctgcgcggtatggccgtggatggatgcataggcgataaataccccttcatcctccggctgatagctgctccacacatcgtatttgccgatgtaatggcccaggttttccttcaggatggggccatgcagcgggcagatggtttgaatatccagcgtagcggcctttttcagcagggcttgtacctgcatgccatatttgccgacgatgttaaaataatagcggcgggcttcgcagtcccaatcctcttcggcatccagcgcaccgaacttaccaaacccgtctgcggagaacagaaccttttcatgctgttcataggaaaccatcacttccggccaatgcaccatcggcgccatgaaaaactggagcgtgtgctggcccagcgacagcgtttcgccctccttggctacaatggaacgatcgctgatgtcaaaggtgaagaactgcgggatcatcgacagcgctttggcgctggccacgatcttcatatccggatacttttccgccaacgtttgaatgttgctggcgtggtccggctccatatgggaaacgacgagataatccggctttctatcgccgagcacgtctgcaaggtttttcagccacgggccggtcgcgcgcgcgtctacggtatccatcacagcgatcttttcgtctaagatgacgtaggaattatacgagatgccgtgcggcactatgtattggctttcaaacaaatcaatggttttgtcgtccacaccaatatactgaatgcttggggaaatggttacaagttccataccaatactcctttacaaatatagttttttgtatacaacggaggcagggcgccgtccgactgtaccgattttttccttcctaatattagcatagatggatagaataatgcaccctgcaaagcaaagttttttgctagaaaagaaaaacgcaagcggggcaaatagatttaaaggcggcgggatgaaggatatggtatactaaattgttaagggaacgcatgaggaggatagggcgtggaacaaacgtactttaccaaatatatctccattttatatcggcagggcaaccgattctatgatcgagagcttgccaaatacaacatcggctacggacagcagttttatttgccgcgcatctatgaaaaccaagggcttagcatgtacgaattggcccggctcggccattttgacaaaggaacggtgacaaaggcagtccaaaagctggaggagcaggggtacctgcgcattgaaaccgatgagcgggataagcgcattcgccgcctgtataccacggaaaaggcagagccggtgatccaaacgctgtaccgtgtgcgccgccaatggcatgaaacgctgattcgcggcctagcggcagaggaggtaggccgggcagagaaaatgttgaaaaccatggcgcaaaacgcatacgatgcgatggaatcaccaaaggacgggaatgaggaagaatgcagatgaaagagagggaaaatatcgcggtattagggccggccggcacattttgcgatcaggcattggcgcagtatagagccaagacaggctgcaaagaccaagcgctgtactgcgcctccattgaaggggtatttcatgctgtggcagagggctgccagcgggcagtggtgcccattgaaaacacgctggacggctatgtgcaggtcagcctggatgggctgctggaaacaaaggcccgcattaccggcgaattgtatgtgccggtacagtttgccctagtcggcaatgtggacagcgccaaagacatccgctgtctgtatgtgcagttcaaggccaagggccagtgccaaaaggcaatcgaaagcctgggggatgtaccgctgatgctcacagagagcaatatggaatcctaccagagggccgaggaggggcgcgaaggggaagcggccatcattccgcaacatatgtatgaagcgagccgttgccggttcaaacagcccaatgtgacggacgcacagaacaatgatacgcgcttttttgtgctggaggcacagcccggcgccctgcaagcgggcacagcccaaaagaggaaaatggcgttgtatgtgctggatgctgcggataagcccggcacgttgtttgaaattttgcgccagtttgccattcatcaaatcaatctggcggcgttgatgagccggcccaccaaaaagggcatgggcacctataatttttatttggaggtcagcgtagataaggcccagctgcctgtgctgcaaactaccatccgggcgctcaagcgcgactttaccttaaaggtattgggagaatacgcagcgctataaccataaaaaacgggagcaggatgctcccgtttttttgtgcttacagcgataggccgcgctgtacgtttacgatgaaatcctgcacgtttgtaacaatggtctttaccgccaggctgcctctgtccctcagtttgttgacggcaaattccgatacgtctacgctgtaaaaatatacgggccgaaccgtgccgtccgccaaaacgcggtaggaaggcgtcatattgcccgttgcaatggagtgaagcgttgtggccaggcagatcaccgtggtggattttttcacctggtcccgcatggcgttttgcccttcgtatacatcggcgtagacctccggcagcggcccgtcgtcacggatagagccagtcaatacatacggcaccttgcactgtacgcaggcggccatgatgccgtcctggatgttttgctcagcaacgaatttttcgatcgagccagccttgcgcacctggttgatggtgtcgatgtggttgtagtgcccgcccggctgagaaatctgggtatagatatcctgccccagcgcggtagagcgatagcccgcttccaggtcgtgggtggccaaggcattgccagccagcaccgcctgcacatagccgccgtgtaccagcttggcgaacgcatggcgggcgtcccagtcaaaacagcaggcggggcccagcacccaggtgatatggccgccatgctctttttcatagcgaagcagatcataaatggaatcataatccatggcataggccgtttcccgcgaacgtccctggcggaatgcgaaggattcctccccttggctttccggctgggtaaaggctgtggcgtgcacataaataccgttgctgccgtcttcgctgcggcccacggctaccaggtctccctttttcaaacggcgaaattcttttacctcgatcacgccgcggctgaggacggctacgcagtccatccggctttcccgggccagctgccacgaaccgttgatcttgaaatattcggggaaaatggtggtcgcatgataatcatccggcgcaacaccgttggcaggggcggggatccagcgtgcgttgggcatatccttataggcctgctgggaaaaatccggcgcggtatagacgggcattttaaaactcataggattctcctccatcacgatgcaaactttattgctactatatcacattttgtatcgaaacgggagaggcctattttacaaccggatggatggtaaacgagccggtcacggtcagaggctcagagcagcgaaactgcaaagagatattggaagcaaacggaaaataaaacgaaaaggaaccgttgcaggaaagcggcgcattttctatcgagctctgggaaaagttggcatacagcagctcagcggaggtggcaatatacgggatgatgcccataaatacgttggcaggcgccgagacacactgtatatcataggaaaacgtatacaaaaaagcgggctgtaagagtatgagggtatcgttgtcaggggaaagagaaatatcgtccccgcgaatctggtagacggaaaaggatagaaactcttcatgctcgtaggctctgggaatcacgttgaactgcgcaaaggatgtgggaatgtcggaagcgccagtagggccagttgcgccggtgggaccagtagggcctgttgcccccgtaacgcccgtaccggtagggccagttgcgccggtagcgccggtagcgcctgtcgcccctgtaacgcccgtaccagtggggccagttgcgccggtggaaccggtagcgcctgtcgcccccgtaatgccaacgccggtagggccagttgcgccggtagcgcctgtcgcccctgtaacgcccgtaccagtggggccagttgcgccggtagggcctgtcgcccccgtaacgcccgtaccagtggggcctgctgcgccggtggggccagtagggcctgtcgcccccgtaacgccaacgccggtggggccagttgcgccggtagcaccagctgggccagcaggacccgttgccccagtagggcctgggggaggacagcagcagggaggacatcctggagggtagcaaccgaaacgcatgggcatgctcctttcaaataaactgtgatatgctatgccaaaatagaagggaatgtgagaaattgccacattcttgcaagcggtggacaaaaactgacaaaccattgtgctatactgggccgagacagaaaggaaacgggaacaaacgatgacacatgagccgtatttgatagaagcgcccctggccgataccctcgtgctattgatccatggcatcacgggcagcccgcatcaatttgatgcattggcccggcatctgtatgccgagggcatttcggtgcagtccttgttgctgccggggcatggaagcacggccaaggcgtttgcacagtccggccgcctagagtgggagcggtcagtaaacagggcggtgcggcatgcgctgctgcggtataaaaacgtcgtgttggtaggccactctatgggatgcctgctggccatcaatgcataccatacgctgccggaaaaacacgccatccggggcctggtgctgctggcgccgccgctgcgtatacacctgacgagcgaatgcatccggaaaaacctaaaatccgcgataagccgacaggcggaggaggcggccggggaagcgtacaacagcgtagaaaagggcagagccttgggctatatgcgctggctgccgcgctatatggatgtgctgaaaatggcgagcaaggccaggcggcaaatagagggattgagggtgccggtacttgcggtgcattcccaaggagatgagattgtcagcataaaaagcgtacaggagctgcagcgcagactgcccgaaacacaggtgctgatgctgccccattctacgcattttctgtatacggaagaggatgcccagctgctcagagggcaggccgcggcctttattggccgatgcacagcgcaaacagacgcttgacaaccggcggccggtttgctatggtatagaaaaataagcttaaaaccgatgaagcagaagagtacgcaaagacagcgcatctgaagagagccgccggcggtggaatggcggtgttgggcgctttgccgaatgggctgccaagggcggtgcgaacggccggacggctgagtagcatgcgacgggcttttcccccgttaccaaggaaacacagctgccaggctgtgaatggagcggacgctatggcgtcaatttgggtggtaccgcagaagcaagaggcttttgtcccaagaggggcaagggctttttttatttgcgtggcacgatacaaaccgaggaaaaagaaaggagcaaaataccatgagcaaaattccgcacagattctttttgagcgaagaggagatgcccaaacagtggtacaatctgcgcgctgatatgaaacagctgcccgatcctatgctgaatccccaaacgctggagccggccaaggaagaggacttgtatcctgttttctgcaaggagctggccaagcaagagctggataatacgatccgctatgtggatattccggaagagatccaggaaatgtataagatctaccgcccgtcgccgttgatccgcgcctataacctggaaaaggcattggatacgccggccaagatctattataagtttgagggcaacaatacctccggcagccataagctgaacagcgccatcgcccaggcgtattatgccaaggagcagggcctgaaaagcctgaccaccgaaaccggagcgggccagtggggcacggcgctggcggaggcgtgttcgtattttggcatggatctaacggtgttcatggtcaagggctcctacgagcaaaagccgttccgcaaggccatcatgcagacgtttgatgccgaggtcatccccagccccagcagcaccaccgaaattggccgcaaaattttggcggaaaaaccaaataccaccggcagcctgggctgcgcgatttccgaggctgtggaaaaggcagtaacaagcgatagctgccgctatgtgctgggctcggtgctcaatcaggtggtattgcatcaatccatcatcggcctggaaagcaaaaaagcgatggagatgctgggcgaatacccggatatcatcatcggctgtgcaggcggcggctcgaatttggcagggctgatcgcgccgtttatgcaggataagctgctaggcaaggcgaacccgcgcatcatcgccgtggagccagcctcctgcccgtcgttaacgcgcggcagatatgcgtatgactactgcgataccggcaagattacgccgatggcgcgtatgtataccctgggcagcgggtttatcccctctgccagccatgcaggcgggctgagataccatggcatgagccccatcctttccaagctgtatcacgatgggtatatggaagcggtttccgtggagcaaaccaaggtatttgaggcggccgtctactttgccaagaaagagaccatcctgccggcgccggaatcctcccatgccatccgtgcggccattgacgaagcgctcaagtgcaaggaaagcggcgagcaaaagaccattttgtttggcctgacgggcaccggctattttgatatgacggcatatacctctttccatgaaggtacgatgaccgattatatccccacggatgaggaattgcagcgcggctttgacagcctgccggacattccgcagaaccggggctaagacagaatacgcatacaaaagggcctcctgaagggggctctttttgcaagaggggaaactttttctccccatattgactttttgttcccatacggcctacaatgagtccatgaagaagagtggactttatgaaaaaggggtgtgtggaacatgaaaaccaggacattgggacgctgcgggctgatggccagcgaagtggggctgggctgtgagcatttgcaggggctgccgtatgaacaggtcaaaagcgtgatcgacgcggccctggccggcggtgtcaacatcatggacgtgtttatgagcgagccggaggtgcgcagcaacatcggcaaggcgttaaagggccgccgggagcaggtgattttgcaagggcatatcggggcggcctggctcaacgggcagtatacccgcacgcgcaacatcgagcactgcaagacattttttgaggactttatgaagcgcttggataccgattatgtggatatcggcatgatccattttgttgataccgaagaggactataagggcgtgtttgaatcggaggtcatcgaatatgccaagcagctcaaggccgaaggaaagatcaaggccatcgggatgagctcgcacaaccctggcattgcggagcgcgctgtgaaaaccggaatcattgacgtgctgatgttcagcatcaacccggtctatgatctgatgccggagggcgtggtcatcgacgatctgacaaatatggaaacctaccaacagcgtgattggagcgggatccacccagaccgcgagcagctgtataaaacctgtgaatccatgggcgtaggcatcacggtgatgaagagcctggcggcgggcaatctgctgaaagcggaaacgtcgccctttggcatggcgctgacgccggtacagtgcatccagtatgtattgacgcgcccggccgtagccagcgccttggtgggctgcaagacaccggaggatgtgaaggccgcgctggcgtatgaaacggccagcgacgaggaaaaggactatacggaggtgctgagccatacgccgaagtattcgctcaagggcaagtgcatgtactgcaaccactgcctgccgtgcccatccaagatcgacattgcacaggtcaacaaatacctggatctggcgctgctggaggatacggtgccggataccgtcaaggcgcattacgacggcatggccacccatgcttcggactgcatcggctgcggcagctgcgagaagaactgcccgttctcggttgcggttatcgagcgcatgcagaaggccaaagaggtatttggtcaataaggcaataaaagaaaaaagggccttttgggccctttttcctttataatagaggaaagctggaaaaagagcttcctcataaaacagcggaaaggaagatggcaatgaagcgcgggcttggcaaagcctcttaaaatacaaaattttaggaggcaaaacaatgatttttcagaaaaaggatatggatacatgggacagggcagagatattctgccattttatcgacgagcttcgctgcgtgatgagcatgacggtggaactggacgtcacggcatttgtaaatgcgcttaaaaaaagaggttgttcattttatccttcgatgctgtgggtggtaagcgcggcggtaaaccagcgggaagaactgcgtatggggtacaatgcacagggcgaggcaggcacatggacatttgtttcgccgtattacgcgcattttcataaggaagacgagcgttttgtgaaactggttacagtttacagcccgtgcttcgagacgttttaccagcggttttgcgaggataaacgccgctttgccacgtacaggggatttgagcagacagagatcccacccaatacctttgatgtatcctgcctgccatggacgcattaccgcagctttgacatgcatgttttcgataagggcacttacctggcacccgtgattacctggggccggtacctagaaaaagaggggcggctgatgctgcctctgtcgttgaatctgcaccatgctgcaggggatggctaccatctctgccgatttttttccgatgtggagacatggatgcaggctttgagctaaaagaaaaacaacgcccggagaaacgggcgttgtttgttttatggattccgttacatcgcctgatggaaggtacggctgatgacctcttcctgctgttcgcgggttaggcggttgaagttgactgcatagccggaaacacggatggtcagcgtgggatacttatcgggatggtccatcgcgtcgatgagggtttcgcggttcaaaacgttgacgttcagatgatgcgcgccttgcacaaagtagccgtccaggatggcaacgaggttgttttcccgctgcgcttcatccttacccaacgcctgcggcacgatggagaaggtgttggaaacgccgtcctggcacacatcgcggtaaggaattttggccacggaattcagcgaagccagcgcgccgtggatatcgcggccgtgcatcgggttggcacccggcgccagcggctcgccggccttgcggccatccggcgtggtgccggtctttttgccatacatcacgttgctggtgatggtcagcgcggacagagtatggatggcgtcacggtacagcggatgctttttcaattcctccgagaacttggttacgacctgcacggccagatcgtccacccggtcgtcgtcgttgccgtatttggggaaatcgcccacggtctcaaaatccaccgccacgccgttttcatcgcggatcggctttaccttagcatacttgatggcggacagggaatccaccgctacggacaggccggcgatgccaaaggcggtcaggcgctctacatcggtatcgtgcagcgccatctggctggcctcgtaggcgtatttatcgtgcatataatggatgatattgacggtgtccacatacagctccgctacatattccagcaccttgtaatagtttttcagcaccttgttgaaatccagcacatcgtcggtgatgggctcaatgcccggcaccacaagatcgcccttcttttcgtctatgccgccgttgatggcatataagagggacttggccaaattgcagcgtgcaccaaagaactgcatctgcttaccgaccttcattgcagagacgcagcaggcaatggcgtaatcatcgccgtaaatcgggcgcatgacgtcgtcgttttcatactggatggaatcggtggcaatggagatcttcgcgcagtattgcttgaacgcctccggcagatgctcgctccacaagacggtaagattgggctctggcgcggtgccgaggttgatgagggtatgcagatagcggaaggagtttttcgtaacaagcgatttgccgttgatgccgatgccgccgatggattcggtgacccaggtggggtcgccgccaaacagctcgttgtactccggcgtgcgcagatggcgcaccaggcgcagcttgatgatgaattggtcgaccaattcctgcgcttctgcttcggtgataagcccattgtccaaatcacgctgtatatagatatcaaggaatgttgaagtgcggccgaggctggtagcagcgccgttgttttccttgatgccggccaggtacgcaaagtatacggcctggaacgcctcccgcgcattgccggcgggctgggaaagatccacgccgtatttcagagccatggacttgatctcgcccagggcacggatctgcatggaaacctcttcgcgggcgcggatacggtcttctgtcatcgggccgtccagcgcatccagatcctttttcttttccgctacaagccgatccagcccatacagcgccacacggcggtagtcgccgatgatgcggccgcggccgtaagcatccggcaggccggtcaaaagcccggcgtggcgcgctacgcgggtgcgcttggggtaggcgtcaaacacgccttcgttgtgcgttttgcggtattcggaaaaatgcgcttcgatggtggggtccagctgataaccgtattgctccagcgagctctttgccatgcgcatgccgccgtagagattgacgatgcgcttgagcggcgcgtcggtttgcaagccgacaacgacctcgttttccttgtcgatatagccgggggcaaagttgtcgatgccggagatgatcttggtttcgacatccagcacgccgccgtttttcatttcttggcgcaaaaggtcttcgcacttgccccataccttttttgtcttttcggtgggcggctgcaaaaacgaatcgtcgccggtgtactgggtatagttcttctggataaagttgcggacattgatttcatcctgccaaacgccaggtgcaaatcctttccattgttccatgagattacctcctttacgttgagggaaattgggggaaaaattcttcctgcagctgcgcggccttctcctgatccattgccggaacgccggaaagggaatagggcagctgcatggtctcgtatttgtgtacgcccagcagatgatagggcaaaagctctaccctttgcacatgctgcaaagaatccacaaagcgctttagctgggccaggtgtgcgcggccgtccgtgagccccggcaccaggacatggcgaacccaaagcggaacaccaaggcgctgggcttcgcccagaaaagcctgggtttggtccataggctggcccgtcatatccagatagccgctctctgtgacgtgcttgacatcgtagaggatcaggtcggtatggcgcaggatctcagtatagtctcccaaacctacgcctgccgtatccagacaggtgtggatgtgctcctgttttaacagccgcagcatttccaacaggaactccggctgcaaaagcggctcgccgccggaaaaggtgaccccgccgccgctgcgtgcaaaatagggcttaaaacggcggatcttttgcatcagcgcttccggcgtcatctgttcgccgcaggatagctgccaggtatccgggttatggcaaaaccggcacctgagccggcacccctgcaaaaagacgacggtacggatgccggggccgtctaccaagcccatggattcgatggaatgaacagcgcctttcatagccagcctcctttttgcggggaaatagaaaaagccacacccctaggcatagtgtgcccagacggtcggcccctacaagatcatactccatgtggtgtactccacaaactccgtcagtcatacgatctatgtttaacatacacaatcgataagagcttgtcaagcgaaaaaaagaaaaagttttttgctttttagtaggttgtaggctcatgttgcgagaggggggaagccgccctccaaaatggcgcgctgtgctttagagcaagccgcgcgtttgcagcgctgcccgcaaatcggcgccatagggcagacacagcccatgcaggccggccgcctcagcggcttggatattggcgggcatgtcgtcgatgaaaagggaatcgcccgcatgtagctgataacgctgcaaaagcagccggtaaattttcgggtctggctttgtgcagtgctcgtagcaggaaatgacgcggccatcgaacaggcggaaaaaatcatagcgggcaagcacggtttcccaggcttctttatggaaattggataggagatacagcgcatacccgctgcgctttaattcttgtgcgatggcaacattctgctctagcggggtcagcatgtgtgtccagttctccaaaacgaaagcgatttcatcccggcagcggggatgcttgtttgccaaggcaaggatggcgtcgtttgtcatcatggtacccatatccaaggccacccattccgcactaccaaagaccatggccatcaagtcgtccacaacggagggagcgaagtgtttttgcaaaaaggcttgtggctgaaaggccagaaggacgtttccgatgtcgaaaatgatatgtttcatggcagctctcccttttttcagaactaagacctactataaatgcttttatagagcaaggcaaacaaaaaaggccgcggctgtgccgcgacccttggtgtacggaaaaaatcaatccaatttatccaatgcgatgctgtattggctttcggaggcgatcttgtgctcggccttgttcatatactgctttacgctggccgaagccttggcgatgggctgcagggtgcctgcgccggctacgcagccgccggggcatcccatgccttccagcagataaccgtcgtatttgccggccttggccagcataagcatccgcttgcagtcgtgcaggccctgggcggattgaaccttgacctcgcggtccggatcgatctgcttgatgcagtccgccacggcctgggcaacgccgccgcccacggcaaacccgcggcccgctgcggtggagtcggtaaacggctcgccaggctctacctcggcaaagttgatgcccttggcctggaacatgcccatcaattcttcaaaggtcagcacgaagtctacatcgcttcggatggtgcgccggctggcctccagctttttggcagcgcacgggccgatgaaggccacgcggcagtttttatgctcttttttcatcaggcgggccgtcagcaccatgggcgtcagcgccatggagatgtacggggccagggtggggaagagctttttggccatcacagaccaggaggggcagcaggaagttgccataaagggctgtttttccggcaccttctccataaagtcgtgggcttcttctatggtacacaggtctgcgccgatggccacttccaccacatcgtcaaagccgagcatcttcatggcgggctttaccttttccggcgtcaattcggggccgaattggttgacaaacgccggcgctacgatggcaatgacgcggtctccgcggttgatggaatggataagctggaagatctggcctttgtccgcaatggcgccaaagggacagtttaccaggcacatgccacaggatacgcacttgtcgtaatcgatcttggcacagccgttttcatccgagccgatggcgtccatgccgcaggctttggcgcagggccgctccattttcaaaatggcgccgtaggggcacacatccttacagcggccgcatttgatgcatttttcctggtcgattacggatttgccgttgaccaggctgatcgcctttttcgggcagacctccacacagggatgcgccaggcagccctggcacatatccgaaacgtggaaggatttttccggacatttgttgcacgcaaacttgatgatattcaccagcggcggatcatagtatttgtccgcaatggcgctttctacgatgccgtcggaaacgggggcatgctcgtccagcgggcggaggggcaggccgatggccagacgcagcctttcgccgacgatggcgcgttccaaaaagatgctctcgcggtgcatggcaacctcgccgggcacgattttgtacggcagttcttctatgcggctataatcgcctccttcgtaggccaaacgcgctacttcggtaaagacttttcgacgtatatccgtcacggaagaatagattcctctcatggcaatgctccttacatatatatttagaatcgttactttcgcgcctattgtagcattgactttgtgcttttacaatcaaagtttgttaaaaagttatcaaaacgtgaaaaattttttgaaaaatgtcctaaatgagacacgtagatgggtgtaaggcacaggaatttagggaacaatgggagcaaaggaggcggattgcctatgaggattcctaagcatattggcatcattccggatggaaaccggcgctgggccgtgcagcacgggctgcaaaagcaggaaggatacagctacgggctggcgccgggcttggcgctgtttcggcaggcggcggcatacggcattgaggagatcagctattacggctttacggtggaaaactgcaaacggcccaaaacgcagcagcaagcgtttcaaaaggcatgcgtagatgcggtggagatgctcaaaggagaggcggccggcctgcgggtggtgggcaatacgcaatcggattgctttcccaaagcgctgctgccgtatacagagcgtacataccttggccacggcagcggcacgcgagtcaattttttggtgaattacggctgggaatgggatctattcgacggcacaaaggacaagcgcgcctggcattccagggatgtttcacgcatagatcttgtcatccgctggggcggcatgcggcggctttccggctttttgccggtccaatgcgtgtatgcggatttttatgtggtggatgcgctatggccggattttgccccacagcatctggaagaggccctggcctggtacgatcggcaggatgtgaccctgggcggataattttacattgaaaacagcacgtaggtgtgatacggtaacggtatagaaaccatcaagacgcatgagggagccttatgcgcctttgttatggtagagggagttttgttgggggcggttttatgcaagaaagagagcggttcagctcgcggctgggatttatcctgatttcggcaggctgcgccatcgggctgggcaacgtatggcggtttccctatattgtagggcaaaacggcggcgcggcgtttattttgatctacctgttttttctggtgatccttggcattcccatcatgacgatggagttttccgtaggccgggccagccggaagagcgtggccagctcatttaaggcgctggagccgccgggcacaaagtggcattggtatagctattttggcatggcgggcaactatcttttgatgatgttttatacggtgatctccggctggatcctagcgtatatcttcaagatgatccgcggggattttgccgggatgacggctgagggcgtcaaggcgcagtttgacgggctggtggcggatccctgggtgcaggtgctgtgcctggcgatcgtcattctgctgggctttggcatctgctcgctggggctgaaaaacggggtagagcgcatcaccaaaaagatgatggtgctgctcattgtgctgatggtggtgctggcggtgcgctccattacgctggaaggggccggcgaagggcttcgctattatctggtgccggattttagcaagatcgcagagcgcggcatcggcacggtgctgtttgaggccatggggcaggcgtttttcacgctttccatcggcatgggcagcatggccatctttggcagctatatggataaggaccggaagatactgggcgaatccatcagcattacggcgctggatacctttgtggcggtgatggcaggcctcattatcctgccggcctgctctgctaccggcgtgccgatggattccggcccgtcgctgatctttgtgacgctgccaaatatctttaacgccatgccgctgggccaggtatggggtgcgttgttctttgtgtttatgctgtttgccgcgcagagcacgctggtcgcggtgtttgaaaatatcatctcctttgccatggatctttggggctggagccggaaaaaggcatgcctggtaaatatcgggctgatcttcctgctttcgctgccggcgcttttgggcggc

SEQ ID NO: 4378 - DNA, 32759 bp, Unknown
  16S sequences of unknown bacteria
gggaaagccggactggctgtccggctttcctgtccaaatttattgtaataggagtgatgttttatgaagaagaccgctatgctacttaccttggctatactgctatgtatttgcagttgcttatctgcacgtgctttagaggatacacgcaccagtcaactacttgtgggttccgtactaggagacgaatctgaaaagtgctatttctatagcgcaccagaggaatcgaaggcggagattgctggcttctattaccccggtgcgcaagtctacattttagagtatggtccagaatggtgtcaggtttttctatctacggaaggatatatgaaaacgtcgcatctgaacatatctaacgcaacagacaagatcaagtctattggttttgcctttgtttccttcgaagcaagcgatccttttgtagatccaaatggttttattgaattgctaggtgattgtgatcttgacaaacctggagatgtaattagcaatgggatggctttaaagcttattggtaatgcgggagagttcttacaagtacagtacggtaattacgatggtttcattttgagcagacatgcatccgtcctaacatatgagagtatgcttctacttaatgaagagccacgtattcttgcggctggagactacacagttggagaagatttgccttctggattgtggcgtatttccgcgcagcaaggaaatggcgcgatagtcaaaatactaagttccaggggaaatttcatagagcatagaattagtggcaaacaaaatgcgtcttattctgtgctgctgcctatgcaaatgtccatttcattgtctgaccaatgtctcttcactcccatttcctctattaatgtgactaatgtgacgaattttatttcttcaaatggtcgtcagatttgcggaatagattttataggagctcctgatgtcacatacaaaatcatcgcagacgatgttagtgatgcctactacattgtttctacgctcatgcaagatatttcgctagatatcggagaacgccatatgcttcaagcgaaggatgaaatcatcatccgcctaaatgatggatatgtacttgatctgcacaactgcagcttgattgatacgacagtgactagcgaaattgttgatgacaatgctccgcagaagtagtaagatatagccttgaggcaatagtttcctttgacgaaagtgagatgatggcttgcgctatgctcggaatccgcaatatgtacgagcagcgccacctgaccgccgcagcccaaaacatgaaacgcattgccaaggcgttttggcttatatatttgttgttgctatatttgcattatcagcgcaaagggcatgtcttcggttgaaaacatgccctttgtcggcgggctggggagctgtctcaaaatgcatgttgatgcatgcttcccctttaggggaactgtcagccgaaggctaactgagggggggaggccacacaagcaacgggcaaacccctccaccccttcgagacacctcctctttaggggaggcaagggtgatatgcaatcatttatgcattctgaggcagtccctttgtactaaaataggattaccctcgcctaacggatgcgctacgccatgatgatggattcgcccatgagtatcatgagtgtcagtaaatcgattaccagttacaagtgctatctttcgccgtccattagccaccactccgccagcatttccttcaatggctgtgtacgtgttgcccgaagcgccaacaacataaccggtatcggcttattctttgggcataagagaagcgacaacagaggctatttcatcaagacggcaagaagtagtaagtgagcagacggtcattccgtcgatccaagcatatcgtgttttctccatatttgaggtcatatatacccgtaaaccgtcaatctctacccactcaccgtcagcgttctgctccagcgccagattagcagcctccacgctgaaatagtgatcccaaaggaatagcagcgtagcatctggatcaccttcatttatataggaaacattcaagatcagttcatcgtcgaaacgggtcgcatggtattgcttgacgctccatccctccggcaaccgagtcggaaccgtgggttccataccgaggaaagccacagcagcatcccagtcggttgttgttaagacaccagcggcatcttcgcccgaagcattgccatcctctacaaggccggggtctatcacctgtccttgaatcgcatactgctgctcgtcatcagaagaatgaccgaatagccattcccggttcagtatgccatcgcccactacgaccaaaacaaggattgccgctgcaactgcaactgctcgcagtcccatgcggatggctgcggcacgatgccgcgcccgagccagtcggcgcatcaagatagccttgctttctttgtgtttgtcttcaaatgcaatccggccatgcgtgttgatttgccatagcagctcttcacaggccgtgaccaattccatgtcagcggattcatcctgtttctctatctcagactgtatcattgcttcgagccgctgtactgcctcagtctgcgagatgttcccatattcgatcagattcagcacctgtcggataacgttccctttctgctcgctcatcattttcacttccttcacttcatataccgcatgaacaaatcaaaagtatattgccctataaaaagaatcaccgctaagtggaagtgccgccctttggctcgaattctgtccagtgcgccccgtgctgaagtgctcgtgatctcggcctgctgtgctgtatccttcagcgactgtcccttttcatagtatacgtggaacaccttctgctccagtggcgtcagctctgctatgaattccgcgatggtatcgcgctgctctgtcctggtgatccaagccagcacgttatccatcaggtctggcacgtcgccgtatgcttcaaggcttaccggcttaccaataatcgcttcccttcgcctgccttgcctgatgtgcgacagcatatagtgcaaacaacaggtggcaagccatccatattgattcttgctggaagtaaagtcctttgaattgcggatggcgcgatagaaagcctcctgcacacagtcatccgctattgcagtgtaacggggattatatgaaaccagccgtatgcaatagcgtttgagcgttgcataatacttgatatacatttcttcaatgttttgcggatcgatattcgtttctctcattgctataatccgcctttctgcgaaaggcaccgacggggttgtaaaacgcaccggggggcgactttcaaacttgttcctctcttttggtgctctgttggcgcaacaaatcgctggctggagaattcagtcactaccgcttacgctctatgaaattacagaccaactgtgctatggcattcaacagaaaggcagtttcgtctgaacatttgctgctcagaaggatcagctgagtcttcgcctcacagagttctgtgggatgttccatttcaaaggcgagaaactcatcgttgcaatcatccaaagcgcagcccggcttcaacttgaggaggcggcagatctgcacaatcctatacagattgagcttctgtgcgccgcgctccatattactataggtcttggtcgagaccccaatcagctctgccacgtccttttgcttcaaatgcagctgctgacgcgctgcgcgaaaatgacgacctatgcgcctgtaatccacttcaacatccatatatatatcctccttgtgccgatcagataatcacttcatagcattgattgtcagctatagcgttgacttcactctgattttactttgcgacgcagtgaaaataaacgccgctataacatggtgtggatgctatgaggatgattattcgcggttttatacaaatttatttgaaggtagtggaatggacagctttcgagcactataggaagtgaagaggaacgtatattcttgtcgcagcttctccaaggagacggttgccaatgaatgcgtcaaaattgcacgaaaaatgtatggacagcaccgtttcttacactccctctgtttgttgatttgaattatgatagccttgctgatacgattgtgcctcttgctgatagtgttttcgacgcgacgaaagtggaactttcctcctcgggcagagtgaagctctattgtgtgacatatgaaaatatggcaacaatcaaagtgactgcttgttggcttgaaaaagaggttggaggggaatgggaatttgattgttctctcactcctccggctgaggaaagccacaacacaaatggatacgccgcatcttttaattgcctgtcttcaatcggaagcggaacgtaccgccttgctgcaacattcaatgctgatggttatgagataacacgtcgttcaataggtgtgtcgttctaagaaaaaaaactaaaaagtagccaaaagcctcctacattgcaattgctttgtgggaggctgattttattatattacgacagataatgcttcatcaccacaaataatgaagctgaaactattacataacaaaaataacaacgtagaagtgtcccaatatcttggctctttttttaatgagcaacagtaattgcacttaaaactgcacaagccagtagtcctatggcgatcgtctggactatacgtatatcttctcatattgggaacaagcagaaaagacttctcgtgatccccgttcttccttctttggccaatacgttagacaaaactataaagttaagcgtcaatttcgcctctgatcattgaaaagaatgcgcattggagggcggggagtataatatggttcaatagtgatgctacattgcagtgttcgtttttgcacgaaatatgtgcacattgtgttaatgtttgcactccctttaattggcattttgctctacactaaagatggcaaaaggaaatggtggccaccagaaacctgatgcacaaaatataaaatgaaagaaggaaatctgtactatggctactaatctgattgcgaatggcaattttagtgatggagatttacactggacaaaaggctattggtatgctggaaacaccgtaacatggcacagtagcggtggccaggagggtggctgcatggaactatctgttccatctgtaggcgaccccggtcaaagctccattgcgcagaatgtccttctcaagggggggactacctatacgcttaccttctatgcaaagcgcacgggaaacgttgatgtatgggtggaagtatatacgccttctggcacgctctttagcccttcctttatccctaatcttacatcaggtggaacatataccaagctctcgtatacatttactgcggggggtactactgggcagagtgtcaatacaggtattcggctcattgctggttccgctggtggtacggcgtggttcgacacggttgagatcttaggcgatagggaatttatgtccaaccactatgttgaaaccgttggtaatgcacgcatatacaaaacgcctgatcccaccagcgacgacaactacggtgcattcccggatggcgcaaagtttatctatgatgggattgtagatggaatggttgccgttgtctttggtaatacgtatgggatggcaatcagtgcgttcatccccatggaaaaatgccagcctagtgatgacctggtcgaaaataatgtcgtcgacaggatggtgaccattgccaactcactggtaggcacgtatggggcaaatctggggttggctggcgactattgcgaatcgtttgtacattggttggctggtgcgacggctttgagtcacaacgtctattgtgatagtgacacatgcggagatgctgtacagtattatacggaaaatgaaatctatgatttgcgtactgatccttctggattcgccatgcagcctggcgatatcgcatactatgatgttcagaactatggaacagatcaagttactgctgggcatacagggtttgttgtaggcatttctggtaataactatattgctgttgaaggaaatgctggtgaaacagcgcctaatggccaacagagagttgcagtagtaattggggatcgctctactggcaccaacactactcatggtcgtatacttcacggcgtaggacgtccttttggcagaggatgaataaacaaaatagcgattaccttcggaagtcaaaaaactccatagaggcgtcgaaggggctgcggccccttcgactttcatttgataagccggctctgcgggtagagggataacttttcttttgaaagtcaagtcgcatttacggccgttgtttttcatgaagaacagtatcttgctgggttgttgattttgtttgcaaaatcaattctttacaaatactgaaaaaagatataccgtttgtctgtccagctatgatagatttggtcattgaagcctgctggacatgtcagggacgaatgctttggtctggctgacagttaccaatcccatataattttataagtatcatcctgctcgcccaaactgtgcgttttgtcaaactcatcaagatattccaatgcatcctcgcattctctttggataatcgttatgtcgaagccctccaaattcaaattgtcgccgataggccattcaatttggggaaaagcagtttcataaacaagcatataatcctcactgtcggatatgtaaaaattgaaatcaatgtcttcttcacaaacatcagtatatccaccatgagcatcgatatatccactgtgaacgatccatgtaccatcacctgcatccgaagcgagcagatagtaattgatatagttcccaatgtaataccaaaaatagggccttccatcatcccacttatccatcatcacaacccttcccgaacagtacgtttcataagaaagtaccggtttgctttgcgcaatgagttggtaggcgccgtcctccatttgcgttgcaacagcaagccacatcacgttttcgtttcccagcagcagaaatgcttgttcctcggaatctgcaacccatgttccagcatagatcgcagtgtcctcatccagggagggtatggatagcgcatctttggaaaaaggctcggccgcttcagcggcaaggacctgaggaaagctcaagatcagcacaagcaagaaaacaaaccattttgttaagcgtgtcacaagatcatctccttcttgattcatagcatggatccttctattcttccctactgatgacagcctgctggaaatactgtatttggccatgatggacatcacgaaaaagtggagcggacgacaacaggacttgaatctaatccacgcaaagttggacatctactttgccgagcgcatgcccgaataacaccactgtggccggatatcaatggcaagatgaacggcttcaccgtccttgatatccatcccccggctgcgttatgatgcaaacaagtcagcaaacggattcaccctgtgccgccctgttatcacttcgctctattctctccctaacggtgtttacacagaatttgggattggccctatatcccatttaatcctataagtatcatcctgctcgcccaaactgtgcgttttgtcaaactccttaagatattccaatgcagccagacattctttttggatgatcgataggtcgaagccctccaacttcaaattgtcgccgataggccattcgatttggggaaaagctgtttcataaacaagcatataatcctcaccgtagggtatagaagcctctctgtaggctccggaatcttcacagctggacgcataaaaattgaaatcaatgttttcttcataaaaatcgacatttccaccgtgaacgatccatgtaccatcacctgcaactgaagcactcagatagagatttatttcgtgcgcaagggaataccgaaaataagggcttccattatcccacctatccgtcatctcaacgcttcccgaacagtacgtttcataagaaagtaccggtttgctttgcgcaatgagttggtaggcgccgtcctccatttgcgttgcaacagcaagccacatcacgttttcgtttcccagcagcagaaatgcttgttcctcggaatctgcaacccatgttccagcatagatcgcagtgtcctcatccagggagggtatggatagcgcatctttggaaaaaggctcagccgcttcagcggcaatgaccgaatgaaagctcaagatcagcacaagcaagaaagcaaacaattttgttaagcgtgtcacaagatcatctccttctcgatccatggcattggttcttctacagcgcattttttgtgtttccaagcacagcatgaaaattaccaaaatatccgtcaatagcgctgtcgaagctgcgcgggataacacctcacatatacatacgaaaaattcccattttttcttgccagcaatttggaatatttctttctgtaccaaccaaccctccgccgctttatgcaaatttagcgaagggtgctgttctttaagcatagattcacattttcaagaacaaattgcatgaactaaagtacgatcttaccgctctgttgaatcagacgtaagatcgtgctattttatcgacgtatattagcttccggcaagcaaaagaaggtttgtttagacatggtatcattttttccgttggatgataaataccgccttcctgccttccattttccgctccagtaacccttcctcacaaagcagcagaagatcctgccgtgccgtctccgtggccgtcctgaacttcttcttccaggcgtccactgtaacctgtgccgtcttgccttccagcaaccaccgagcccctttcagctgacgttcgttgaggcgtccggttgcttgaagggcatgcatacgtttttctgtcagtacgtgaccgagcaagtgctccttcattctttccacgctccgcgatagcatggcagaataataatcaatgaagtagctcatatcgttgccggacgtttcaacctgacgcatggctttatagtaccggccacgttcttttgcaatcagtcccgaaatggagaagtaccggaagaaatcatatgatcaatggctgggagaaaatgccgggatctcccaacgcgatatcttgcgcatgacgattgatgccgcgctgcgaatgcggccggatggatttgatgcgctgatgcagttcttggaagaagcaggatgccggattaagcgggcggcgcaaatcagcataagaccacccggagggaaacgcttcatccgactggatacattgggacctgagtacacagaagcaacgcttgaagcatcgctttccggccagcgggttcacattccaaaacgttccagaacccaatacacgcgaaagcagattgagcttctgatcgacattgaagccaagctgcgtaccgggaaaggaaaaagatacgagcgctgggccgaaaaacacaatatcgacacgctggccagctccatgatctatctgaaagagaatcacattggttcctacgctgaccttacgcaaaagatacagcttgcgctggacagccggaatggcctgaaagatcagatccgggaggcgcaaagacggatgcaggagatcagcgctcaaagaaaagcgattctggtttacaggcaaacccgggatgtttacacgaaatacaaggaatccggctggtcacctgcattttatcgggagaacaaagaagccattgaagcgcacaaacaggcgcaggccgtatatagcgcagcggacgggaagctgcctacactctcggagttatcgcaggaatatgaccacctgctcgttcaaaaacgagagactggtaagctgttggcccagcgaaacgaggaattgcagagtttgcgccatatcaaaaagaacttggatacgctgcttgccgatgagcattttgcgttggaaaagcctttcaaaaacgagaaaaaaactcgtgaacacgaccagaacccggaaaagactggccgataaagagcagccctatacctatctatgtccgttgaggcagatcggtatagggctttttttcgttttggaacgtcaaaccaggcggaggatgtcgcagagagacttcacaaccgcagagcttgctctgcattacaggggattgggggctgggccaccaacaagcaaagtgcaaaaagtaaaacgtttgcccagcttgccagtctccgagctgggcatttttctattacaccccaaattatccattttgagacttacacggaaggaatacgcaatagcaaagtcgaaaattataaaaattgctccttttgtgctacacccaagaaatctttcatatttaagacttgcacgcaagaaatgcacaatggacttcgtcaattaagtaggattaagtattcggtatataagcttataccatccgcttaactgtatgagaaaattatggaggtgctctaaatgtttaattagaaataactactatgatccaaatagaagctacataataacagtattgttgtggttatcaaacaggacatgatggtgattcaccggttcgacatcaagatggaatgacgattgccagagcactcaacaggaggagcctatgaaacacagattcattctttgccttatcgccctgatcttgtgttgcgcttgctgtttgcccgcatctgccgagtatgacaccccggacgcatggaatctgacctttgaaaccgatgacgtcattgccgccgccaaagaggtctgcctcatttacggcggactgggcatctgggaaaaggggcaagtgcagacagttggctgcgtcgtgctggagcagaacgagtcggatgataagatcgaattggcgctctatactgcacgaagcgtatttgactgttcttccggatcgcccgagcgcatagctggaggactcaaaccggtcaagctcatctttgaaaaggaagataacgggttgcgcctgctttcttaccagaagccagaagatggagctgagaatgcagccagccgggaaagaatcttcgggaaagctctgcatttggacattgccaagcgccaatctgaatatacagaattggcattgcaagatgccgccgaggatgcggacgactatatgacgtatcttcagaccaacaaaaagacgcgcgtgtggtatgaatttcttccttctggcacgcaacccaaagcgcggcaaatcattctttcagctatttcggctggctacccaagctattctggtgtatccgcagaatacagacccggtcgattgtacaccctgtcggttgatggagagcagagctattctggcattctgaccttttgctgttttgatacggctggaaattcgcttgaatcctttaccgtccaggtgatcgatggaaaactacatgtgcttgacggtgtactgccggaacttgtatatgaataacgcagggacagagcattttctgctctgtccccatttctatttaaccaaacacggctgcatatagcgcctgcttggtggcattaccaaccaggccgtccaccgcaagaccattagtatttctctgaaatgcctttacagcactagttgtgctactgccaaagtagccatctgcacctgcagagccgcaactgtagccaatggagatcagatcctcctgcagatttttcacatatgcgttatagctgttactgggcctcaacgtggcagttccgtagcgactctgccagtcggaaggggtcgtggaggaatcacccgtcagaatctcaccggtaaaatggcacaggatcgtgtcatccaagctcgtgttccaaagctcgtcatccttgggctcactatgagcgtacacgtaaatagaagaaccagaaactcggctgaccaccgcaacatggccagcggttcgatcgctcttgttggtgccatcgtcgttcagagcgaacacaagatcacccttctcaagctcaccaacctcactgttggaaaggaacgagtagggcattcgaggataaccgacctcattgtacttgacaaacaggcgcaggctctgagctcccgtccagctggaacttctattgccggagccatagtaataccagacatcatagccacctgacgtgtgggcagtgtctttcatggggacgccgccgccttcgtgcatgcactgagagacgaaattggcgcagtcggtattgccaccggtaccgtcatagaagggataatcggggttgtgggaattgcaccacgtttgggcgtattcgatgacgccgtcgcgatcataagttgccattatatagttctcctttcgattttatggcatccagtatgctggccagcctttccttctgccatctttagtgtaaagcaagaggctaattaaagggagtgcaaatattaacacaatgtgcatatatttcgtgcaaaaacggacactgcaaggcgacaatgctatatactatctactctgatgcctggccctttcgatgagtgtggaagggcggttattgctgatgcttgttcaaacgaagcgttagatgtgagaaattgatgcttactttgtaagctctcagaatgaatgcttcctagctataggaattaaaaaattcgcaacttgtgtaaagctcttgtgatttctactgatgctattatgcaaactggacggcagccagatgaatctgctgccgtcctgctataacttcgctctattcacatccaaacggagtttgtaggattcgggcttgatctgcaataacctactattccccaaatgaagagataattgcttcaatctctttttcatcacatgttgtagtcagcgagtaaacagacttaccctcaatccagacaaatcggttcttctccatatttgaactcctatatatacggatgccatttatctccatcaattcgccttctttattttgttccagcgctaggttggccacctctacgctgaagtaatgatcccagagaaatatcattgtcgcagtcggattgtcttcatttatataagatatatttagaatcagttcatcgtcaaatcggactgcatggtattgatcggcgcgccaaccttccggcagatagcctgggagtatcggctccattccgaggaaatctacaacgtcctcccagtctgttgtggtcagactatccacagtggtatcatcgtctgtcgcggcaccttcccccacaaggccgggatctagaatctttccttgaatagcatactgctgttcatcatccgtagagcttccagatagccactcccgatttagtattccatcccccacaactatcagaatcaaaatcgcagcagctactgctgcgatacgcattcccacacgccgagcagtagtcagacactgatgccgctctaaccgtcgcatcaatgccgcctggttttcttttcgcttatcttcaaacttcaaccttccttgcgtaccgatttgccagagcaattcctcgcaagcttttaccaattccatgttggcagctctgtctttctgatctatttcggattgcaatagcgcttcaagccggcatacggcttcgttttgcgatatgcttccatattcgatcaactccagtatctgtataatactggcttttttttgatccttcattattgaccacttccttcactacacatagtgcttgaacgagctcaaaatacattgtccaataaaaaagagcagcatcggatgaaaatggcgcccctttgctcggattctatctagcgctcctcgtacagaagtggtagaaagttttgtatgctgggctgtctcttttaaggataaccctttttcataatatgcacggaatactttgtgttctagcggcgataattccgccatgaattcttcaaccgtttcctgatattctgtatgagcaatccaagccaatatattatccattagatccggaacatccccatatgcttccaaactcacggttttacgataattgcttcgcgctttttggattgccgtatgtgagacagcatataatgtgaacaacaagtagccagccatccgtactggttcggactggattcaaaatcttccgcattgcaaactgcacgatagaaagcctcctgaacgcagtcctcggcaatatctgaataacgagaattataagagaccagttttatgcagtagcgcttaagcgccgtgtagtattttacgtacatttcttcaatgctttttgaatccatccattaacattcctcactcttatatagccttaggtgcattggtgtacttgctgcagaagatgaattgttggagaatatactatctttggccttttgattccaaaaccgaataaagcaattggtcaatggtattgagcagttgtgcggtttcgtctgaacatttacggctcaaaagcataagctgtatcttggcatcacaaaccgtttcgggaagtgtttccaatgcgagcaggtcatcactacagtcatccaatacatagcctggttttagtttaagtaataggcagagttgaataatcctgtacaggcttagctcctgtgcccctcgttccatgttactataggtcttgaccgaaacaccaagtaattcggcaatatccttctgttttaagttctgttgctgacgtgcggcgcgaaaatggcgacctatacgacgataatttattttcaaaggcttatccgctcctctttaatagtgtgccggttccttctataacattgattactatcgatagcattgacttcgtttcaattttactttgtgccttacgaaaaataaacgccgctataacatggcgtggatgctatcggattgattatttgaagttttttggattctattcaaaatacggtgtaaaagtcagtcctcaaacactattttaattgaaaagggccatgcatttctgatgatgcgtcgagacggcggttgccaatgaatgcgtcaaaattgcacgaaaaacgtatggacagcgcagtttgttgcactccctctgtttgctgacttgaattatgatatgggaggagtaagaagacagccgttcttgcttagatatgccagagaaaggagactattacagcgatggacgccagcttgcagaatattatcgaaattgcactccagcaaggaatttgagctggcttgtacatttatctgttctttcggatgctgaaacagaatgaagaacgagaagcacagtatcaggctaccattgataagctcagcggcaatattcaagacggcatcgtgagcatccaaaaccgactggaaaacttggaggagaagttgtctaatcagttcgagaaaaccgagaaataaaaggacacctttccccttgccgttcatgtcgcactaagcactgcgctgcggaagaagaggagggcgactaatgtatacacaagaagacgttagaaagctctttaagcaacgtggtgaaatagaaatggagttaagagtgcgccaagcacaatattatggcagggaagcagaaacccctccggagatactggcgagaatatcggcgttacaacgtgaactaatgacgattgaagggctctttgcggcgctgtctgaaaatgaagcctttgtgatccggcaccatctgatagaagagctggattggccgcagaccatgacattatttacgcagaaatggggaatggaagctgaaaagtcgcttcggtccatgaaggcgttgcaagaaaagggcttgagaaagattgctcgtctgcttaataccaggattggcagcaattgtctcagcgaagaaaataaattattttgaaaatttcatttggcacaatgtatttatttttcttcacgcactatagattgtgaaggaggaaaagtgattgctagcagtaatcgtacgccgcaataacgccaaaagaacgttcatcaattaagaaagtaaggtgattaagaaaaaacattatttaggtatcccaatctttgttccgtaaacacatcggagcttgaaaggagaaataatatgaatattttgaagaaatttgttgtaggatttgtagcattgatagttcttatggctgggattagttgtagccttgctgatacgattgtgcctcttgctgatagtgttttcgacgcgacgaaagtggaactttcctcctcgggcagagtgaagctctattgtgtgacatatgaaaatatggcaacaatcaaagtgactgcttgttggcttgaaaaagaggttggaggggaatgggaatttgattgttctctcactcctccggctgaggaaagccacaacacaaatggatacgccgcatcttttaattgcgcatcttcaattggaagcggaacgtaccgccttgccgcaacattcaatgctgatggttatgaaataactcgctattcagcaggtgtatcgttctaagtataaaaaattctgaaagtagtctaaaagcctcccacacagcaatcaatctttgctttgtgggaggctgatttcatcatattagaaataggcgtgatccgtctatttaacaactgcggatgcttttgttttcatctagcaatggcgaccgctggtttttgtctcctcaccaaaattagcactgcaaacattctattaacagagcaccgggatttccgggggtattttagtggcgaatacgaacctgcgcagggacgatctgcagcgttctgcgaacttccttgccgatctcctgtatcatgtgttcacactcgtcacagatgcgctccctctcagaaaaacgtatgcctccagtaaaaccattgaatctgctgattcagcctcgcgttttctgccttgaatgtttcgtattcttctatagaaatcgtgacagttttctttgcttttagcacattttgctgctcattcgccatgaacacacactaccatattttgaaaaaatagctacgttttctgcttatctgaactcaaggtcgtttatctttcggtgtgcttttagttgttccacgctcaaaccttccataagcagcggcatttgctgtgtctatacggtaaagcgctggtctgcattctgcttttgcagtcccagatccacgtcccaatttctccaatatttctaatcgacttggttgcagtcgtatgaagtcggttaggactttgaactattgttgcgttttttctgctcgtgcaatctgcggtgagattaacgcttaccactctctgctctttatttttgcttgtatgctattttttgtagcaattataatacgcgcttgtcatttacttatcatttaataagcagcacatgtaaatcccaaaaatgaatttttttttattaagaaacatgtctgcatatttagacgataggcttatcttgtggggcacaaaagaaggtgagagcgcttgagtgtaaacgcggacgcgaaagttatagagcgtcagcatgctgtgtggcaagtattgttacgcaggcgctttgatacggcctctaaccttgcgacggagtttcatgtcagtgttcggacgatgcaaaatgatttgcatgagctcatgctttctcaccctattgaatctgttcgtggacgttatggcggcggctataaaattgccgattggtatcacccacagttgcatacactgtgtgccgaacaaattaaggttctgaaaaaagcagcgtctctcgtatccgctgaagaccaactcgtaataagaacgatactcgaacagtttgccccataaagaattctgcaccttgataaacaggctgatggatcggcctcatagcaagcacaggacattcatccgtgtggagggagcggcagacagggcggcgcaaggacggtatccgtgatacctgagcgattcacgcatcctgtcaaccgcgctgcagccagcgcgttcgcaacgatcccatgcggaaataatgagacttctactacagccctccactgactggagagggagttcctgcggtgtacgatggtcaagatgccgacggcacaggcggggctatgacgcggtgaagcgggccgcgaccttgtgcttgccccatattctacatggcgccactgttgacagaggctgtagatatttatagaatgtctgtacctgctaatcagaaaatacggaaggaggtacagtaatccataaatgtgcagcacagtgaaaggagaacgcatgatgcgtgatttttctgtaggggaatgcgttcagcggacatataccgccgagcaggtggctcaaatccttggcatcagcctacgcaaggcttatgggctttgcgaaacaaccacacaattcaaggtgatgcggctgggaaagcgatgcctgcgaattcacaaggaatcctttgacaagtggctgaacgagcaagctgagcttacctgacctgaatcaggaaaggaaagcgatcatggcaacctacaaagtgaggggcattgcccacaacatcatttatccctaccggacagaagacggcaaggtcaagcaccaatgggaaacctattccaccgagctggaggcgatgcacaggaaggcttatatcgactatctacaaaagaatcggcttcaccacgagatccgaaaggctgccgccgaataccagtgcaagcgcgctgtggagcgggaggtggtcgagcgtttccgccccagaacgcaggaggaagcacttccgcacgcagcggaggataataccgcaaagacctatcgggaatttgcggagaagtggctgcccatccacgcgagaaaggagcgcttttcgcccaactcctatgacagctatcgcagcaatctggaccggcatattctgccgtactttggtgaccgggtgatgagcagcatcacggtagaggacattgacgacttcctggacgcgctgagccggaaaccctgccgcgggccaaagagctacgggaagcacccggaggaaattccgacactgtcctccagtaccgtgaagaagtgctttacgatcctgacctccggctttgagacggcaaagaagtggcactacatcagcgaaatccccaaggtcaccgcgcccacggaaaaaacggtcaagcggagagcctgggatgcccggcgcgtttatgaggtgctcgacagcatcaaggaggacgagctgcttcacctggccgtccacctggcgtttgtctgctccctgcgggctggcgaaaccgcgggaattgatctgcatacgattgatttccgggatggcagcctgtggatcacccgacagatccagcgcgtatcagacagcgcaatcggcgtgctgcccaagcatgaggtgctgcgcatcttcccaaagcaggtgcttacttcgaaaagcagcatgattctcaagggaccgaaaacggaggacagccatcggaagcagtatctgaccacgccgctgctggatgagctgcgtgggagattggcgcggattgaggaaaacaaggcgttcttccgtgaggagtatcgggattacggactgctgatttgccagacggacggacgacctgtcgatcccaagaatttggaaaagagcttcaaagagcatcaaaagcggatcggcatcccggagaatgaacgcattgatttccaggggcttcgcaagtctggtcagatgcacaaggtacgtctgtcgcagaacaactatcagttggttgcggaaaacgccggacagtcgccggaggtcctgatgaaccactacaacgaggcgctggactacgagaagcgcgccctgtcacggctggtggagaacagcttctatccgcatcgggaaacgtctggcgaggcgcaggacagcgcggatgtgtctgcgctaatggcacagattcagcaaaacccagagctgtgccggaagcttctgcaatccctgacactcggtgcacgtcagcgcgcctgatgcaaagatttctgcgtgttagcaggatttgttagcaggcggctatacacattcattcggcgcataatcagcaaggccgtcaagaggctaaaattagctgggagtctgaaaatgtgcccgaaatgttagctggaaaccgaggcctgatgcaagcggcacttcctggtcaagagaggaggagaaagcagaaaacctaacaatacaaagaaaatcgcccctgcgagttgtctcacagaggcgactgtctggagctgataaccagattcgaactggtgacctcatccttaccaaggatgcgctctacctgctgagctatatcagcgtgcgtgaataatcatgctgtcatcctgcatggagcatatccttaccaaggatgcgctctacctactgagctatatcagcatgccccgaacgggcaacgatgatattatacacaacctcttctggtttggcaagggggaatttacgttttttttgaaaagtcggccgcaaaatccccctccccatgccgcccttgactttccgggccggttcgtcgtatcataacgtgaggaggtatgggtctatgacgcaaagtaaaacgtttcccgcctgcccgcgctgcggaaagccggttgagatcgccggggcggctttctgtccgcactgcggagcgcccgttgccgcggcccaggccgctcccgtaccggagggagcgctctcccttttggaaaaggccgaacgccagaccgatcccgtcaaaaaacacaagctgctgctggaggcgcaggcgcagtatcccgattgtctggaggtggcgcaggagctgctgttcctgggccgcctgtatgagcgcagtcccaaaaagctggacttttcggttatcaaatgccacctgctgcatttctacctgaccccggacgatttctccgccgcccagcagcagcagatgcgcaccgaattgtttgatcacccggatcttaggcgatgccaggaacttgcgcccgaccccgacgcctttacgcgcaaatatctggagcggctctgccgcgattttatcaacgtgtttctgcgcggcagcaaccgttatatgcacagctttttcggttttaggctggacagccgcatcgccaaggtgctggcctctcccctggagcggatgctgagccgcgttcacggcgatacggacctggacttcgagcagcgctccatgctctatgacgcgctctaccgcgcctttttgctggaaaccggcaatgacgccaaatggctggacgccctgctggccggggagggtctccccattcccgcaaagccgtaaccattcaggaggaaaaaccgcttggagcatcgcaaacgttcttccccgccccggggcatgcccgccgaggcgccccgtccgcgaaaaggcaccctgcacggccgacagaagccggacgatcccctgcccgagcagcagccggtgaccgatgacgaaccagcccccaaaaagccgtcccgcctgcggctgattctgctgcgcgtggcggtgggcgtgctgcttgtgatcgcgctggtgtttgcctaccttttcctgcttctgggcgagcctgacgaggaggccaagtatgtggacctccctgatgaggagctcatcaccatgcccatgggcgcgctggaaatccccggcgaggccaacctgcaaaacctcgccaatacctttggccagcctgtgatggcgctctatggcggccctgcccttgaacgcgcgcgcgtgtacgatactgcctttggcggcggctatgcccgccgggtgacgctgacctacgcctttgatgacggaacccagctcacggtggagagcatccgtcccacgtccgccattaccctgctgggcagcggctacagtctcagcgtccgttcgctctacgcgctgggcgggctggacgcggcgcgcatggatggcggcggccagatctgcatcttcggccagagcgataccgccgcttatgcggtgctgtgtcctgagggacatgaaagcgacctgaacagcctgctcaggcaaaccacgcttatcgcccccgaaggcgaataaacacaaaggagcgtcccggacccatgcataaccacccatcgcgttccatgaaaacctcaacgctcatccgccggttcctgccctattttaaaaagtaccggggcatgctgtttctggatctggtgtgcgcggcgctgaccaccgtgtgcgacctggtgctgcccctcatcgtgcgcgatgtgaccgacctggccgccaataacctctccgctcttacggtgagctttgtgctcagggtgggtggcatctacgtgcttttgcgcatcgtggacgcgctggccaatttctacatggcctcccgcgggcacatcatgggcaccttcattgagcgcgacatgcgaaacgacctcttcgcccatctgcaaacgctgggctttgcctattacagcaacgccaaggtgggccagatcatggcccgcatcaccagcgacctgtttgaggtgacggagttcgcccatcactgcccggaggaatttttcatcgcgggtatcaaaatcgtcatccccttcatcattctgatgggggccagccccgcgctcacgctcatcatctttgccatgctgccgctgatgatagcgtgcacgcgctttttcaacaagcgcatgcgcgccgtctaccgcgaaagccgccaccaggtgggcgagatcaacgcccaggtggaggacagcctgctgggcatccgcgtggtcaagagctttgccaacgagccggtcgaaatggaaaagtttcatcacggcaacgacgagtttgtgcgcatcaaccgccgcaaatacctctatatggccggcttcaacaccactacgcgcgtcttcgacggactgatgtacattgtggtggtggtcgtgggggcgctgttcatcattcaggggtccatcaccgcggcggattacatggcctatctgctctatgtcaataccctgctgacctccatccgccgcatcgtggatttcatggagcaatttcagcgcggcataaccggcatcgagcgcttctgcgaaatcatggatgaaacacccgatatccaggacgcgcccgacgccgtggaactgacccatgtgcgcggcgacgtaaccttcgaccacgtcagcttccattacagcgacaacgacaaaaacgtgctggccgacatcaacttccacgtcaacgccggcgagcgggtggcgctggtcggccccagcggcggcggcaagaccacgctttgcaacctgattccccgcttttataacgtttccggcggacgcattctcatcgacgggcaggacatcacccacctgacccagcacagcctgcgcgagaacatcggcatggtgcagcaggatgtctacctgttctccggcaccatctttgacaacattgcctacggcatgcccggcgccacccccgaaaaggtgagggaggccgcgcggctggccggggcggacgaattcatcacccggctgcccgaagggtatgataccttcgtgggcgagcggggtgtcaagctctcgggcgggcagaagcagcgcatctccatcgcgcgtgtatttttgaaaaatccgcccatcctgattctggacgaggccaccagcgccctggacaatgaaagcgagcgcctggtgcaagaatccctggaaaagctgtccgagggacgcaccacctttaccatcgctcaccggcttaccaccatccgcaacgccaccatcatctgggtgctgacggagaacggcatcgtggaaaagggcacgcatcaggagctgctcgagctgggtggcatctacgcccatctttaccaaatgtatacggaggtggcctgatgagcattgccttttcaccggcaacgccacagcggtttcaggagatctgtgcgctgtaccaggatgtgatccgcgatatgcacgcgcgcggtctgaagcaatgggaatgggacgtctaccccacccgcgcccagctggaggacgatattacgcacgggcggctctaccgcgtggaggatgagggacggctcatcgccgccttcgccctgggcgacgccatggagcccgaatacgcccgcatcacatgggaatacggggtcaggcccgccacgctgcatcgctttgcgatggcctgcgaaagcctggacctggcctcacgggtgctggcctttgtcaaggaagaggcgctgcgtctgggatacgacagcctgcgcctggacacctgcgtggaggacagcgccatgctgaaggtgttttcctctgccatgacacgggaggcgggccgcaccttttttgaaaatccggacgtgaccagcgtgtgctttgaatcgcccttgagcgatgcgtgccccatgctgccgctgcgcatgtatccggcctaccgccacggcgacatgacgccctggggcggcgacgcgctgcgcaccgtctatggccgggatatccccgacgaccgtacgggagaagcgctggagatcagcgccatcccgcagctggaaagccgcaccgtcacaggtgaaacgctgccccttctgctggagcgggacggggcgcgcctgtcgggcgattatgcgggtgaggcgtttcccctgctgctcaagcttctggcggcccgcgattcgctgagcgtgcaggtccacccggacgacgcctacgcccgcgagcacgagggcaagctgggcaagaccgaggcatgggtcatcctgaaggcggaggagggcgcgagcatcctttacggcctgaaggagggcgtgacgctggaggccctgcgcgccgcgctggaaggcggcggcgatgtggagcgcctcatcaggcgcgtgcccgtgaagccgggcgatgtgtactacatgcccagcgggatggtacacgccatcggcggcggcatcctgctctatgaaatccagcagtccagcgatgtgacctaccgcctgtgggactttgaccgcgtcaacgccgcgggagagaagcgccccctgcacatccgccagtccctggacgtcatcgtgcccgagctgaccggtcaaatcgcccatatgcccgaaaacgatggctgcggcctgctgacgctgctggacgtgcccgccttccatctggagtgtgccaacgtcaacggcgagtgcgagcttgcgcctcagccgcacgccttccgcatgctgacggcgctggccggactgctgctcagctggcagggcgacgccatcgagctgaaggcgggtgacagcgtgcttctgcccgcctcctgtcccccggtcacgctgatgggcgtgggccaggcattgatctccaccccacccgcgcgttcctgaccgcgcgggcgttttcaggcatacaaaggaggaatccgggcatgaaggcttgctcaaaggggactgccgccgcggcgtgcctcggctacgcgctgatcacggcggcgctgttctgggcctcgccgtatattcggcctgaaccgtccacgggggtttttctggcagccttctccgccgcgtcgctgtgggcgtgcaagcgcctgccggtgcgcggctggctgcgcgggcgcgcgctggccggacttctggcggcggcgctgtatgcgtcgtttgcctccttcgggtatcggctcttcctctccggtgaacgcatgcagttcagcgccggtcgcgtcgggatgctgctgctgggcgtcgcctggtttgtgccggtgctgctggccctgttggggctggtcgagcgcacctgcgtgtgtatgacggcgcgcgccgaaccgtccggccgcgtcctgcgacgggctttcgcatggctctgggtcgtagcgctggcctgtcaggcggtcgcggtggccagcttctggccgggcggctttccgctggacgccattcttcagctctatcaggcgctggggctgcggcctctcaacgactggcatcccgtgatgcatacgctgctgcatcggttctttttgctgttcttcgaccatccgggatatctggtggcggtgcaggggttcttcttctcgctgatcgtggcgagggccgcgctgaccgcctgccgcttcggcgcccggctgcgcacggtggcgctgggcgtggcggtgttctgccttctgcccaatcaggtactgagcaacatcggcctgcttaaggactttcccttcacctatacgctggtatggggcacgctgctgatggccgagcttgtccaaagcccggacaggctgcgccggccgggctttgtgattcaggcggtgccctgcctgtttctgatgggcggcctcagacacaacggcatcctgccgatgctcttcatggccgcggcattggtcgtggtgggcttgcgccaccggcagtttgtgggccgtgcgctggcctgcgcgctggtgcccgtgctgctgctggcggggttcaaggggccggtataccgcctgctcaaggtggagcccaatgaggtgcccagctacgtaaccatgctttgtgcggcgggagcttgtctgcaccagggggaaacgctgtcccaggcaagcgaggaaaaactggaaaccatcctctcccttgaagattgggcaaacggatacagccgctttgctggacacgatctttaccgcgatctcgaaccatcttttatggagcgtgcgcatctttcgttggtcgaagttttttccatttacctagaggctctggcaaattatcctgatatcgtgattaaagaccggctggacggcatgaatctgttgtgggacgtaacgcagccggacgaaagtttcaacaccgattattcggatcatgcattcattgagcccgatgtggggctggtgatgccgggcgtcgaagagggcgaggcgtaccgcaacccttccctgatcgcacggacataccgctgggccgcagctttccactttccgggcgaatcgctcaccggccagctgcataacatgctgctatggcgctccggggcgtggttgatactgctgtgcgtgatcatgctctactggatcaggcgacgcctcagcgacctgtggctgtgcgccgcgccgctgctgggcaacctgctggccatggcgcttgcgttgtgtcatcagagcttccgctacgtgtatttcgtgcagccggtgacgctgtgcctgctgctgctgaccgtattctttgacgcgcgcaggagacgggcagccgccgcccaggcataaaaaacaggtccgccatcccggcgttttgccgtggacggcggacctgtttttctctgtcaattccgggtcatgatctgcagaatcttgcggtcggtttcccgcatgccgtcgcggcccagctcgcccacattgcggatggtattctcgatgcccttggagagaatgccgtcgccgccgtagaactgatggcccttgcggtacatttcaaatcccaatatgcccgcgtccaccgccgaggcgatcttcgcggcgcaggaaggcttggccccatcgcacacgatgccgctcacgatcgccagcgcgttgacgatggtgtgggctacggttttgtagtcgcccgtgagcaggtaggcgatgcccgcgcccgcgccgctgcccgccgtcaccgcgccgcagtaggccgagagctttccgatggccgttttctgatggatggcgcacagattggccacagccagagcgcgatagagctcctcacggctcttgccgtattcgcgggcgtattccagcacgggcagggataccgtcagcccctggtttccgctgccggagttgatgaccacgggcatttcacagccgctcatgcgcgcgtcgctgccggcggcggcctgcgcgcgggcgcgcacgcgcacatcgctgccgtaggtatccagcagcacgttgccgatatccgcgccccatccgctcttgagtccctcggccgcgatggcggtgttgcattcgatctgccggtccagcacgtcgctaacgtcatccgggtccaggcaatcagcaaaggcgcagatgtcctccacggtgagcagcgcataatcgacggtcgcctcggtgctctccacgctgccatcctcgctgaaaagggtgttcccatccacacggatgctgacgatgtgcgtatggctgtggctgatgcgcacgctggcctcgtgctccccgctccatacggtcacgatcatgtccagcagcaccccgctttccagcggcaccacctcaatgggcgtttccgcggcaaagcgctcgatgtcccggatctggtccggggtcacgtttccaagcgcctccagccccgccccctcatcgcccgcaacgatgccggcggccaccgctgcgcggatgcccttttgcccgccggtgttgggaacggtgacgcttttgacgtttttgatgatgtttccgctgacctgtgcgcgcacgcggtccggcatccgccccagggcgtgccgcgctttggcggcgcagtaggccagggcaataggttcggtgcagccggtagccggcaccagttcctcccgcaggatggcgcaataggcctgataaagggcgtcgtttcgctccatgatttgtcgcctcctgttgcattgtagaaacagcataccataaaccggggcggcagtacaatgtttttcgggcgccagcccctgctaggccacgaaggtcaggaaataggtcagggaatcctgaagcgccgccaggcacgcctgaatgatgttggaactgacgcccgtggtggtccagacatggctgccgtcggtgctctcgatgagcacgcgcaccacgctggcggtgccgccgctgtcgatgacgcgcaccttgaaatcgcgcaggcgcatgcgctccacctgcggataaaacaccagcagcgccttcctgagcgccaggtccagcgcgttcacggggccgtcgccctcagcggcgttgatctcctcgcgcccatccacgcttactttgatgtatgcctgggcgctgcgctcgtcgcgctggttgcccgaaagcacgtggaaatcccgcacctcaaaataccgtttgctcatgcccagcgtgtccagcgccatcaggtcgaagctgccgtcggcgctctcgtaggcgtagccgcgcagctcgcggcgcttgagccgctcggtcacgagcttgacgcgcgggtcgtcccggctgatatcgggcaggaggcgcttgaggcgcgcatatacgcccgtgcgccccacctgctcgctgagcagaaagcggcgctggttgcccacggcttccggagaaatgtgctcaaagctggccgcatccttcaccacgccgtcaatgtgcatgccgcccttgtgcgcaaaggcgctgtagcccacgtagggcgcgcggggattgggggtcaggttcatcacttccaggatctcgcgcgtggtctgggtaagcgtgtgcatgttttccggcggcaccagcgcatagcccatcttcagttgaagcgtggccagcaacgtgctcagattggtgttgccgcaccgctcccccacgccgcccacggtggcctgcgccatggtcgcgcccgcgctcacgcaggccaggctgcccgccacggccagccccatatcgtcatggcaatggatgcccacgcgcgtgtcccccagcgcgcaaagcacctccgccgtgcgggcgcgcagcgcgtccggcagcgtgccgcccttggtatcgcacaaaaccagcacgtccgcgccgccctgccgcgccgcccgcagcgcctccatggcatagtcccggtcgtactgcacgccgtcgaagaaatgctcggcgtcaaagagcacgcgccgtccctggccggccagataggccacgctttcacggatcatgcgcaggttttcctgcggcgtcacgcgcagaacctccgtcacctgccggatatccgccttgccgaagagactcaccacgggttgctccgtgccaagcagcgccgccagccccgcgtcctcctcaggggccgcacccgcgtggcatgtgctgccgaagggcactagcaccgcctgggtcagaaagggcgctttgcgcgcctcctcaaaaaaggtctggtccttggggttgccggtggggtttccgccctcgatcaggggcacgcccagccggtccagcgccagggcgatcttgcgcttgtccgacagcgagtgttctacgccttcgccctgcgcgccgtcccgcagggtggtatccaaaagctcgatgcgctgcatggagcgtctcctttcagcggctggtcgccgcatagaccgcattgtgcaatagccgcctcacccggtagatctccaggctgtcgcgcgaggggcagatgcggttggtcaggaagatcacatacaggccgctggtagggtccagcgcaaagctggtgccggtaaagcccgtatgccccaccgtttcgcgggggaagaggtcgccggtgtagccgttgtcgtacgccggcaggtaaaacgacaggccccggccctgcgccatgccgggggtgtggttgcgcatggccagctccaccgtggcggggcagaggtagtgcgtgccgtccggcagctggccgcggcggcagagcatctgcaaaaacagggccagatcgtccatattgccaaacacgcccgcgttgcccgccacgccgcccagaaagcgcgcgttttcatcgtgcaccacgccctgcaggcagcgcccgtcgtcctgcatctcggtggcggcgatgttgccgtcctggggcaggtagccggtatcgcgcatcttgaggggccaaaagacctccttcatggccagctcattcagtcccatgccgtagaggcactccagcagctgccccagcaaaatgaaccccgcgcagcagtagcgtacccgcgcgcccggcggggagaccagcggtgcattgaggatcgtttcggcgctgttttccggctggtgcgacaattcccacagatgcagtcccgtgggaaagcccgccgtgtgcgtcaagatctgggcaatggtgatgtcgcgcttgtccggcggcgcatccagaaacgtgcccagccggtcccacaggcacagtttgcccgcctccatggcgcgcagcgtcagcatgcccaccaccaacggcttggtgacggaggccaggtcgtaccgggtatgctcattggtcaggggcgcgtcgtcctcgatggacaggcggccataggcgcggcggtacagcacgcgctcgtcccggcccaccagcaggcaggcagagggaaacgcacccgcctccagcgcccggacgattacctcgtccgcaagcgaaaaattggggctattacgcatctgcccgcctcccttgtgcttcgttggaccagtagaccacggaaaagccgtccgcgcccttcatgcgcctgaccagcctgcgcttgggattcacgcccaccttatggccgcacagggccagcatgggcgcgtcgcccgcgctgtcgccgtaggcccaggaggcggcgtagtccaccatgtcgccgcgcgcggccaggtcctcggccagacgcaggggcttttgtacgccccggcagttttcgcccgcgatcaggccggtgtaaacgccgttttccacatgcatgcgcgtgccgataatgcgctggatgggcagctcctctttgagcgcctccagataaaacgagggagacgccgtgaccagcagcacctccgcgccctcggcatgccgccgcctcagctcctccacgccctggggatacagccgcggaagcagctcttcccggcagaaggcgcggcccagcgcctcaacgccgccctgctccctgcccgccagaaaggacaggctttcccgcttcgcccgctccgccgtggtcagatgcaggccgtaggcgaccgcccacagtgccgcgcgcagcagaccgcccgcgccgatcagcccccgtgcatgggcgtagcgcacaaagcgcacgatggaatcaccccggatgagcgttccgtcaaaatcaaaaagcgcatagggcttttgcaaggtccttcccctcctgccggcatcgcggacaagccgctccgttgcgagtatagcacgatttgcgcaaaaacgccaccatccgcttgcattcgcggcgcaggtatgatataaatggcaatgaaatccgttttttaccgggctggaggcgcttatggggaagctgtataccgttttgcgcggcacctgccgcgtcgtgatgccaaagatgcgggccgagtgggccgtgccctttgatgggaagcccagcgttttttgtcccaatcacgcgggcgcgttcggccccatcgacatgtgcgtgtttttccccttgagcgaccactgccacccctggctcaacgccgccgtgatggaccccaagctggtgcccgcctatgtgcgtcaggattactggtggcggcccggctgcaggctggagccgctctacaacgcgaccctgccctatctggcggcggccgtgctgccgcccattctgcgcagcgtgcccggcgtgccggtataccacgacatgcaggtgatcaagacctttcgcaaaagcattgagtacctgcgccagggcgaacatctgatcatcttcccccagcagccgtcgggctttcagtcccattaccaggagctcaacaggggctttttgcagattgcgcccatggcttggcgtacgctgaacctgcgtctcaagttttatcccgtgcacatcgactacaaaaagcgctacttccgcatcggcgccccggtggaatacgatccggaggtgagcctcaaggagcaggagcagcgcctgattgacggcatcgccgcgggaatctgagcaaaacaaagggaccgttcccgacgaacggccccttttgatttagccccgttcctccagcgcgcgctttccgatgaggtagctgcccaccagcccgctcaccgggaacagcgccggagcgacgatatactcgtcgatatgctccagtaccgcgggcgactgcacatatccgcccagcaggcgcagcgtttcggcccgcaccatggggaagagggccgcccgctgcatcacgccgccgcc

SEQ ID NO: 4379 - DNA, 4104 bp, Unknown
  16S sequences of unknown bacteria
aacggagatcatggaataagagatgaggaagggactgcaaagcagtcccttttttacaaaaagaggaatggcaatggagcaggtatgttttgaggcagtactcgatgaaaagcaaatgcagaaggtggcttctttggcagaagatatatggtatgagcattatggtaggctgttgggagaaaaacagattgcatatatgctggaaaagtttcaatccgtctctgctattgaagaacagcaaaggcatggatatcaatattatttgataacttatgatggcgatgcacatggttatatcggtctgcagccgcaaggaaacaccctatttttgagtaagctatatttacaaaagcaggcgagaggcaagggaattgcacggcaagcattggatatgatgcgtgagatatgcagagaaaaggggctctcatccatctatttgacggtgaataaacacaatagctctaaacaagtatacgaagcgcttgggtttaaaacaacgcgtgaggaagtaacggatataggcaatgggtttgtgatggatgattatatcatggagattttgataggcgaataaaagaaaaaatatcctaaaaaataacttgcaattcttatattgttacgctataatctattagtctctgtgtgcatatgtgcacagaatagggaagaagcggaaggttgccggcatcggcaaagccgggtaatttccgtggaccaagcctgacaatcgggcggcgagtcccatctcgccgcgtgtgtctataaaaagtggacacacgcgggaacgtgtaaatgggatatcgaaaaaaggaggaacaatatgccgagccaaaaaattcgtattaagctcaaagcttacgatcacaacctgatcgaccaaagcgcagaaaggatcgtagagaccgcaaagcggtctggtgccaagatttcgggcccgattccgctgccgacggacaaggaaatcatcaccgttttgcgtgcaacgcacaagtacaaggacgcacgggaacaatttgaaatcaaaacgcacaaacgcattatcgatatcctggatcccacgtccaaaacagtcgattccctgatgagactggatcttccggctggtgtggatatcgagatcaagctttgatgcagtgctggaggtgacggacgtgaaaaaagcaatattggcaaaaaaactgggcatgactcaggtgtatgcagaagatggcacagtcgtccctgtgacggtgctgcaggctggcccctgctacgttgtgcagaagaaaacagtggacaaggatggctacgaagcggtgcagatcggctttgaatccattcgtgaaaagctggtgaataaacctgcaaagggccatctggataaggctggcgttgggctactgcgtaacctgcgcgagttcaagttggaggatgcagcttcttatgaagttggccaggaaatcaaggcagatgtgttcgcagaaggcgataaagtagacgtaagcggcgtttccaagggaaaagggtatgccggcgtcatcaagcgccacaaccaacacagaggccgcatgacacatggttctgggttccatagggctccaggttccatgggcggagcatctagcccgtctcgcgtattcaaaagcaaaaacctgccgggccacctgggcgcggtaaaggtaactacccagaatctgacgatcgtttcggtgaatgccgagaagaacgtgattcttgtcaagggcgcagtgcccggaccgaatggcgcgctggtaagcgtggtcgattcggtgaagaactgagccaaggagggaattccaaatgccgaaggttgatatcctcaacatggaaggcagcgttgtggattcgctggagctgaacgatgccgtattcgggatcgagcccaaccatagcgcgttgcaccaagttgtgaaagcacagctggccaacaaacgccaaggaacacagagcgcgttgaccagatcagaagtaagcggcggcggtattaagccgtggcgtcagaaaggcactggccgtgcccgccaaggatccacccgcagcccgcagtggcgtcatggcggcgttgtatttgcgcccaaaccgcgcagctaccgccaggatgtgaacaaaaaggtccgcaagctggcaatgtgcagcgcactatccagcaaggtggcggatggcaacatgatcgttttggatcaggttggttttgaaaagccgtccacaaaggcaatggtaaaaatgctgaatgccttgaaggtagacggaaaagcgttggttgttttgccggaaggaaatgcagaggtggaactctccgcccgcaacattcccggcatcaaaacgacggtgactggcacgctgaatgtgtatgacattatgaaatatgatcgcttcatcatcaccaaggatgcggccatcaaggtgcaggaggtatacgcaaaatgagcaatgcgcatgacatcatcctccgcccggtgctgacggaaaaaacgtatcaggatatgagcgaaaaacgctatgcgtttatcgtacatcccgatgcaaaccgcacagctgtaaagcaggcaattgaagaaattttcaatgtagaagtggcaaaggtcaatatcgtcaacaccctgggcaagatcaaacgccagggcctgacaaaaggccgcagggcttctctgaaaaaggcgtatgtggttttgaaagagaccagcgcgcctatcgaattctttgaaggcatggcgcaataagcgcaagcaataacgggaggaaacggagtatggcaatcaaaaaatacaagccgacatcgccgggccgccgttttatgacggtcactgattacagcggcttgagcaagacagcgcctgaacgctcgctgctggtggatttgaaaaaatccggcggccgtaacgctcatggccgtatcaccgttcgccatagaggcggcggaaacaagagaaaataccgcattattgatttcaagcgtaccaaagacggcattcccgctaaagtggctacgattgaatatgatccgaaccgtacttgctttatcgccctgatccactatgctgacggtgaaaagagctatatcttggctccgatcggcttgaaggttggcgatacggtaatgagcggcgaaaacgcagatatcatgccgggcaactgcttgcccatccgcagcattccgctgggcactgtgatccacaacatcgagctgcgcgttggcgtaggtggccagatgtgccgtacggcaggttgtgctgcacagctgatggcaaaggaaggcaagtatgcacaggtgcgtctaccctccggcgaagtgcgtatggtaccgatggatgccagagcctcgattggccaggtttccaacgaagaccatgaaaacgttaatctgggtaaagcgggtcgcaagcgtgcgcgcggcatccgcccgacggtacgcggttctgttatgaacccggtagaccacccgcacggcggcggcgaaggcaaagcgccggtaggccgtcccggcccgatgaccccctggggcaaaccggccctgggccacaagactcgcaagaagaacgccccgacggataagtacattgtgcgtcgtagaggcagcaagtaaggaaggaggatggcaaaatgtcccgttcagtaaaaaaaggacctttcgtacaagagagattgctggcgcgtgtacagcaaatgaatgaaaagaacgagaagaaagtgttgaagacctggtctcgttcctccaccatcttccctgacatggtaggccatacgatcgccgtacacgacggccgcaaacatgtgcctgtctacatcattgaggacatggtcggccataagcttggcgaatttgcaccgacccggacctatcgcggccatgcgggcagcgaaaagtcctcctcgtctagataagggaaggagattgacatggcaacgcgtcaaaaacaaaaagcggctcgcagagcagaaaatcgtgacagacggcccaaagccgtactgcgttatgctaggatcgcgccgagaaaagcgcgcgcagtgattgatcagattcgtggcaagtcgttggcagaggcagaaggaatcctgatgctttctcccagaggcgccagcgaaatcgtatacaaactcgtagaa

SEQ ID NO: 4380 - DNA, 1574 bp, Unknown
  16S sequences of unknown bacteria
ggccgtggccgtgatgccggtcgtcttgcggacatcgcggatgatcgcggccgtcagctccctggcgctcatccgatatgtgcgcaaatatccgctcacatccatgaacacctcatcgatcgaatagacatggatatcctcggcagccacatacttcagatagatctcatagatccgcttgctgtatgccatgtaaaacgccatgcgcggctgcgcgacgatataagagagcgccagcacaggatccttgctgagcgcatcatccgcataagattccccgctcagatagccaagcggggaacgccgctcacggtcccggttgatctccttcaccttctggacgacttcgaaaagacggggacggccgggaatgccatactgcttcagcgaaggagagaccgccaggcagatcgtcttctcgctgcgccgctcatccgccaccaccagatttgtgttgagcgggtcaagaccgcgttccacgcattccaccgaagcataaaaagacttcaggtcgatggccacatagctcttttcccgtgtcatttctcatccagcaatgaagtgccgtacgaattgtcgatggcgcacagccatttctgatcgatccggcggaagacataggtcgcacgccgctccatgctgtaagcagaagcctccttgttgtccgcatccagcagcgtctgtgacagcaccagcacggtatctcctgcctccagcatcaccatattgccctgtgcaggcacgatgctgtgctgaaagtatgcggcgatccggacaaacgccgcgcggatggccgctttgccctgcgccagccgtccagggctgatgaccagcaccgcgtcatcggtgtaaaagtccatcagatcgtcaaagcgctcttcacggatggcccggtccgcctccgcgatcagcgctctgatttcttcattcatgcagatcctcctttccttcatgcctgttcaggccggatgccgtccctgaccaggacatccaagcgctgaatcggccgtttgggttaatcatacactattccccgccgtcgggcaatccgttcttctccccctcatccatgaccaaaagtcatatcatgatatgcgttttaaccatttgccaaccagcgcgctgctctgtatcataaaagcatgaacacgagaaaggatgagacaaatggatgaactgaagatgaccagcgaatgggacaaggtgttccccaaaagcgacagcgtggatcacgacaagatcacgttccacaaccgctatggcatcacgctggcggcagaccgctatctgccgaagacacgcgagggcaggatgccggccatcgcggtatgcggccccttcggtgcggtgaaagagcaggcgtccggcctgtatgcgcagaagctggctgagatgggctttctgacgatcgcgttcgatccttcctataccggagaaagcggcggcatgccccgcgatgtggcctccccggacatcaacaccgaggatttctgcgcggccgtcgattacctgagcacatgcgaagaagcagatcctgatcgcatcgggatcttaggcatctgcggatggggcgg

SEQ ID NO: 4381 - DNA, 2861 bp, Unknown
  16S sequences of unknown bacteria
gattcctcggccttcttgtctcatatacagaataattcctcggccttctgcttctacctggcgcatcgctgtctgcagctgcaggccacagtcacatctgagcgatccgaatgcatcccctgtcagacactccgaatgtacccggcaaagcacatcctcaccatctcccagatcaccttttaccagtgccagatgatgctctcctgtaatatcattgatataaccatacattttaaaatcaccgtactgcgttgggaggtttgcaacggcttcctcctttacatgcttttcatgtattcttatataatcctgcagatcacggatcgtaataaatgtaaggttatgctcttttgccatttcccatagctgtgatgtacgcatcatagttccatcttctttcataacttcacagcacacgccgcattctttcagtccggcaagtctcataagatctgttgttgcctctgtatggccattccgtaccagaaccccgccttttctggaaataagcggaaatacatgtcccggtcttctgaaatcctccggttttgactgatcatccacacacttcatgatagtataggagcgctcttccgcagagatacctgtggttgtatctgcgtgatctactgccacggtaaatgctgtactgtgattgtccgtattctccgcaaccatcggcggaaagttcaatctcaccgcaatttctgcactcatcggtgtacagataagaccctttgcataggtcgccatgaaattaatattttccctggtcgcaaactctgccgcgcatatcagatctccctcattttctctgtccggatcatctgtgaccagaactatttttccttccttaagatccctaagtgcttcttcaattgtgttgtactgataattttgtgacatagtgtatatcctcctgttctaaaacccgaattcttcaagaaactccatcgtaattccggattcttttttctcttcttcgttttttctgatgccaagcagtttttctacgtattttccgatcacatcattttccagattaaccagatcccccggcaccttttccaaaagagtggtttcttctcctgtatgtggaatgaccgacacctgaaaaccagcttcatcaacccttgcaactgtcagactgatcccatcaatacagacggatcctttttccacgatcagatgcaaaatctgtggcgatgtctcaattgatacccagatggcattttcttcccggagcatggaacgtatcacgccagtcccatcaatatggccgcttactatgtgtcccccgaacctgccgtctgcagccattgcacgttccaggtttacctggcttccggccttgcagctgccaagactgcttcttctgatcgtctctgccatcacatcggcagtaaatccgtccggctgaatcgacgtaactgtcagacacacaccattcacagcgatactgtcaccgatccttgtcccttccaggactttccgggctttcactgccaggatccctgattcccctgtcagctgtatataacggacttttcctttctcttctacgattcctgtaaacatgattcctcctgttttttatcacacacctgacattttatccggatatcctcaccgatctggcagatatctgtatatttcagttccactgcttcagacggcagttcaactccaataccctctaccggtgtcttcccagccacaccgccaaacagctttggtgccacaaaagcctgtacttcctttacaattccagctcgcagtgcactgtcatttaacgtacctcctccctccaggaggatgctgtcaatgcctctgtttccaagatctgccatcagcttcttaaggtctatctgattcttttcgtcgggacagtaaatggtttcaactcccatggtatgtaatatttttattttctcttttgcatttttctgttctgcataagccacgatcgtccggtattttcccgcactttttacgatctgactgtccggcgggatcctgagcttactgtcgcacacaatcctgacaggacttttccagccttctacccggacgtttaacatcggatcatctgcaagcacagttccaatacctgccatgatccccatgtactgatgccgcatatgctgtacttcttttcttgccgcttctccggtgatccattttgatgctcctgtcttcgttgcgatcttcccatccagtgtcatggcatacttcatcaccacgtatggggttttcgtagtaatataatggaaaaacaccggattcagctgatcacattcttctctcataaaatcttcaactactgttacaccggcttcccttaacatctgtacaccttttcctgccactttcggattcggatctctggaaccgatcaccacttttctgatcttctgttcaatgatcgcttccgtacatggaggtgttttaccatgatgacagcaaggctccaacgtgacataaatcaccgcaccttctgctgattctgtaagagaagcaattgcattacgttccgcgtgaagttctccatactttttatgatagccttccccgatgatctttccgtcttttacgatcactgcccctaccataggattgggattcgtccagccttctccttttttggccagttgaatagcccgaagcatatattcctgatccgtcatttctattccttctttcttattcctgttctttgcctgggctacgccgaggcttttaaacatgtgcaatcggattcacagacaagtgaatggtatagttatttcgaaaacgatgtaccagatacaaaaaaagcctgcagaaatatctgcagggtggaattaatctgttacatatga

SEQ ID NO: 4382 - DNA, 20356 bp, Unknown
  16S sequences of unknown bacteria
gggcggcactatcactgctacaattcgcccgttttccgggactttacggaaaaaatctgtctggaaatgagccgccgtttcgggcacaatccttatgtactgggctttcaggtggataacgagatggggcaggagcattcggatcgctgccagtgccccgtctgccgccgtaagttcaaggaagccatgaaggaaaaatttcatggggatatcggcgcgctgaacaaggccttcggctccctgttctgggggcagcgcttcgacgattttgaacaggtagagccgcccgccgccggttcccgggaagacgcgaaaagcaatctgggctggcggggcaccaatatgcccgccctgcggctggaatttgagcgcttcgccagcgacagtctggtggattacttccgtctgcagcgggacgcgctgcgccgctttagcgacaagcccgtcacccacaataccacccatctgggtaccaacgccatcgactatttcaagctggcccgctatgaggacgtagcggcggtggatcattacccctacgcgctggatgagaccaagacgggctcggcgtcggtctacgccatggcccgcagctacaagcagcgggatttctggctgctggagaccctctgcggcggcggccacggcaactgggcctatcagggaatgcccatgggcacgcccggcaccttccgccagaacatggcctttgcctacgcttccggcgcggagctgatcacggcgttcaagtactccgtgtttccctccgggtttgagaatctgggctcggcgctcatcgacctgaaccgcattccgggccggcggtatgaggagttttgtcaggccgggcaggatctggcggcctgcgagccgatcctgaaccgcaccaaggtggtctccgaagtggccgtggtgctggactacaacagcctgtgggccaaccgcatcaagcccatccacaaggaatgtacctacgaaggctatgcacagcagctggtagggcagctggcggcgctgggcgtgaatgtggatctgatcggcaccgaccatccgctggacggctaccggctggtcctcgtgccctttgcgcccatcctgccggaggacttccgtcggaagtgccgggactatgccgaaaagggcgggcacttgctggccatgaccatggcgttcagcagggatgaatggggcagcggcattttcgaaaaaagcccggtgggcatgacggactttttcgggatgcatgtggtggagatggagccggtctttgacggccagaccgacgcgccggtgcggatcggggaactgaccatccgaagccacttctggcaggaaacactggaatccgagggcgcggaggtgctgggcgtatttcgcggcacttaccgggacggctggcctgtgctgaccgagcatccctatggaaagggcagcgccctgtatctgggcacggctccggcccccgaggacgcgcccgcgctgcttcgctggctgctggaacgctgcggcgtttcgctgccgccggtggagatggcctacggtctcagcgtggtgacccggttttccgaaacggaacggtacatttttgtttttaactccctgccccgggagcaggtctgccgcctgacgcgctcgctggaggcggactacggcatcggcgagttggcggggcagacgctccgtcttccggccaaagggttccagatccttcacgaacgctgggaagggtgaaaagaacgctccatttcatagcgcccgcaggaagatctcgttcctgcgggttttttcgcgccgttttcaggttggacatattttgttaacggttccgccgtcaaaccatcacctgacgcacagataagtttcctatcctcgaactgctgatgaaacggcgaaaggagagaaacggaattgatcgaggtacggcatttgtccaagcgttacggaacgcatctggcggtggacgacctgtcgttttccatcgacaggggcgtggtgtacggtttccttggcccgaatggcgcaggaaagtccaccaccatgaacatcatgaccggctgtctgggcgccacggagggagaagtgctcatcgacggccacaaagtggcggaggaacccatggaggccaagaagcacatcggctatctgcccgagcttccgcccctgtacggcgatatgacgccggaggaatatctgcgcttcgtggcccgggccaagggcctgcggcgggaggaaagcgcccggcagatcgaaacggtgatggaaaagacccgcatcgccgacgtgagaaagcggctgattcgcaacctgtccaagggctaccgccagcgggtgggcattgcgcaggccctgctgggcaacccggaggtcatcattctggacgaacctacggtggggctggacccggcgcagatcattgagattcgcgaactgatccgggaactgggcaaggagcatacgctggttttgtccagccacattctgagcgaggtacaggcggtgtgcgactccatcctgatcctttccaaagggcggctggtggcctgcgataccgccgagaacctgacaaagctgatgcggggccgcgaaaacctgcggcttttgactcgggcggaggaagaaacggttcgcccgatcgtggaaaaggtggatggcgtggaaagccttgcctttgcggaggaagatggcctgaccgccgtcgatgtgacccccgtcgaggggcaggacgttcgggaagcgctgttcaatgcctttgccgagacaaaggtaccgcttctggagctgcgcacggaaaaggccagcctggaggacgtgttcctggagctgaccggcggcgaagcccagctggaggctgcgtctgcctccaaagaaaccgaagaaccggcggatatgccggaagaaaaggcgggtgaggaatcgtgatcgccgtatttcgccgggaactgaacggctacttcaaaagcatgatgggttatctgttctccgcgttcgttctgatctttgcgggcatttacaccatggtgtacaacctgagcggctacaccgcccactttgagcgggtgctcagctccatcagctttctgtacctgatcgccgtgcccatcctgaccatgcgcagtgtggcggaggaaaagaagcagaagaccgatcagctgctgtattctctgcccatcagcctgtccagtgtggtggtgggcaagtatctggccatgctggtggtactgctggtgcccacggccattatggggctttatcccctgatcctgtcccagttcggcaccgtgcccctgcagacggcctacggcgcgctggcgggcttcttcctgctgggcgcgtgccttctgtccatcggcctgttcgtatcgtccgtgacggaaaatcaggtggccgccgcggtgatcacgctggtggtcatgctggtgctttacttcatgagcgggctggccagctacgtatccaccgctgcgtcggcctccctgacggcgctgatcatcgtggcggcggtgctgtgtctggttttgtacctgctgacgaaaaacgcgccggtatccgtgctggtgctggcagtactggcaggcggcctgtatctctggtacagtcaggattccagcgccttctccggccttttcagcgacattatgaatcagctgagtgtgttcgaccgcttcgacagctttgtggacggcgtgttcgacctgacggcggtggtgtacgacctgtccgtgacgggcgtgttcctgttcctgtccgtgcaggcgctggagaagaggaggtggagtgaatgaagaccgcaaatcccggaaagaaaccgtccaaactccgccagatgtttggcagccgcttcaaggcgggcagctattccgcttttgccgcggcagtggtcatcgccatcgctgtgctggccaatctggcggtgcaggcccttcctcagacggcgacccggatcgacctgacggcgcagtccctgtataccctgtccgaccagacccggcgcatcgccgccagtctggatacggatgtgaacctgtacctgctggccctgcgcggcaacgaggacgataccatctcccgcctgttgcagagctatgcggagctgaacagccacattcatgtgtccaacgtggaccctaccgagcagcccacgtttttggacacttatgatctggacatcaaccagctgtatgccaacagtgtgctggtggacggcggcggacgcagccgtctggtcagctacagcgacatttatgtgaccgactacagcatgaactacagcacctaccagtacgatacctccaccagctttgacggcgagaacgcgctgaccaacgccattcactatgtgtccagccagaacctgcctaaggtgtaccaacttaccggccatggcgaaagcgaactcagcgactacatggaggaactgctggcgggcgacaacgtggagaccgagacgctgagtctgctttccatggagagcgtgcccgaggacgccagcgtggtcatgattaacgcgccgaccagcgatttgagcgccgacgaggccgaaatgctggttcagtatgtggaaaacggcggacggctgttgctgctgaccggctacatcgagcagggaaaaatggagaatctgctcaccgtgaccaaagccatgggtctgaccgtcggtcaggggctcatcatggagggcgacggccagatgcatctgaaccgttatccccattatctgctgcccacgttggaaagccacaccatcaccagcccctttaccagcgggcggtactatattctggtgcccatggcgcagccccttgaggagacggaggattcttccgccgcggtcacgtggttgctgaccacctccgaaagcgcctataccaaggcggcgggcatgaacgccaccaccgtggaaaaagaggacggcgacgaggaaggccagttccatgtggcggccgcatctgagctgggcgaagggcggctggtgtggatcgcttcgtcggaatttttggacgacaacgtgaacgccatggtgtccggggccaacggcaatctgctgatgaacgccgtggactggatagcggggcaggaggagaccatctccatccgctccaagagtctggatgaggacggtctgaccgtgaccggcgcggaaaactccctgtggagcgccgtgatgatcggcattctccccgcagcgctgatcgcgctgggcattgtgatctgcataaggaggaaacggcgttgaaacgtggcaagagagcattgattctggccggcgtactggccgtgctggtgctggtttacgtaggcgtacagaagggcgtatcctcccagcccgaggctgtgacggaggaaagcggatcctatccgctgacctcccatacggcggaggagctgacgagcctgcaatggacttccggcgatggggaggagcaggagaccttgcactttgtcaaaacggacggccaatggcgcgtggagggagacgaagcctttcccgtgaagcaggacagcgttgaaggtctggcggaaacgctgacggcgctgaaggcggaccgaaagctggaaaatgtggaaaaacccgaagattacggcctgttggaaccggcttttaccctgacagcgggctggagcgacggcacggaaaccgtctattccatgggcgatgaaacgcctttcggagacgggtactacctgagcctttccggggaggacggcacggtctataccgtggcggatgcgctgagcggcgatttcagcggaagcctgctgtcctttgcccagtcggaagaactgcccgctgtggaaaacgtgacccggctggtggtgggcgatacgctggacgtgaaaggaactgctgaaaagacggaaggcgaaggatcctccctgcgctggacgtggaaagctaccggcgaaaaattggacggcagcgaagtggaagccctgattgacgaagctaaaaacctgagatggacggagctcaaggcggtcaacgccgatgatgaagccctgtccggctacggcctgacggacgaacaggccacggccatcaccctgtacgatggcgagaccatcgtctggaagctgctggcgggagctgaagcagacgagggcgggcactatgtccgtctgccggattccgccatggtgtacacggcggatgttgcctctctgctggaagcggacgtcggctcgctgtatgacgctgcgctgaccgatctgacagcggaagaagtcagcacgatctccgtcaaggcgggcgatcagctgtgggagtatgccgcagacagcgacgaaacggcggctgcggaggaagatgcggcggatgagacttccgacgcaaacggcgataccgatacggaaaccgcagccgaaacgccccgctgggagcagctgtttgagaagctctccgccatgaaggccacaggccgcgtcgccgaaacgcccggcaccacgccggtactggaggcccagatcgtcaccagaaccggcgggaaggaaaccttcgctttcttcctctacgatgaaagcaattatctgatgcccatcaacgagacgacggggtatcttttctccgccgacaaggtggatcagctgctgcgcatcctgcgcctgtgggacgccgaataagggaaaccgggagaggagccgcctgcgcaaacgggcggctccttcgtgccttccaaaaaatccttctcaaaccgttgaaaagattgtttttttcttgcattttgcgaataagtctgctataatctacccgattacgcacctttgtcgatggcgcgtttgtgcttcgcctgacggcggagtgaccgcgctgaagcgacgcaaagggtggatacaacaaggaggaaccccaaatggcagttatttccatgaaacagctcctggaagcgggcgtgcacttcggtcatcagactcgccgctggaaccccaaaatggccccctacatcttcaccgagcgcaacggcatctacatcatcgacctgcagaagaccgtccgcaaggttgacgaagcctacaatttcgtgcgcgacctggccatggaaggcaagagcatcctgttcgtcggcaccaagaagcaggctcaggagagcatcgcttccgaagcgcagcgctgcaacatgtactatgtcaacaaccgctggctgggcggtatgctgaccaacttccgcaccatccgcacccgcgtggagcgcctgaaccagatcgacaagatggaacagcagggccagttcgagctgctgcccaagaaggaagtcatcaagctgcagaacgagcgcgaaaagctggaaaacaacctgggcggcatccgcgaaatgaagaagctgcccggcgcgctgttcatcgttgaccctcgcaaggaacacatcgccgtgtccgaagcccgtgctctgggcatcccgatcgtcgccatcgtggacaccaactgcgatcctgacgaagtggactacgtcatccccggcaacgacgacgccatccgtgcggtcaagctgatcgccggcaagctggcggacgccgttctggaaggcaagcagggcgagcaggacgccgccggcgaagccgctcccgaagaagaaaccgccaaggtggaagaataattcagcacaaagactgccagagggaagcttctccctctggcactccctgtttattttattaaaaaaggagagatccctatggcgaatattaccgctcagatggtaaaggaactgcgcgaaatgacccaggccggtatgatggactgcaaaaaggccctgatggaagccgagggcgaaatggaaaaggccattgaatggctgcgtgaaaagggccttgccgccgccgccaagaaggccggccgtattgccgccgaaggtatggtcgccagctatgtgtccgacgacgcgtctgtgggcgtgatcgtggaagtcaactgcgagaccgattttgttgccaacaccgacaacttcaaggctttctgcgccaaggtcgccaagcacatcgcgctggccaagcccgctgacgtggacgagctgctggctcagaagtatgtggacgacgaaagcaagaccatcaccgacttggtgagcgatgcgaccgttgctatcggcgagaagatctccatccgccgcttcgctcgcttcgagaccaaggacggcgctgtggaaagctacatccatatgggcggcaagatcggcgttctggtggagaccaagaacgacaatcccgctaccttctccgcgcccgctttcaaggcgttctatcatgacgtggccctgcagatcgccgctgcccgtccttcctatgtccgcaaggacgaagtgccctccgagaacctgaacaaggaaaaggaaatcctccgcgctcaggctctgaatgaaggcaagcccgagaagatcgtggacaagatggtggaaggccgtatcgaaaagtactacaaggaagtctgcctgctggagcagcccttcgtgaaggacagcgacaagagcatcaagcaggtcatggccgagaccgccaaggagatcggcgcgaacattgatatcgtgcgcttcgagcgttttgagcgcggcgaaggcatcgaaaagcgccaggacaactttgcggaagaaatcgccgctcagatggctgccaaggcctgaaaccttgacggtggactgctcgtcgtaggcgcgcagggagctcgggagacatgaaagtggacttcagagttaccgccgctcgggcaggggtagtacccctgcaccccagaccgcgcccaaagggcgcgggactagtcgtgggaaagctgcttggcggtgaagttaccgccgctcggcgacagacctcgcggctcgcagcttgggtcggaatttcatcggtgagttttacatgaaagtattgatttgtctatgacaaatgcaaaccccatcgcccaacgacctgaccgcgcttgcgcggtcagcggtgggattctcaagggttataacctttgagtggggattttcgggggcaaagccccagaatgaagcaaaaaagcatctgtcaatgacaatgcaaaccccatcgcccaacgacctgaccgcgcctgcgcggtcagcggcgggattctcaagggttataacccttgagcgggggttttcagggggcagagccccaaaagaaccaataatatttgccgcaaggtaaatgcaaaccctagcgtccggcgacctgaccgcacttgtgcggtcagcgatgggattctcaagggttataacccttgagcgggggttttcagggggcagagccccctgaagggccgttgcacgaaaacgaggaacttgaggggctttggccccgctccctccgttcttcctgcagcggcccttttctttggcacaggatatgcgaagaagggggaaacaaaatggcgacttatcatcgggtcattttgaaactgagcggcgaagcgctgggtgtggacggacatggcttctgccatgaaaaatttgaagaggccgcgcggatgctcatcgacgtgcagaaaaccggcgtggagctggccgtggtcatcggcggtggcaacgtgtggcgcggccgccggggcgccgccatgcgcatgggcaccgtggccgccgaccagatggggatgctgggcaccctgcagaactgcctgtatatgcgggatacgctggaacatctgggcgcgaaggctgcggtcatgagcgcactggaaatgccccggatcgccgaaacctatcataccgtcgccgcgatggaaaagctccgtcagggtcagatcctgttgctgagctgcggcattggaaacccctgcttcaccaccgatacctgcgtggccctgcgcgccatcgaactggaatgcgacgcggtgctcatggcgaagaatatcgacggggtgtataccgccgaccctcacgtagaccccagcgccacgctgatctccgatatttcctacggcgaagccgccgaacggggcctgaaggtgatggacgctaccgcgttcatcctgctgcgggataatcacgtgccgcaggtgcgcgtgttcgggctggaaccccccaccaatattctgcgcgtgctggagggcgaccccatgggcacggtgctgcatccctgaccccgaaagaaaaaggagaaacgaagaatggacaccaagcaaagccttgctaatgtgatcaccgaggccatcgaggcctgttaccccggggtggacggcctgccggatgcgtctgcgatcgccgacatgttggaaattcccccgcaaaaagaaatgggcgattacgccttcccctgctttaagctgagccgcgccctgcatatgggcccgccacagatcgccggaaatctggcgggagccatttccgccgggcacctgtgcgaagccgagcagcagggcggctacctgaattttttcctcaaccgggataatttcgcccgggaaacgctggaaaccgtactgtccgccggggaaaactacggcgcggggcaggaaggcgcgggaaagaccatctgcctggactattcctccatcaatatcgccaagcggttccatatcggccacctgagcaccactatgctgggccacagtctggcccgtatctaccgcttcctcggctataagacggtcagcatcaaccatttgggcgactggggaactcagttcggcaagctgatttatgcctacaagacttggggcagccgggaagaggtggaagccaagggcgtgccagagctgacccggctgtatgtgaagttccatgaggaggctgagcagcatcccgagctggaggacgagggccgccgctggttcaaggccatcgaggacggcaacgcggaggcgctggagctgttcaactggttcaaggagctgaccctgcgggacgccaagcccgtttacgacctgctgggcgtgcagttcgacagctacaacggcgagagcttctacgtggacaagaccgaccgcgtggtggaggagctgcgggagaagaatctgctgaccatttccgacggcgcttccgtggtagacttggacgaggaaaagagcggaatgcccccctgcctgatcctgaaaaaggacggcaccacgatctacgctacccgcgatatcgccgccgccctgtaccgtaaggagacctatgatttcgataagtgcctgtacgtggtagcctatcagcaggatctccacttccgccagtggttcaaggtcatcgaaaagatgggctatccgtggtataaggatttggttcacgtggccttcggcatgatttcctacgagggccagagcctgtccacccggaagggacatgtgctctttttggaggacgtgctcaacatggccatcgagaaggctcgggccattatcgaggaaaagagccccaatctggaaaacaaggacgaagtggcccggcaggtgggcgtgggcgcagtggtctatgctgacctgcagaacagccgcatcaaggatatcgacttcagctgggatcgggtgctgagcttcgacggcgagaccggcccctacgtgcagtacacccacgcccgctgctgcagcgcgctgcggaaggctgagggtctggaacctgccgagccggactacagcgccctgtccgacgactatgcgcaggaattgctgcgccagctgagccgcttccccgagacggtgcgggaggccgccaaccgttacgagcccagcatcatcacccgggccgttaccgagctgtgcaaggcctacaacaagttctactatgaaaaccgcatcatcgtggacggggcccccgtgcgggaggcccgcatccgcctgaccaaagcggtgaaggataccattaagaccggtctgtatctgatcggaatcgaagcgccggagcggatgtaaaatgctgctgaccagtacgaaaaatccggtggtgcagtccgccaaggcactgctgaccgccaaaggccgccgggagcaggacgcgtttctctgcgacggcgagcacatgaccggcgaagccctgcgggcctgcccggaaaaggtctccgccctgtttgtggaggacggccagcaggagcggttcgccccgttgctggcgctggcccggcagacggaatgcgcggtctacgaagtgagcgctgcggtgctggaaaccatttcgcaggtgaaaacgccgcagggaatcgccgccgtctgcggtctgccgaaaccctgtccgctggaacggcagggacaaaagctgctcctgatggaaaacgtgcaggaccccggcaacgtgggtaccatcctgcggacgctggacgcggcgggctttgacggctgcatcctgaccccgggctgcgccgatcccttcgcccccaaaaccatgcgggccactatgggaagcctgttccgggtgcccatgacctttgtggaaaacagcgcggaggcggcccgctggctgcggacgaacggctgggccgtcatcggcgcggagctgcgcggccagcccttctatcagcggggtactcgcccggacaagctctgtgtgcttatcggcaacgaaggcgcggggctgacggaggaaattctggcccagtgcagcttccgctataagctgcccatgcgcggcggcgcggaaagcctgaacgcgggcattgccgcagcgatcatgatgtatgatctgatgaatcggtaaaacaaaagccgaagggctgctctcctgaaaaaggagaagcagcccttcggtttctttttggttttattttggttttattcccccagaagggaaaaagaaatttcatccccctcataggagaccgcgtagacaccgacaggctccggccagtcgcactgttcctccagccccagcgcttcgtcgatctgatcccaatagagataatcgtcgattcgaaggaaaagaaagtcgcagcggttccggcgcagcatgtcctggatgttttcggcggtcagctcacccagacggtcgtaatcctccacggggtactgcacgatatgcatccgcatgggcagagcaaaatattgataggcgtgggtcttgccgctgctgctcttgatctctgcggatgcatagctgcagtcgatcagcagggcgtggcggttggcgtattcctcaaaggggaaagagtccagctcgtcttcgtagtattcgacggcaaaggggcgaaggaagccttcgtcgttctggacgggcaactgggcggcgaaggcctctggcggctggatgagcagcatcaggggcaggatcgccgctaccggccaatgggcgggcagcttcgccgggaaacgccaggcctcgtcctgccccgccagcaggcggatcagcagaaacacgaagagcagcagtaccggcgtgaacgcggtgttcatgtagttcagggccacggcggcgatttcctcctgcaccacgaagccagcaatcagcccaacggtgtagcacagcgcggctacggccaaggccagcagcgcgcccagcgtccggcggcgtcgagccttgggctgaaagaccgccagcacgatcgccagtaccacgcctgccagcagccacgggtaagcgctgtgccagagagaatcgccgaactgagcgaccaacggctgcagccgcgcccacagaccgctgcccagggaacccatcaattcgccggtgcggggattgccgcccagcagactggcgagggagggcgcactgacactggaaacggcaggagtcagcccataggcggctttcgccagctccgcctgttcataggccagctgggaatggtagtgatacaagatcgaccacgagaaatgcacaatgaccggcaggagcacagccagccagctcatccagcgcagcgcccggacgggctggccggctcttttcacgccgggaatggaaaacagcatagacgcgccgatgaccagcgcgaacaacaggccggaatagatcttcatgccggtcaacaccgccgcggcgcaaagggagggcagccacgaggcgggccggtcgtccctgcggaagaacaggcacagaagcccggccgtcagcagcgccgccatgggtccgtcaccccgggtggaaaagacggtcagcccaaaggccgagaacagataggccagcacggccccggtcagtgccgggagccatgtgccttccagcaggtcgcccgtcgccatacaggcggccagaatcgccgatgcaatcaccatcagaagccccgcgtcctgccagccgaagacctgcaccacacagtattgcagcgccgccagcatgggaaaatagtcggtgtggctcatgttggtatccatgtggatggggaaacgcccgtccgtgtacagctcccggacgatgcgcatccagtaggaataggagtcatgatcggtgatcagcacgtctttcagcgcaaggaaacacccggcgcacaaaagcagccagatcagcagggaaggccgcagcacccgctgccgaagctgccgcttgtccagcaggagcagcaccagccctgccgccagcgcggccagaccgcccgccatgagaaaataggccgtcacctgccgcagcggcagcacgatcacgccgagataggccgtcagcagcatcccgcatacggcgcacagcagcgcctggcccagcctcagcgggcgcaccagcgccatccacgccagcgcccagcccaacagcgaggcaaaataccatccatctgtcattgcattccgttcccttctgggtgagataggaaaaagggactgcgcagccgcgcagtcccccagagaatagggcctcagttcccgttcgtagcggtcagcagttcgatcacgctggagggcagtttgctcagcacggtgtagagcacctgcgtggcgttggtgctgatggaggtaagatactcggtcagttcatcgtcgctcatctgcaggggctgcacggcgttttccgcggtggcggattcgatggccttcaggacgctgtcatccgcgttttcggaggtggtcacccgcagcgagaacagcgggcgctcggaagcggccagctccgtaatggccacggcgttctcccgggcgtacagggagaccaaccgctcggtctgatcgccctcggtgctgccggtataggtgaaggtgatctggttttcgtccgccagcatggccagccagccgtcggctttgctgtccgcgctgttcagcacgcccttgacggtcaggatgggttcttctttgccatcgtccacttcgttcatagcgccgtccagcgtataggagccgtccttggcggtgagtacgaaagccagatcggcctcggtcttgccatcctcgcccagcagcatggtggcgctgtggttgacggtaccgtcaacggtcaggcggttatacgtggcggtcatctggacgctttccttttcggcttcgccgtcatcgtccgtcacggtcatggcggaatccatggtcatttccagggccaccagatggctgtcgtcggcatacatggtcatgaccacgtccatcttttccatgttgtccatggcctttttcagctcggcagcggcttcttccccggtcatggagccggagtcggtcagcattttctgaacggtggtgctgctttgcagcgtggccacgtcgtccttggtcagggtgatcttgatgctctgggtggcagggtcgtgagcttcgctggtaaagctgccctcggtgatctccgcccggtccagaatgcccagcacgtagtccgccatcgcttcgtcgtcggcaaaggctttcttgatctgagcgcgcatttcttcgctgttgaacgtctcgtcgggcaggttgacggagggatcggccagcgccgtctccttcagctcgttcatcataccggcctggctgaaaagctgggcgatcatgggcttgatctggctgacaatttcttcgtccgcgctttcgtcggcagtcgccagctgggtcagcacctgaccgatgtcctcagcggaggcatagacgggtttgtcgcccagaatggcgctgtccagatacaggccgtcgccggtcatgcgcgtggcggcgctgaaaacgtcctcgccggacaggctcagcgtcagcattccgctgccttcgcccttcagaaagcgcacggtcagaacgtcgaacagatctttgatcgcgtccacagacgccatatcgtcgccagggatcagctgaaagctgtactcggtagcggccatggcgctcaggggcagcatggcgcacagcagcagagccagaaggactgccagcagtttgttttgtttcatcgttggttttctcctttcaatgaccgcttcgaacggttcctcgaaaccatcttcatcatacaacattcggaagcgtttgtcatgtgttttgggctgaaaaccggcaaatggagtgtaaaaccttccttttcggcgctgaacgcacccgccgcaggggaaaaacagggtaaattctggataatccgccgcctgtatgctatactagccaggataagggagggatggtatgcgctttaccaaaatggaaggcatcggaaacgactacatttatatcaacggtctggaggaaaccgttgccgacccggcagccctgagcgtgcggatgagccgccctcatttcggttgcggctccgacgggctgattttgattttgcccagcagtcaggcggattttcggatgcagatgttcaataacgacggcagtgaaagcgagatgtgcggcaatggtatccgctgcgtggccaagtattgccacgaccgcggtctaacggacaagaccgacctgaccatcgaaacgggcgcgggagtgaagcgactgcacctgaatgtggaaaacggcgagacggtcagcgtgcgggtggatatgggcctgccggaactgaacggccggaagatccctacaacggcggacggagaacccgtcgtcggccatgtgctgaccgccaacggccatgaatacccctgcacctttgtcagcatgggcaatcctcatgccgtcacctttgtggacgaccccgatactgcccccgtgaccacggacggcccggtgctggaatgcgaccccgtctttccccgaaaggccaatatcgagtttgtgcaggtgatcgaccctacccacgtgaaaatgcgggtctgggagcggggcaccggcgagacgctggcctgcggtaccggggccagcgcggtcatggtggcctgtgtgctcaacgggctgacggaacgccatgcggagatcgccctgcccggcggcaagctgaatctggagtggaacgagcaggacggccacgtttacatgaccggccccgccacgttcgtttatgacggccagtggctgcaggactgaaccccaagacagatgaacaacaaggaggaaccaaatcatgctgaaggtgaatccccattatgaaaagctgcccggcagctatctctttgcggagatcgcccgccgggtgaaggaatacggacaggagcatcccgacgcggagctgatccggctgggcatcggcgacgtgacccgtccgctggctcccgccgtggtggaggccatggaaaaggccgcccgggaaatgggccgggccgagacctttcggggctacggcccggactacggctatgattttctgattcaggccattctggataacgattataaaggattgggcattcaggcggacgaggtgttcgtctccgacggcgccaagtgcgatgtgtccaatgtgcaggagcttttctccgacgacgcggtggtggccgtcactgacccggtctaccctgtgtatgtggattccaatgccatggcgggccgggcgggaacctacgttcatgaccgctgggaccggctgtgctatctgccctgcacggcggagaacggcttcgtgccgcccctgcccgaccgtccggtggatgtgatctacctctgctaccccaataaccccacgggtacggtgctgaccaaagagcagctgaagccctttgtggattatgccaaggccaacggagccatcatcgtgtatgacgcggcctacaaggcctttatcaccagcggcgcgcctcggagcatttacgaggtggagggcgcgaaggatgtagccatcgagtgctgcagctattccaaaaccgccggcttcaccggcacccggtgcggcttcatggtcattccccatggggtgaagggcatgggcgctcagggccagccggtggaactgaacgccatgtggaagcgccgcatgggcagcaagttcaacggggtcagctatcccatccagcgggccgccgaggcggtttattccagagacggctgggcccagtgcatggacagcatccgctattatctgcgcaacgcgcaggtgatccgggaagggctggaaaaggcgggctacaccgtgttcggcggcgtggacgcgccctacatctggatgaagacccccgacggcatggccagctgggatttcttcgacctgctgctgaaccgctaccatgtggtgggcacgcccggcgcgggcttcggcccctgcggcgaaggctacttccgtctgacggccttcaatacgctggaaaagacgcaggaagccgtggagcgcattatcaagggataaaaacaatcatataagccaaaagagctttgaaaaccgttgtgggtcaggcagaaaggcactgccgcccaaagcggagatcaaagctctttttcatgtggaaggccataaaagacgcgaggtcaagccgctttttcagtcagacggagcagacagaccggctcggtgaagtccagcaggaaggagatctggccgtttttctcctgcacaggcagcggagtttccgcgccttcggcattcagcagtgcaaagccgtagttttggaaagactcggcaggcagcgtgaccttcatctgcccatttgcctgagacagacgacccgccgtttcaaacgcgacgctcagcagcaaagtatcgtccgccccttcgcccatgcgtaccaccgcttccccggcgggcaggcgatcggtcatgacggcgacagagctgttttccacaagcgccagctgcgctccgctacttctcttgccgcacacggggcagagctggaagacaaccgtcgcttctttgcccggaagccggcagtccatgaggatgcaatcggtatggctcgtatagccgcagccggagcgcagacagtctgcccggtgacggtttccatcgggctgccattcgccgaaccagtggcccaacttttccccttcgttcacggtgaagctttcgctgcagcgggcacaggtggaaaccgtatagccgtcggcggtgcaggtcggcgcgaaggtctgggacacatattcgtgacccagcgccggatcctccgaaaaggtggtgtagtcgcagcgggtgcagtcctcataggcgttccagcccgcgtcgatgcaggtagcgtccagcccctcatgctgaaccagatcgtggttcagcggtgcgatcggccaataggtgttgagatcgccgcgagtacagaccttataggggtgccagccctcctctgtgcaggtgggggcctgtccctcatattcgacaaaatcatgtcccagtgcgttcatttcccgatagggctttgtggaatagtcacagtaggcgcatttgttataggcatcccagcctttgtctatacaggtgacctcccgagccggatagcttcgcagcaaatgggaacccaatccaccgaaggaagaattacatttgccgcatttcgccggctgttggcaggttgccgatcgaacgatttcatgataggcaaaataggtgaagccacagctctgacattcggcttggtgccattggtcatctgtataacggtaagtataagctttcccagtgcattcgccgttgggattgcggcacgccagcgctgtgctgcataaaagggtcattaacagcgccagtccaagcgcgaaccagaacttttgggggattctaattgctgaaaaaaggcgggcttccgagccggtgtgcagttgcttcatccttgtttcctccctgtcggttgagttggttcgttttcagataggggatcgttgtacggggtaaagcggttttgcgctggcagtctgtcatcgttcttcatgggttccaaaatctgggcggctaagataccccgattatatcggattcccggatttctggcaaggctctttcactgacctttacaaaaatacgaaaatgcaaaaaagaagcgtccgaagacgcttcttttagactgtcgaaaaaccctgattggctgccatcgcccgtgaacagcgctctgcggcccgctcccctacggggcgcgggcttcggactgcggtagccctttcagggctgtcctcgtcctcggtgctgcgcacccttaagctggttcgcggggaaagtgctgcggcataaggcactgagtctccgttccgcaacctcaatcgtcgtctttggcactgccgtgccaaatcctcgtt

SEQ ID NO: 4383 - DNA, 32759 bp, Unknown
  16S sequences of unknown bacteria
ttattatggcatggattagagagggcagaaaggtacctgctttttaccgtttacgagaggagatcataaacaggcattaataaaagctcataaagcctattgacatagtatgaaatatgacataatatgcattttataaagcgatctatggttattttcaaacgtatcttatagatcagatggatgcacacgagaggaaaaataaaaatgagcggaaataggaacagagaaatcataaagcaggcatttgttaaatcaatccccatcatgtgtagttatctgtttgtcagcatggcatatggaatgatgatggaggcagcgggattctactggtatgattcactgcttgtaagcctgaccgtttatacaggagcctttcagtttgtactgatcacatttctaagcagcggagcctcctttgttaccgtgggacttacggcctttctgatgaacagcagacagtcattttacagccttacatttcttgatgaatttcgaaaaatgggaaaacgtcttccatatatgattcatacgatgacggatgaaacatatgcagtgaatctgactctggagtcagagggaaaagaaaaagaagacacaatgtttctgattgcattcttctcaagatgttactggatgattggaacagtggctggcggcgtgcttgggcagattattccatttgatcttgcaggaattgatttctgtatgaccgcattgtttattattatttttatcgatcagtgggagaaggcgaaaaatcatcttccggcgttgatcggggtgggcgtggcagtggtctgtctgctggtgattggccagaaaaattttatgttaccggcattaattattgtatcggggattttattgtttatgcgaaagaatgaggaagggagagcatagaaatgaatgaggcaaggatgattggtattatcatactttcagcagtgattacattttcactccgtgcgtttccctttcttatttttcggggaaaacgcaggatgcctgagcgcttggtttatctgggaaatatcctgcctgcggctattatggcggtattgatcgtctattgtctgaaagatgtggcaggaaactttgaaacgtacggaattccacagcttacagcggtgctggtcgtggctgtcagttataaatggaaacataatacattcgtttcaattattttggggactgcatgtgatatgatcctgatgcaggtattatcatctgtatagacagattttcaagcgcgttctgagctgataaaacaaaaggtattatagtttcgttttgtttatccggttaatagtattactgtattggctttgcttatatctggtattatagcaatcctctaaaataatgcatcttaatccagcccatcaaagtgtgaaatactgcgtcagcaaagattttcaatgagaaaaatgatgaaaaattgatagacgaaaaagatacccacttgttattccagtgttgatttgatatgcttatctgagaagcagacagttgcggaaattggggtatgattatggaaccaaaaggaaaaaaggtatatacgatcgatgatatagccagagagcttggcgtgagtaagacgacagtttcccgtgcaatttccggaaagggacggattggacagacaacaagagaaaaggtgctgagttttattgaggaacatgattatcgaccgaatgtgatggcaaaagggctggcacagcgtaagacgtttaatctggcattgcttttgccaaaggattatgcggtaacggaatttcccttttttaaagattgtatgcagggcatttgtgaaatggcatccagccatgattatgatgtgataatttctatgatagacggagatgatctgtcgcagcttcagagactggaggcgaatcgaaaggtagatggaatgattctgagccgggcggtagaacattcgaaggcacaggagtatctgaaaagttgtaaggaaccgtttgtggtaatcggaccggaagaagatacgcagattgtttacgtggataataagaatctggaggcaagcgaggagcttgccagtattatgctgatgaaaggtgtacagaagctggcattattgggaggaaatgagtctttcagtgtgacaaagagccgttatcagggatatgtgcaggcacatgaaaagatgggaaggcaggtgcatacagaattgatttttatggattgtgaaaatcaattaaaggtatccggggctgtccggcaaatactggaagcaggcgcagatggtattctttgtatggatgatgcgatctgcacaatgtgtattgaaagcctcagagagttaaaggtgcagatttcttccggaattcgggtggcaagtctgtatgacagtaagagcctggaatataacaatccgccgatcaccagcgttaagtttgatacagtcagattaggaaaaatggcagcaggaaaactgttaaaaatgcttggggaagagctgcaggaggatatgcagccattgaattatcaggtagtgctgagggaatcgacacagtaaaatcagcaggaatgtgaagcggattgagaatatccgctttgacatgagtcaagcaagtccccatcagctgcttcaattgtgaggagcaataagcagttgatggggacttgcttttatgtactatgtgtattctttttttacagacgtttattctgccattttgtaaaaaaaattacgtttccggcttatcacttgaggaaccgaatgcaatgtacagttatccaaaggagcaagcgattgcgcaatagtaaaacatacaaaaaattaattgtgcaatatgcaatgaaagcaaggactaaattcaaggataatacacaattgacattaattaaactattttatatactaagaacgagcgcaagcggttgcgcaatagtataaatacgtgattgagatcaaataacagttgcgaagcctgcaagaatagaggagaatactatgggatttagaacggataaattacttcatggaggagattataacccggaacagtggctgaaccgaccggatattctggaaaaagatctggatatgctggaagaatccggctgtaatgtggttagccttggaatcttttcctggtccacactggaaccggaagaaggcgtatttcactttgcgtggttaaaagaaattattgatcagctgtatcagagaggaatctctacgattctggcaacaccgtccggtgcccgtccgaaatggatggcagagaaatatccggaggtgctccgcgtggatgagaccagacacagacagttgtttggttttcggcacaatcactgctatacttcttcggtatacagagaaaaagtacataccatcaacaaaaaactggcgcaggaagtggcggtacatccgggcgtgattctgtggcatatttccaatgaatacggtggggaatgtcactgcccgctgtgtcaggaggcatttcgcaagtggatgagagaaaaatatcagacgatcgagaatctgaatgatcagtggtgtactactttctggagtcatacgtataacagctttgaccagattgaaagtccttctaaaatcggtgagacgcagcttcatgcattgaatctggactggaaaagattcgtaacgcatcagacagcggattttattcatgcagagatcgctgctattcgcgagggaggaagtacgctcccgacaacagcgaatctgatgcactattttggcggactggattattttaaaattgcaaaagaaattgatgtagtatcgtgggatacttatccgacctggcataaagagaaagtgattgatactgcttatgataacggtatgtgtcatgatctgatgcgttcgctgaaaggaaaaccattttttcagatggaatcctgtccatcatctacgaactggcaaagtgtcagcaagctgaaaaaaccaggcatgctctttgcacagtctatgcaggcaattgcccacggaggagaaggcgcactgtacttccaggttcgtcagagccgcggtgcttctgaaaagtttcatggagcagtgattgaccattatggcggcaatgataccagagtattcaaagaggtatcaaaagtaggagctgctttaaaagaactgagggaactggcaggaaccactatggacagcccggtggcaatgatctatgactgggacagccagtgggcaatggaagacagtcagggtccgagaaataagggactgcattatctggaaaatctgttgaagtattacagaggatttcggaaacaggggatcagcgtggatctcattgatcagacctgtgatgtgggaaaatacaaaatactggttctgccgatggtctatatgtttaaaactggatttgcagaaaaagtacgtgcttttgtggaaaatggcggtaccctgatcaccagctactggtccggcatcacagatgatacggatcggtgttatctggaagggacgccgcatggactgatggatgtattgggaatccgcagtacggagattgatggtttgtatgactgggaggaaaatacattcgttccgctggaaggcaatgagctgggactgacagagacctatacctgcaaatatttatgcgatctggtagaactgcgaggcgcaaagagcctgatggtttacggaaaagatttttatgcgggatatagtgcactgactgtaaatgagtatggtaaaggaagagcctggtatgtatcagccgatgcggacagagatttttttgctgatgttctgaaaaaaatactggaagcaaatcagatcagctgtggtgtaaaaggagatattccggatgcgctggagattacggtaagagaaagcgaagcggcaaaatattacctgtatcagaattttggtacagaagcagtggagctcccggtgccggaagaagatgcggtgtggctttatggagcaggcgataccccgttggatgtctatggactggcagtggcaaaagtgatgaaataaaaaataagcatccgtatcaaatgagaagacaagacttatactgtgacggcagtcatgatataagtctttttttatctcagttgagaagattctcacatacgttcggcttgaactcgaaagattttttatgattattcttttggttttgttgtacttttcaaaataccggaagagcgttataataccagtcgtgaacacggatacaagtagagttcagctgtaatagcgacatgaaaatataaaggagaaaaccggtacacatgaaaagaacccccaggattatggttgtcgatgatgccaagatcaatcgtcagattctgatggcaattcttggcgatgaatatgagtatgtggaagcagaagatggacgtcaggcaattcacatgctgcagcaggatcttaacatagatctgatgcttttggatatcaacatgccggaaatgaacggatttcaggtgttggaacggatgaataaatttcagtggattaaagagattccggtgctcatgatatcttcagaagagaaaagagataccattgaacgggcgtatatctttggtgcacaagattatatccgaagaccatttgatgcttttattgtgcgaaggcgagtggagaatattctgaatctgtatgaaaaccagaaaaggctgaagcagatggtttctgaacagatctatgaaaaagaagcaaatagtaatctgctgatcgatattttgagtcaggtggtagagtttcggaacagtgaaaaccgagaacatatcattcatatccggacgataacagagcttttgctgcatcggctgatccaaaagacggatcagtatcagttatcggagacagatattgcaatgattatgactgcgtctgcgctgcatgatatcgggaaaatcaatattccagaaaatatattaaataaaccggggaagctgacttcggaagaatttaagattatgaagacccatacaacaatcggcagcgatatgatccggcagatgaccaccaaatcagaaaagccactgcttcatgtggcatggcaggtttgtagatggcatcatgagcggtgggacggacatggctatccggacggactgattggggaaaagattccgatttcagcccaggtggttggtatggcagatgtatatgctgccctgaccagtaagcggtgttataaggatgcttatgatcacgaaaccgcaatggagatgattttttccggtgagtgtggtgcctttaatccgctccttttggaatgtctgagtgaaatagcatcggagcttcgggtggcggtacagtatgatgccagagatactatttatcggaatgaggcagatcgcctggcagcggaagtgatgcagaaaacagaggtgccatgcagtgaccgtgcgcagcatatgctggaatccatgcaggagcggatggatttttttgcatctttggagggaggactccagtttgattatgacgcggtttccggcctggcaaatgtagtgaactggaatgagccgccgcaataccgatattctgtcataaatgttgcggatgaaaccagctttcgatatcttagtcagaaggattttcaccgcctgaaggatgcgctcgatgcaacgaccccggaaaaccgggaattttccatgagtattatgatgccgtggggaaatgaataccagtggtgtgatctccgaatccattctctgtggtcgccactctcgccggatcattatgtcggggcaattggccgcttggtcaaacctcagcaggtatcagcgggaattccgatgcttggaagatttgcaaacggagaatctgcggatggaaaggatataagagtagcatttgaacggctcaggcagatttttgatgtggtacgtctggtggatccgacgaccaatatggttctggacgtggatgacaaaggagcattaaaaccaacagacagtcattgcgccgcattctgggggaatgatggaaattgtgccaattgtatttccatgcgtgccctgaaacagaagacgatgctgaataagctggagtttaccagaacggatatgtattatgtagttgcaaaatatctctgtattaacggaacaccgtgtgtgatggagatgctttcaaaaatgaacgagggacgctggatcgatgcaaacggaaccagatttttactggataaaagtcatggagagaacagagagctgttttctgatccactgaccggcgcatattccaggcgttattttgaggcgtaccgtacgcatctggaaggaatggagtgtgtggaaattatagatgttaaccggtttaaacaggtgaatgatacgtacggtcatccggcgggagatgtggtgctgcgggacatcgcttcagcaatccggtcctgcatccggaataccgatattttaatccgatacggcggagatgaatttttgctgcttttcccgaaaatgtcagaaaaatacatggcagagaaaaacaaaaagatcaaagaggcagttgagagtatcgtgctcacggaatatccggggctgcatttgtctgtcagtatcggtggtgtctgtggggtacatccgattacggaagcaatccggcaggcagaccagttgatgtatgagaataagagaatggaatgaggcagaatacaagtctgaaatagatccgcgaaaacaaactttctgttgttgtaaaaatgatttataccggagaagctttgactgctcaagaaccctggaaagcctgataagatgcaggtttttcggggttcttttttcaaagaagtcattagacttgcaggatactgacaaagaatccggcttcctttatgctgaaagcagagtttctgatcgcaggaataatatagcagttctgcaaagcactgcattcaatccgattcatcagagtgcgaattgctgtgttattttatgaactgctaaagctaaagaaggaaaaaaggaacgggtcacactggtcgattacaacagcgtacataccctgcaggagatccgggaaggtgccggggtatatattacagtgaaaaagaaggatatgcggcgccttctttctgtttgctcggatacggatagcagtaacagagctgcacttgtgtttgcaatcgtataatctcgctaaatgtgctttctcctcttccggcaaaaagactccgacctctaaggggggagatgaattgcgtccattatattacatgacaacaatatgtatcaatgttataatgtgagtaaagtatgaagacataaaaaacaataaacagaaaataaagaacagaaaataaagaataaagggtgggatggatgaaccgcagaaaaacaggttatgcaatcggtacattgatacttcttgtatatgcatacgttgcaaaagaagcagccaggaatattgaaactatttttttggagaccatcgttcagttcagcaggcatctgatccatatcagttttgtttttatgtggatgatatcggtccgtcagcgcattatgcagaagaaggtccgtcaatatcttcttgctgttggtgcgctggtggtattctggctgtatgtacgcacctgtaagtggatgtttttttcttccgatctcgtggtaaaacgttatttatggtacacctattatatcccgatgattttaattccattatttggcgtatttattctttcgtatctgggaaaagaagaatattacgagatgccgtcacgaatgaagctgctgtatctgccggcggttttcctgattctggcggtatttacaaacgattttcatcagctggctttccggtttccggaaggtcagccgttttcagatgaacagtatacatacggcattttgtatatggctgtcctggggtgggatattctgcttgggctgtattatatgattggattactgcgcagattccgtattccgtcaagaggctggatcggaaaacttccattgctcgtgcttgctgctgcgttagtgtttacggcattatattgtctgcagatcataatatatgatctggcagctgtggattgtggatttattattctgctgctggagagctgtattcaaagtggaatgattcgttcgaattcaaattttgaacttctttttgaaatatctgatattgaagcacagattacagaccgtgacggaaagatctattgcagctcaggtagtatttcggcaccacaggcgcatgcaagaaaaatgattacggatctggagcatatgggaacaattctggagggaaaaaaattaagcggcgatgaaattacaaatggccgtgttttctggtgggaggatatcagccagatactcagctataccgaaaagctggaaaagacgggggcgcggctgtcagaaaaaaatgagcttttgaaatcggagctgattctgaaagaaaaacagctgcatattacagaaaagaatcgattgtatgaccaggtagcaggagaaatttctgtctggctggatcggctggaagagttgcttcagtcatccgtggaatgtgatgcggaccgaattgctcagatctgtgttttgagtgcgtatattaagcgccggagtaatttgcgccttctggcagaaaactcagatcagatggaagcaaaggaactggagttttgtattttggagtctgtggaaagtatcaggctatacgggcgaagctgctcttttcgcagtgagtgccatggaatgattgatgccacggctatgattgcctgttatgatgcgtttggagagatcatctggcatattttgaaacagacggattccttgctgcttgacctgcatgcagatgcacagggcattcgtcttcgtatgcagatggatcatccaaagaaaaaagctctgccggagcttccggcggtctggagagaggctggaggagtctgtcgggtatatgagggagaggatatgagaaggattgaactctgtatgaataaaagcaaatcagggttgggaatcttttccgggaatatatgaaggaggtgcatagacagtgatagggacggatagaggaacaggtgtggtcatgatgatatgctatgcattgtttttacttcagttcggctgctttctgatggagcttgcgatcagaagccagcatgtgcgaaaaaagcggatcttactgctgcttctgacaatgacacttattctgattttgcgcaaatggaagagacaatggatttcatcaggggtgcctggtgcagaaggggctgtatacctttcggaagaaagaatgattccatgtcttttcttgattcttgtcctgatcacagcaggaactgccgcggcaatctggaatacggtgcgctgttatcatactacgctgaaccggtcagcaataaaggaaagtgcagagcatctgcagatggggctgtgtttttccaccgcagatggatttttgctgctggcaaattataaaatggaacaactgtgtatggatttgacgggacagtatctgcaggactcggaggttttctggaatatgctccaaaatcagcagccggatatcaatgcggagatattgatgtatgagagccgcccctgttttcggcttgagaaccaggaaatctggacatttgagcggaaggtgctacaggcagggaatatggagattattcagatgacggcagtggatgtttcggaattatataaattgtcagaggcgctggaaaagagcaatttgcagatgcggaagcttcaccggcggctgcatcggtatgaacagaatatggacgattatgtgaaaagcagggaagtgctggaagcaaaaatgcagattcacaaaaaaatgggacaggcgcttcttttgtcgagagcatttctgcttcagaatgatggaaaaataacatcgtcggaggttttgaataaatggaaatacgttacgatgtttctgaagaaagaaattcagatgccggaagagccggatgaatgggggcggctggtaaattcggcgacagcggcaggggtaaaaattaaggttgagggtaagcttccgataggaagcggacggatggagcttcttgcactggctgctgcggaggcgctgacaaatgcagtgcgtcatgcaggtgcagatacactaaatgtccacctgctctatcatccggataacagcctgactgcagaatttacaaataatgggcgacagccacagaggaaaattatagagggaggcggtcttggaacgctgcgagtgcggatcgaggagtatggcggtatgctgcagattctttcgcagccgcggtttatgctgatccttgatctgccggagaaagggggaacagattatgataccggtacaggtactgattgtagaagatgacccgatgacaagggccttatttgaaattttcataaaggaaagcggacgatatgcggtggcaggttccattgaaagcgcatccatggcagaattattctgtctgaccaggagagtggatctgattattatggatgtttgtaccgctttgcatgcgagtggcttgcttgcagcagaaaaaatcaaaagaacgtatccaagaatcaaaattgtaattgtgacgagtcagccggagtgtgaatttgtgagcagggcaagggcagccggcgtggatggcttttggtacaaggagccttcggctgaaaaaattctttctattttagatcggatcatggagggagaacagatttacccggagattacaccggatccggttcttggacaggcgttccgacatgagtttacggctcaggagcttcgggtgctgcgggagcttacgtgtggggacacagatgaagaaattgcagctacgcttcacctttcgacatggacggtacgaaagtatgtgaagcagatgcttgaaaaaacagatttcaaatcacgtacacagctggccgtggcggcaagagagtgtggtctggtaattaaaggatactgaattttatttgccaattattgcaaagagtactaattttaggataggatacatgcagaaaacaccatataatgtatacataaagaaacaaaaaaggaaaggaacacaaaaggatgaattcatacctgggaaataaagccggaaaaataaaaaagacatcatatctgtggctggttgtttgtgccatttttgcagcatctgcaggatctgtgctgattgattatataagatccggaaaagaagcactggatattgttttggcaatactgatgaccggattgtttatctggccgatcgtaagaattatacggaacatactattttgccggagtgcacagaagattgcagggtggttttattactatgaggaagacgaagttcgttttgaaaagctggagaaggagcttggaaaaaatatagtcaggaaaatcacgctgctgattcaaaagggttatctgaaaaacctgaaaccggatcttgaatcgggcagtctagaaatcatagcatcaaacaaacaggtagaggatcagatatatgagataaaaatatgcccacattgcggagcaaagaagcgtacggtgaagggaagagtctgcaggtgcgatttctgcgaccagatcatttaaccagggttggacagagaagcggattgcgaatatccacagtttatacgttgatgaaattcgggtgcaactgacagaaaagcggtcacaaaagcaagtgcagaaaagaccccgagagtacattacaaagaaaggaggacggaaatgggatttttagggaagatgtttgaaaaaaaagaatgcgcgatctgtggaggagagataggtcttcttggaaaccgtaaactgaatgatggtaatttatgtaaagattgtgcatcaaagctgtcagtctggtttacagacagaagaaaaagcacagtggaggacattagaaagcagctggaagaccgtgaagaaaataagaaaaagatacagcagttccagattaccaagagctttaagggcagcgccaggcaggtttatattgacgaaacgaaaggctggtttgcaattgccagcaagctgagcgtggaagaaaatccggatattctgaatctgacacagatcacaggctgccgtttggatgtgaaccagaatcggacggaggaatattataaggatacggaaggaaagaaccagagctataatccgccgagatataaatattcgtatgattataaaattgaactgtctgtgaatgcaccatggtttgatgaaatgacacttcagctgacgactttttctataccggagcaggacagagaacggattatggagacagagaatctcggaaaccggatcattgcagcattaacaggaagaacgcaggtggctgatagcggtaccggaaatcctgcatacgcgcaggaaggatatcagccaaactatgcgccgtccggagaaatgccgggatacggagccggataccagccaaattatacgccgccgggatatggagccggatatcaacaaaattatgcgccgcctggaggggcacagggatatcagccaaattatgcaccgcctggaggggcacagggataccagccaaattacgcaccgcctggaggggcacagggatatcagtcgaattacgcaccgccgggaggaacacagggataccagtcgaattacgcaccgcctggaggagcacagggatatcaaccgaattatgcgccgcctggaggggcacagggataccagccaaattacgcaccgcctggagagacgccggctttcggtcagcagatccgctgtgataagtgtgggtggacgccggaaaatacagatcaaataccgaaattctgtccgaattgcggggatcggattgactggaacgacgcactgtagaagcgcatcagacggaggtgtgccatgaaaaagagaatccgtttactgacaggtattataataatatgctgtagctgtgtggccgccggaaaagaaaatacaggagaatcggaagctgatggtttttacagtggccagacagaggataccaaaaaggcagcagaggttataaatcagaatcttgtagttatgccgtatgagccattgccggaagaggacttcgcatttgatcctgatacgggaacgatcatgaagtataaaggagatgcggtggatgtcatcataccacgctcaattggcggaataccggtggaaaatatttcttatcatgcatttgagggcacaagggattatcttcattccgaaatgatgacgaatcagaaggaaggcgactgggttccgatgaggtgcctgatccttccggaaacactcaggtcgattgaggacagtgcattttcctactgtcaggatctggaaacagtgatctgttatgctccgctggaaactacaaacaaaggtgtgttcagggagtgtaccggattgaaaactgtaatttttgtgaacggtgtgcgtcatatggataattatctgtttggccagtgcagaagtctgaaaacggtgtggtataaggatcaggctgaccgtatcggaatacagtgcttctccgatacaggactcgaagagctttgtatcagtgcaaaagaaattgacagcggcgcatttatcggaaatgaaagtttgaaaacggttcatatccgaagtggagttgaaaggctgcaggcgacggcctttgtttcgaatccggcgttggaaacggtatgcctggagttttgtgatccggcggttctggaaagtagtctgaccaatctgaacaatgataaggcagtcattcttgtgccggaggagacaacggatgagcagatacaaggtttcatgatgaagctcggaccatggggagcttctctgatcgtgcaagagacgcagatacaaagggggaagtgtcatctgcaggaaacttcgattcctgatgtgtctgaaattttgagggaatatggaatgtgatatcgccgtatttcgggattgtataagagctttttcgaaatacgaaacgataaaggcaaaatgaaacgtcaaaaaagaaaggagatgcaaacgtatgaaaaagatgatgagtattttggcagcaacaagcttactgatcggaatgatcgcatcaagtgcaatggcagcagatttgacaaaagaggatgttgcgggcagctggtatcttgtaaagattgaggcagaaggaatgtctctgtctccggcagatatgggatttgaaggcgttctggattttaaagatgatgatacatgggagctggcaatgacaggagaggatgaggaaaagggaacgtatgatatttccggagaagcggtgatcatgcactcggatacgacagaagatatttctcttacaatgggagaagacggatatcttgtcggagatgagggcggaacgatcatgagcttcggaagagagaaaccagaggcaacggattggtcatcaatcataggcaaaccatccgaagaggaagctgcgttatcggattttgcaggagtgtgggaagcctgtgcggtggaatatgatgaaatgacaatggcagccaatgactgcggtctgaaagcaacacttcagattgcagaggacggtactgcaacactggaaatgaaagattcgcttcatgacgaagaaccattgaagacagagctgaagggcactttggaggggcagaccctgacacttgtaaatgtagatgaggatgcatttagcttcggagtatttttaagcccggataaactgactttgaatctgcaggataccggtactctgagaaatatagaatatactatggcagaagagggcgaggagccggagataaacaatctggtttattttgaaaaaacaacggaagctgaataacagaaaaaagcaggatgataagcaggatataaagaatcagagggcggccgtatggcagccctctttcagatttaccggatatatcagaaaatcatagaaagtttttatcttccacccgtttactttttaacgaaaatgtattagaattcttatggaaataattataaaaggagacttagcaatgaatatttcaccattacagaaagcaagatatgaatattctccgaaacttccgggaatgctcagacacggcatcgccgatatctgtgtaaaggaaggagaggcaacccagagtgttgcagaccaggacaagatcaaagctcttttcccgaacacctacggaaagaatgagatcacttttgaaaagggtcagaacacttctgcagcaaagaagcaggtagtaggcgttatcctttccggcggacaggcaccgggcggacacaacgttatctgcggtctgtatgatgcattaaaggcaaccaatccggagaacgttctttacggattcaagggcggcccgagcggactgatcgaggacaagtatgtgatcttcgatgacgcatatatcaatgagtacagaaataccggcggttttgatatcatcggttccggcagaacaaagctggagacagaggagcagtttgaggttgcttctgaggtctgcaagaagcatggcattaccgcaatcgtaatcatcggtggcgacgattccaatacaaacgcagcagttctggctgagtactttgcagcacacaataccggcgtacaggtaatcggatgcccgaagaccatcgacggcgacctgaagaatgacgatatcgagtgctccttcggtttcgataccgctaccaagacctacagcgagctgatcggaaatatcgagagagactgcaactctgcaaagaaatactggcacttcatcaaggttatgggacgttccgcttctcacgttgcacttgagtgtgcactgaagacacagccgaacatctgcctgatttctgaggaagtagcagagaagaagatgtctctttctgagatcgctgattacatcgcagattctgtagcagatcgtgcagcaaacggaatgaactttggtgtagcgatcattccggagggcgttgtagagttcgtaccggagttctccgtactgatccaggagatcaatgagctccttgcaggaagcaaggcagacgagttcaatgcacttccgagctgggctgacaagtatgcattcatcgagaaaggtctgacaaaggcttccatggatgtatttgcaattcttccgcagacaattcagcagcagctgttcctggagagagacccgcacggaaacgtacaggtatccctgatcgagtctgagaagcttttctccgcacttgtaaaggataagctggaggcaagaagagcagctggtacatacaacggcaagttcaatccgcttcatcatttccttggatacgaaggaagatgtgcattcccgtcaaactttgatgcggattactgctattcccttggatacaacgcattcatgctgatccagtacggctacacaggatacctttccaaggtttccaatctgtccgcaccggcaagtgagtgggttgcaggcggtatgccgatcaccaagatgatgaacatcgagagaagacacggagaggacaagccggttattaagaaagcactcgttgagctggacggcgctccgttcaagtacttcgaggctcatcgtaaagagtgggcagcaaacacctgcttcgtatacccgggtgcaatccagtattacggaccgacagaggtttgcgatatcactacggttacacttgctctggagcatcagaaataaaaatcatgctgtgacgcagcacaattccccggcggattcggacagttctgaatccgctcggggaatttatttttgaagggatgattagacttgcacagaaatctactctagagcgtgcagaaaaaattccgggagtacataaaagatgatggagggaaaatatggatttcagacagattacaatgctgcagaaaataaagagcgggatggcgcagtttcaggcgaaccatccaaaatttccactgttcttaaaggcggtctcaaaggatgcgctggtggaaggaacggtgattgaggtgaagatcacaacgccggaaggaaaagagtactgcacgaatgtaaaactaaagcaggacgatattgcgttgtttgattcatttaaggcaatgcagggatgaaaaaagaaatattgcagttcacagcgaatcagtggattgtgttcggaatatagccatacaagtggaaatatggaagaaaaattccgtttcaggtcgggcgggagaagcggttttcatggggagagctccagatctggctggatgtggatcaaggaatgatacgaaatgcagagattttttcagatgcaatggatgaagcgtggattttgcaattgaaaaaagcattgtgcggatgtcattatgtgaaaaaggcactgacagaggttgttgcagaaacagcgaaaggtgtgaaggcaacggaaagacaaaaagagatggcggaagatgccatctggctgcttggaacactgcagggactggaatgaggaggattggatggaagaaaaacagaagtatgatctggtggtgatcggcggagtcccggccggctatacggctgcagtgaaagccgcagaatatggataccataccgcattggtcgaagcggattccctgggcggcacctgcttaaaccgtggctgtattccgacaaagacactactgtattccgcagaattgtatgaaaaactgaagaacggaagaataccaggcgtttctgctgaaaacatttcctgttccgtgtaagcactctgggatcggaaagccgaagtggtggaaacgcttcggcaggggatttggggaatgctgaaaaaagcaaatgtggatgtctatgaagggaaaggaaaaatcacagaccgtcacagcgtacaggtaaacggagaaattttaaacacagagaaaatcctgatcacaaccggggcagtaccgtctgttcctccgattccaggcgtggatgcaccgggtgtggtgaccagcgatgagcttttaaccgagtcaggcaagtcccctgcttcaattgcgctaagcaataagcagtgggtggggacttgcttgtatcaggagtggtacaagccactcctgataagctgcaaagcagctactcggttatgagcaagtagcgaagcggattgcgaatatccgctttgacactggaagggtccgctgccgcagcgtcttgtcattatcggcggcggcgtcatcggtatggagtttgcttctttgtatcaggcacttggcagtcaggtgattgtgatcgaggcgatggaccgtctgctcggaacgatggaccgtgaaatcggacagagcctgaaaatactgatgaaaaagcgcggtgtggagatctatacaggaacaaaggtagaacggattgaaatagaggatggactgagcgtgattgccacagaaaaggagcagacggtcattgccggagcagatgcggtacttgtggcggttgggcgcagagcgtatacagaaagcctttttggaaaggaactggacctgaaggtggaacgcggaaaaattcttgtaaatgaaaattctggcggatgaacagaccgggcagattgctggtgcacagctgatgtgtgaacgcgcttcggatctggtaagtctgtttggagaggcgcttcatctgatgcatggaaagaaaaaatgaaaacggacgcaaatatccgtttgactatgacaaaacgagaaaagatccagtaaagagagaaatcaaagatacaggtcagacaggggtgtgtgaaaatagagtttcacatacccctgtaattttttacgcctgctctccggccacaaaacgggagataatattccggtcgtctgccaggtggatgacgcgctccacgcgctcctcggtcgaaaggcggtcagccggtacacacagactgcggtcatcgacgacgatggcatccagctcataaccggtttcaaagctgccgacttttccaaagaactgtccaccgccctttgtgccaagatagaaggattccggtacggaaaggaaggaatccttcttttcgcttcgaagccactggagtttggagaggtagacggcctctgacatggcgcgaaagatcgagacgctgtagccgcctgcgatatcagagccaagtccgaccttgactccgagatccagcatctggcgaatcggcggaataccggccgcaacgtttccgtttgactgcgggcagtgggcgatcgtgacgccgcgttctttgatgagttccatctcatggcgggtcgggtaaataaagtgtgccataacggtgtgggaggtcagaagaccgaaatggtcgtagacatcaccgtcattgtcgtactgcggatagcggtcacgcacgatcgacatttcgccaagatcctcggagatgtgggaatgcaccggaagatcgaattcctgtgcgagctttccgagcccttcaagaacagaggtcgaacacgttggaataaagcgtggtgtgacggccggttttacgagatgaaaccggtctttggtatcttcgatccacttccgggtatctgcaagagactgctttggcgtctcgcagaggtaatccggtgagagggtgtccatgttgatttttccgacgtaggcaccaatctttttcttttcaaggatctccatcagaagctcagtggccggtgcatgcagggtgccgaaaataaccgcgcgggtcgtaccgtttttggcgagcgcatcagcgaatgcttcataataaatacgggcataggaaagatcagcaaaacgggcttccgttggaaatgcgtatcgatccagccattccatcagctgcaggtcaatgccgagaccgcggtaaacgaactgaggagcatgtacgtgcatgtcgcacaggcccggaaggatgagcgaattgccatagtcaagtaccgggacatttttatatttttcgggcaattcctgaaagatgccggtaactttgcagtcttctgagatcagatagctgtccgggtggcagtcaaatacttctttagtcggtgtatgcacgatcgtgccgtgtaaaataacgggattcaagagaaagacctcctttttgcagggttctggatgcgaaaaccgttcatgaaaccgtaagcggattgagaaggttcatttgattcagagccctttgtgatgaatgatgtatatttctttgaatatagtagcatcaattctgctccgggacaagaataaatacaattctcccattgtattttgttactattttcgatatactgtggaagaaaaagaattactgtcaggaaagacgacagcagttacggaggcggaatatggaaaacagaacgatatatgcagcgattctcggacttggaacggttggcaccggcacctggaaggtgctccaggcgcagaaggaagaaatgcagcacaagctcggagctgtgatcgaggtgaaaaaaatcctggtgcgcaacaccgcgaaggcagcggcaaagaccgggcttccggagcttgtcacggacgactgggaggagatcgtaaaggatgattccatcgagatcgtgatcgagctgatgggaggactggagcctgcaagaacatacatccgggaggcactcgaagctggaaagcatgtggtgacggcaaacaaagatctgatcgcatcagatcacggacacctgctggatctggcgaagcaaaagggctgcgacttgatgtttgaggctgcggtagcaggtgcgattccggtgatccttccgctgaagcaatctcttgcggcaaaccatctgacagaagtcatgggtatcatcaacgggacgacgaattttattctgacgaagatggcgcaggaaaatatggagtttgcagatgcactggcacttgcaacgaagcttggctatgcggaggccgatccgacagctgatatcgagggacttgatgcggcgcgcaaggtagcgatcctggcatcgatcgcattcaactcaagagtgacgattgaggatgtgaagaacgagggaatcacaaagatcactgcaaatgatatccgctatgcgaaggagatgggctgctgcatcaagctgatcggtatggctcatatggcagaaaaaggcattgaggcgtatgtggcgccgatgctgattccggagtctcatccactggcagcggtaaacgattcctacaatgccgtttttgtacgcggtgacgcggtggataatgcaatgttcttaggccgcggcgcaggcgagcttccgacggcgagtgcagtggtcggcgatgtatttgaagttgcacgcaacattgtgcacggatgctgtggacgtgtttcctgtacatgttacaaacagcttccggtcgttgcgatggaagagatcaacagccggtatttcctgcgtgtgcaggtagaggataagatcggtgtactggcaatgctggcagatgtattcgcgcagcatcaggtcagcgtggagcagatgatccagaaacgcaggagcggtgattttgcagagatcgttgtgattacggcccgggtacgggagggcgatttccgaaaagctgtggaatgtatttccgaaaaaccgaacgtgcagaaggttgactctgtgatccgtgtatacggagcggattagatataaactttggacgaagtcattttttgtcagaatcttgacaataaacaaaataatagataacatagaaagagcgtatgcgagaaatccggtgaaaatccgggacagtcaccactactgtaatgcagacgacggggcaagaaccactggttgaacaatgccgaaaccgggaaggagccttgaagagagaagctaagtcaggatattcgcagagacagagccgcttcttggctgaggaagtggcttctggcgcacaggggcattccggagacgggatgctttttacgtgtaggaggaagaggaaatgaaaaaggcgatccttgtggtaagtttcggcacaagttatgaagagacgagaaaaaagacgatcgactgcattgagcaggaaatccaggctgcatacccggagtatcaggtataccgtgcatggaccagcaaaatgatcatgaaaaagctgaaagctcgtgacggcatccatatcatgaatgtacgtgaggcgatggaacagatggaaaaggatggaattgaggaagtgatcgtgcagccgacgcatgtcatgaacggctatgaaaatgatttgatgacggaggacgcaaaagcgtacagcagtcatttttcccgcgtagccattggtgcaccgctgcttaccagcatggaggatcagacaaagattatcaaagcggtagcagaaaatctgccggtcgaaaaggatgaagcgctgattctgatgggacacggcacagagcattttgcgaacagtatttacgcggcgctggattatcagtttaaagatatgggctatccgaatatttttgttggaacggtcgagggctatccggagctggaaaatgtaaagaagctgctgaaaaaaacagggttgaagaagattgctctggctccgtttatgattgtggctggtgatcatgcgacgaatgacctggcaggggatgaagaggattcttggaaatctcttctggaagcagagggctatgaggtacgctgcatcctgaagggactcggcgagtatccgcaggtgagaagcctccttgcagagcatattgcggcagtacagtaataaagagtaatcgagtaataaaggcaggatttattttatgagtatacgaatgacaggaatcgaccacaatctggctgggatcgacgtcagaaccgtcttttcctttacaaagaaaaaaaaggcggaggcactggagtatctgaagacagtgcctggaattgacggctgtgtgatcctttcgacctgcaaccgcatggagctgtgggcgagcacttctgaagaatttcatggctcgcttttcggactgctttgtgagattaagcaggtttcacctgaaccttacgagggatatttcgtttaccgggagggttatgaggcggtacatcatctgttccgcctggcaggtggactggagtcccggattcttggtgaagaccagattgtgacgcaggttggcgacgcgctgacatttgcgagagaccagtatgcggcggatcatgtgatggagacactgttccgaatggcagtgacagcggcgaaaaaagtgaagaccgacattgaactttcaccggcagaccattccgttgtacgtacggcgatcaatacgctgaagcaggatggcatggaatttacaggaaaaaaatgccttgtgatcggaaacggcgtaatgggcaagctggcggcaacgacactggaaaaagagggtgccgatgtcacggtaacggtgcgccagtatcgaagcggtgtggtcgagatcccgcgcggctgcaggcgaattgactatggagagcgtatgagtttatttggggagtgtgattacgtgttcagtgcgactgtcagtccaaatttcacgctgacaaaagagcaggtcgagcagggaatgaagcatccgatgatcctggtggatctggctgtgccgcgtgacttcgagctgacgatccgtgagattccgggcatagcactgtatgatatcgactgctttcgggaagaagcaagaagcgatgcacagaaagcggcgatcgcggcggcagaggagtgctttgcggaccagatcggtgaattttacagctggtatgagggacgtgatctgatcccgcggatccagaagatcaaagaagaggcggctgtggaccttgaggtgcgcctgacgaaaaaactgcagcagcttccggtggaggcaaatgaaagggaagagctgaaggaagatattctgcaggcatctatgcgggcggtgaacaagatgctgttcggtttgcgcgatgagatcagcagaaaagcctttctggagtgcctcgacggattagaaaaggtttacaaagaaggatgatagaacaggtatgaaagataagattataataggaagcagggagagccgccttgcggtgatccaggcggagatggtgcaggactacctgcaaaagacgctgccgcagaagacgatcgagattctgacgatgaaaacgactggtgacaagatcttaaatcaggcgctggagcgagctggaggaaagggtctttttgtaaaggagcttgaccatgcactgcttgagaagcgttcagatctgtcggtacacagcttaaaggacgtgccgacggagctgccggaggaacttccgctgctcgctttttctaggcgtgaggatccacgtgatgcactgattttgccggaaggagcgactgaaatcgatttttccaggccggtcggctgttcaagtaagcggagaatggtgcagtttcagaagctgtatccgcaggcaaagtttgagacgatccgcggaaacgtgcagacgaggctgaagagactggattccggtgaattttccgcgacgatcctggcagcagccggactgaaacgacttggcctggaataccggatcagccggtattttgaaccggatgagatgattccggcagccggtcagggaattcttgccgtgcagggaagagcaggcgaggattacagctggctaaagggctacaatgaccgcgggggagaagcctgtgcaaaggcggagcgcgcgtttgtgtgcggtcttggcggaaactgcagcgatccgatcgcggcgcatgcgacagtggagggagagacactgcatctgcgcgcgttttatcagaatgaggcaaccggtgcagtgtatacaggaagccgcagcggatcggtacgcgatccggagcatgtgggacatgcccttgcagctgaattccgtgcaaagcaaaatggctgcggaaaggtttggctcgttggagccggtccgtctgatccgggacttttcaccttaaaggggcgtcaggtgttggaagatgcggaggtcgttgtgtacgatgcccttgttgggccgggtattcttgcgatgattccggatacggcagagacgatcaatgtcggaaaacgctcaagccatcataccatgcgccaggaacagatcagcgaggtgctggcagaaaaggcgcttgaaggcaaacgtgtcgtgcgtttaaagggcggcgatccgtttctgttcggtcgcggtggtgaggaacttgaagtgctcgtacgcgaaggggtaccgtatgaggtagtgccgggcgtgacctcagcgattgcagttccggcttatcagggcattccggtgacgcatcgtgatttctgctcgtctgttcatatcatcacggggcataagcgtgaaggtgaggcttataacattgactttgaggcactggtccgcacaaaagggacactcgtatttctgatgggcgtttcctcactgggggcaatctgcgacggccttttaaaggctggcatccgcccggagatgccggcggcgcttctggcgcgggggacaacagcggcacagaaccgcattgtcgcaacggtggcgacgctgccggaaacagttgcaagacatggagccatcacaccggcgattattgtggtcggagaggtgtgtgcgctcgccgatgaattttcatgggcagaaaagcgtgtgctcggcggcgtgcgcgtgtttgtgacaagacccaaagaactggcagggacgctttcactccggcttagaaaactcggtgcggaggtcgtggagattccggcgatccagacaaaagcaagagaaggtggggcatttgcagaggcattggatacggtggacgcatttgactggattgtctttacaagcccgaccggtgtgcggatcttctttgaggagatgaagcgaaagaaactggatgtaaggcgccttgcaaagacacggtttgctgtgatcggcagcggatctgaaaaggaactggagaagtatggtttttacggcgatctgatgccggaggtttacgacggggagcaccttggcatggcacttgccgcagtctgtgaagaagaactggcgaagaaagatactgagaaatcacttcgcattctgattccgcgtgcggcgatcggcaatcaggagctgatttcggcacttgcacaggtatccggcctggaggtatcggatgtcccgacgtacgatacgtattacggattggacacggaagaagagacaccggcgcttgacctggcagcagagctgtcgagcggcggacgggattatgtgatctttacgagcgcatcgacggtgaaaggctttgccgctgcagcagcggggctggatgatacaaaggtacgcgcaatctgcatcggaagacagacgaaagaggcagcagatgcacttggcatgcagacctggatgtctgaaaaagcatccattgacagcctgatcgataaactgatggaggtaagcggcaggaaatccgttttgttataaaacagactgagaagatttcagagaaacagaaaagaggttataaatcatggaaatgagtatcagaccaagaagactgagaaaaggagaactgcttcggaagatggtgcgggagacacgcgtggacgagtcctctttgatctatccgatgtttgtaaaagagggaacgaatcagaaagaggagattccgacgatgccgggccagtaccgttatacggtggaccgtgtgtcggagcagctggatgcgcttctggatgccggtgtgacatccgttatgctgtttggtatcccagatcacaaagatgaagtgggaagcagcgcgtgggcagaggacggaatcattcagaaggcacttcgggcaatcaagagggaatatgcagatcagctttatgtgatcacggatgtatgcatgtgcgaatacacctcccacggccactgcggtatgctgtgtggctgcgaggtcgacaatgacaagagcctggagcttctttccagaacggcactttcccatattcaggcgggtgcggatatggtagcgccgtcggatatgatggacggaagagtgcgtgcgatccgtacgacgctcgatgcaaacggttatgagacggctccgatcatgtcctatgccgtaaaatacgcgtctgcattttatggtccgttccgcgatgcggcgggttctgcgccgtcattcggtgaccgaagaggttatcagatggattaccacaacagccgtgagggcatcaaggaggcgttgcttgatgtggaagagggcgcagatatcatcatggttaaaccggctatgtcctatctggatgtcgttgccaaagtaaaggaagccattcatcttccggtggcggcttacagcgtaagcggtgagtacgcaatgatcaaggcaggcgctgcccttggctatattgacgaggaaaagattatttgtgagacggcagttgccgcataccgcgcaggcgtggatctttatctgacctactatgcgccggaaatcgcaaaattcattaaggaaggacggatcggataatgagcagatcagaagaattgtttaaacgtgcatgtgaagtgattccgggcggcgtaaacagtccggtgcgtgcttttggttcagtcggtgaaaacccgcggtttatcgcatctgcggatggcggttatatgacagatgcagatggaaaacgttatctggatctcgtcggttcctggggaccgatgatccttggccacaatcatccggagatccgtgaggcggtgatccgcgcctgcgagaagggtctgagctacggcgcagcgaccgaagcagaggtggagatcgcagagctgatctgctccaccgtgcgcaacatcggcatggtgcgcatggtcaattccggaaccgaggctgtgatgagcgcgatccgcacggcgcgcggctttaccggaagagataagattgtaaaattcatgggctgctatcacggacattcggatgcgctgctcgtacaggccggatctggtgtgatgacggcgggtgtaccggacagtgcgggtgtaccggcgggctgtacgaaagatacactgtcagccgtttacaatgacctgagttccgtggaaactttatttgaacagttcccgcaggagatcgcagccgtcatcgtggagccggtagcggcaaatatgggagttgttccgccgaagaaaggatttctcgaaggactgcgccgcctgtgtacgaaatacggtgcgctgctgatctttgatgaggtcattacaggcttccggcttggttatgaaggcgcacagggctatttcggtgtggatgcggatcttgtaacgtacggaaaaatcatcggagccggcatgccggtcggtgcgtacggcggaagaaaagagatcatgtccatggtagctccggcaggtccggtgtaccaggcaggtaccttaagcggcaatccggttgccatgcaggcagggctgacacagcttcgcatcctaaaagagcatccggaaatttatattgagctgaatgcaaaggcagaccgtttctatacagggcttgatgcggcagcatcgaagtcaccgcagggatatcacgtaaatcacatcgcttctctcggctgtctgtatttcacgaaggatccggttgttgattacgcgtctgcaaagacatccgatacgaaggcatttgcacagtggttccgctatatctttgaaaagggttactatatcgcaccgtcacagtttgaggcgatgttcctttctgcggcacataccgaagaagaacttggaaaaatggcagaagcagccggggcgtatttcggcgctctggcatgatgcatctcatcaccggcggcagcggcagcggcaaatccgcctatgccgagcagcaggtgatggaagcaggagaaaaaaaacggatctatgtggcgacgatgatgccgtatggagaagagggcaagatgcgcgtaaaacgccaccgggagatgcgaaaagaaaaacagtttgagacgcttgaatgctataccggtctggaagccgtgacgatcccgcagggaagtgccgtgcttctggaatgcgtgtcgaacctgactgcgaatgagatgtatgatccatccggagccggagaggatacggtccgttcagtcgtgcgcgggatcctgaatctgaaacgacaggcggatcccctgattgttgtgacaaacgaggtgttttcagatggaattacgtatgatgattccacaatgcagtaccttcactatctgggcgaaataaatcagcagctggcggcgcacgcggagcgcgtgacagaggtggtgtatgggattccggttgcccttgcctgagatcagatcaggagattccctgtggagcaggcaacagtggggcggaagattcctgcgaatgacaataagagagggttatgaatatttgctttgattttgatatggaggacataaaatgaaacgactggcaaacagcttcggcatcgcattttccatgtattcacggattccgatgatgcgctgtgactggacggaagaaaatatgaaatacgtcatgtgctttttcccgtggatcggtgcggtgatcggtgcgctgtgttttggctggtatcatctggcatcctggctttcggtggatgctgcgctggcagcgattgttctgatgatgattccggtctttgtgaccggaggaatccatctggacgggatgctggacacggcggatgcactcagctcctggagaccgctggagcggcggattgagatcctgaaggattcccatgcgggcgcatttgcaatcatcacatgtgtggtatatttcttcttattatatggagtggcacacagcattgatattttgattcttccggtgtacgcgtttacgtttgttgtatcgagatcactcagcggttttgcggttgtgacgttcccaaagatgaaaaaagaagggactgtcgctgatttttctaaaaaggcagagacaaaacgcattcagatcaccctgatctgctatcttgtaatcgcatttgcactgatgatctggatcaatccgtggtacgggattgcaggaacggtcggcgcactgctcacctttgcatattatcactatatggcgataaaaaatttcggcgggatcaacggagatctggcgggctggtttctctcgatgtgtgaactgattatgccggcatgtatggtcgcagtgcagctgatccgaatgaaaatataagtaaagcgaggaaagcagattgcgaatactcgaaatgaaggtaactgttcagagccaacctccaaaatgctacgcatttcgtcggtgtggcgtatccgccaaataaaatttcaaaaacaggcttaaaaatgcaagcattttccgcctgttttatgaaattttgcttggctctgaacagttacaaatgaagtttgttttccaggtgcctgcagggtgcaggaaacagcggatgactgttctgtatgataagtgagacagaaggagacaggcgaaatgaaaatggtaatcggcggtacgtttcagggaaagctggcgtatgcaaaagagcgttatcagatcacagatggctggatcgatggcgctgtatgtgaaagagaggcacttgggacgtgcaagggcgtctatcatttccatgaactgattcggaacatgattcaggattctaaaaaagatcagtcctggatcacgggtgctgccagtcaggcagaggcatttgccgcatggctgtatgaaaagaatccggagattgtcatcgttacaaatgaactggggtacggcatcgttccgatggatcagtttgaccgggagtaccgggaaatgaccgggcggatctgcagcgcacttgcaaaacgttccgaagaagtcgtgcgtgtggcgtgcgggcttggcatggtgatcaagaatgcgaaggagacgatatgataaagacggttatctttgatgtggacggtacgctgtatgattacaacagctgccatgagaccggaatgaaggcgctggcgcagtactgcaggagacgttttcagacggctccggaagagttccggcaggtctatggtgcggcatatcgaaaagaagaagagcagatcggaagccggactgcagcggtccacaatcgcctgatccggtttcagctgatgctggaagacctgcaaaaaccgctgtttccgcatgcgctgcagatgtaccatgcgtactgggatgcgtttctgaccggtgtggttccgtacccctatatccgcagctggatgcagaagctgaaggaaagcggcgttcgaattggtattggtaccaatatgactgcctatattcagtaccgcaagctggagcggcttggtctttctgcttatccggactggatcgtgacaagcgaggaggcgggagcggagaagccggatcgccggttcttcgatctgtgtattcagaagagcggctgtgcgccggaggaatgcctttttgtcggtgaccatccgcagggagatgcaaaggggtcactcgcggcaggcatgcacgtactgctttacggagcgcatggcgcggaatgcccggaagcaatttcggtgaagaactatcggacggttctggaagctgcagacctgacggagttcgtggcgtggagcgagaagcggatggcaaaataattgtggtattttgccaatagttgtatgggcggcaggctgctcatgcttatataagttgtatcagaaaaaagaaacagggagagaatgaatgtattttcctctatttattgatttatcacaaaaaaacattctggtggtgggcgccgggacaatcgcagcgcggcggatccgcactttatgcggttttgcgggaacgattaccgtttgcgcaccacagatgaggccggagatccgggaactttccgaaaaatatccgattcgcctgctggaagaacgttacacggagaaacttcttgatacggcggatctggtattggcggcaactgacgaccgggagttgaac

SEQ ID NO: 4384 - DNA, 21160 bp, Unknown
  16S sequences of unknown bacteria
caggggcagatcttcatctccggagcgccagccgtttcttctgcaaccacgccatcggcagggatcacgtctgctgtgggatttttgcgctgctccttggcttcttccaattccatgattttctccttggcagccttgatggcagccaccacgtcggcaatggcctccggggcttcatccgcatgttcggccatataccattcgccgatggttttataatctttttcgatttcgcgctgctcgctggcgatctgcatattgattttagccgtatctgcggccattttggccttctcgcctgcgacagacgccacatcctgcgctttccgggtcaggttgtcaaaaaatgccataagaaaaactcctttcaatgctctttaatccgtttcgtgccaattcaatcctattttacctgcaaacaccatttgcaaatacaaatccttctttgtcctattgtttttattatagcacgccagttggtccttttcaacgcaccgctggcgaaattcacaatttggtcaaactttcttcattctctttgtcccaaatagctgcccttttttctattttatgctatactactgaaaacaggcacaaaagaggagcggcgtaccgcctgctttggcgcgctccgcttccaaccgtacagaaaggagccccgaccatgtcgcaaattaccgacttctacttcccatccagcgccggcctgtgcccgatccacgccaggcaatggctgccggaccatgctccctatgccggcgtcgttcagctgctgcacggcattgccgaacatatcgggcgctacgatgccttcgcccgttttctgaatcgccatggctatattgtcgtcggcaacgaccatctgggccacggcgcctccatatcctcgccggaaaacctgggctattttgctgaccgcgacgggtggatgcatgtgagcaatgacacccgtaccctgcagatcatgacggagcgtcagttcccgggtctgccctatgttctgttcggtcacagcatgggttcttttctcacccgcacctatttaatccgctttcccggcacggtttccgccgctgtgctctgcggcaccggccagatgcgcaggaccactctggccgcaggacgtgccgccgcagccgccgaagccctgcggttggggcggcatggcagaagcccgctgctttcaatgctggccttcggctcttataaccgcgcgttccgccccaaccgcacgccctttgactggctcagcaccagcgaagaaaccgtagacgcttaccttgccgatcctctgtgcggatttgacatcacgacagggctgttcctcgacctgatggatggcatagctttcattcgaaacgaagccaatctggcccgaatgaatcctgccacacccgtatattttattgccggcggactggacggcgtgggcgaaaacggtgccggcgtccggcgcgcttacctcagtttccgaaaggccggtatgcgccatctggacatccgcatctatccggggatgcgccatgaaatcctcaacgaaaccgcccggtcgctggtatatgaggatgtgctttcctggctacagcaaaggagggtcacacaatgatggattgggatacgctcaaagcggcctgcgcacagtgtcataactgcaccttgggcgaaacacggcacaatgtagtgttcggcgtaggcgatgaacacgccgaagtcatgttcatcggcgaaggccctggtgaaaatgaagatctgcagggtgaaccttttgtgggggctgccggccatctgctggacgatatgctggaaatcatcgggctgcaccgcagccaggtgtacattgccaacattgtcaaatgccgcccgccccataaccgtgatcctctgaacactgagcaggacgcctgtattgcttatctgcgcgcccaggtcgccctgatccaaccgaaaatcatcgtatgcctgggccgtatcgccgccatgcggctgatccgctccaatttcaaaattacccgggagcacggccaatggacggaaaagggcggcgtgcagatgatggctatttatcacccctccgccctgctgcgggaccctgacaaacggccggatacctttgaagacctgaaggccctgcagcggcagatccacgccatctgcacccatacgcattgccaaacaccgggtgcaggacagccctctgcctaaagaaatatccccaaaaggaaaactctgcggcgctgaatcgcctcagtttgttcgggcagggcagaaaataccctgagccggaaataccaatttttaagcggagtggcgcagcgtaagcggcgccactccagtttttaactgaatgtgctcatgatgatcgaaagagatgaactgatcaataagtccgctggtcttcccatacggtgaataaagttatcgcagccacttctggatacatgcaagaactgacgtacgactgacatgggttaaattcgtttgtgcaagcgtatcacttcatacttcaagcccggcctgaccgcctttctgcaaactgcagaaaaatcctgcagcagctgattctccatccataatccttcgcgttcccttatttcgctttgatgctgcctgttctttgttataccacgtaacccaattcataatttgctttctacttattgaaagtagtctgctattttctgtcaggttctttccatgttccgtattgctgcaatctctggctccagcgctttcatttctgcccatctccttttccccatgttaaaccccctgtgtagtttacgttcctacacagggggctcgtatctattgtccatttctgctggggcagttcaatgccccagggccttcttgtgttattcttttatcctttcgcgcgagccgctcttcttacgctttttgacacattcggtcaacaaatactcaatctggccgttgatggatcggaaatcatcctccgcccaagcggacagatcctcccacaactgcggagaaatgcgcagaaggagctgcttcttccccttttccttttgttccaaagccgctcccctcccctcgtaaacagtgtatcagcttttcagtgttttggcaaacccttccgccctgcactgtacacttaataaagcgagccggagttgacgacaggttgcgcatccttgtttccgcacagcaccaccaggagatttgaaatcatagcggccttgcgctcctcatccagttcgacgacctgctcttcacccagtttttccagcgccatggtcaccatgcccaccgcaccgtccacaatcatcttgcgggcgtcgatgatcgccgcggcctgctggcgctgcagcattgctgctgcaatctccggcgcgtaagccagatgggtgatgcgtgcctctaacacttccaagcccgccagctccaccttgctctggatctctgttttcagccgctccgccacttcctgactgctgccgcgcagcgacagttcgtctccttcctcagaaacgtcataagggtacagccgaacgatgttgcgcagcgcggaatcggcctgaatggacagaaaatccatataattgtccacactgaacaccgcctttgccgtgttcaccacccgccagataaccacaataccaatctcaatgggattccccatagcgtcattgattttctgtttgccattgtccagcgtaatcgctttcagcgaaatggctttgccggaagcccggtcacctttcttctgcaccttcccgccggatacctttccagcagcctgttctgcggcgtcctgcatgttcatcactgtgggattgactgcggtgcaaaacggattgacaaaatagaacccggctcctttgagcgtcccataatattttccgaacagcgtcaacaccaatgcttcattgggtttgaccactttcaagccacacaaaagaacgaggccaacgatgggcattgcgatccccaatccgattgccgcgccacccagcaccgcggcaccgggccgccaggactcccccatctgcactgcaccgaaaataatcagcggcacacatgccaccaacagtataacccccagaatcaacagcggcacaccatattgcccgccgccgatgtttttctcctcgtagatcgttcccttttgttcgttcatggcaatactcttcctttctgtaaagccttctcggtccttacgcatccatccattttaccgctgtgccatacgccagcacctcggcagcgccctgcataatggcggaggtcgtatagcgcatggagacgacagcatccgcgcccatactctctgccgcacggatcatgcgctccaatgcgatatcgcgcgctttatccatcatttctgtgtaagacgtcagctcgccgcccaccagctgcttcaagccctgtgtgatatcgcggcccacgtttttgcactgaatggtgctgccctgggcaaggcccaaaatttcatacgatttgcccgctatctgttctgttgttgtgaccaacatggattatcctctccttctttgttttatctatattattttgatatcataacaatagtatcacgaaagaaatttcctgtcaagcgcttcctgaaaacaaaaaaaccacggcgctgccattggcagcgccgtggttttccagggaattcgtatgtattttctgtccacaccggtacccgcttcagccccgcagcgcctgatcgatgtcggcgatcaggtcaccggcatcttccagtccacaggacatgcgcaccagatccgcaccgacaccggcggccgcaagctgcgcgtcgctcatctgtcggtgtgtggtcgaggccgggtgcaggcagcaggtgcgagcgtcggccacatgagtctcgatggccgccagcttcagccggcccataaaagcttccgccgctttccgcccgcctttgacgccgaaagacaccactccacaggagccgttcggcagatacttttccgccagagcatggtatttgtcacccaagaggcctggataggtgacccaggcaatatcgctgtggccgctcaaaaactcggccacagcctgggcattttcgcaatgccgcttcatccgcacatgaaggctctccaagccaagattcaggagaaacgcatgctggggggactgaatacagccgaaatcacgcatcagctgcgccgtagccttggtgataaaggccccttcctttccgaatttttcggcgtaggtaataccgtgatagctctcatccggcgtgcacaagcccggaaatttgtcggcatgggccatccagtcaaagcggccgctgtccacaatggcgccacccacagcagcgccatggccatccatatacttcgttgtagaatgggttacaatatctgcaccccagtcaaaggggcagcagttgaccggggtggcaaaggtgttgtccacgatcaaaggcacgccgtgggcgtgagccgctgcggcaaacttttcgatgtccagcaccgtcagcgcagggtttgcaatggtttcgccgaacacggcgcgggtgttgtctcgaaaggctgcgttcaattcttctgtcgtgcagtcgggagagacaaaagtcacctcgacgcccattttgcgcatagtcacatcgatcagattgaacgtgccgccgtaaatcgaagaagacgccacaatgtgctccccacaggtgcaaatattaaacagagccaggaaattggccgcctgaccggaggaggtcagcatagccgccgtgcccccttccagctccgccagcttcgccgccacggcgtcattggtcggattctgcagccgagtgtaaaaatagccgctcgcttccaaatcaaagagtttccccatggcctcggcgttttcatatcggaatgtggtgctttgcacgatcgggatctgccgcggctctccgtttcccggcgtatagcctccctgcacgcaaatcgtattgatgtgtttcattctggatcgttcctttcctgcgcccgcagcgcttttctgttctgttgcccccatccggaggcagtctggttcttggtctgcttttttattcacgcactgaactccaccgtaatcccatccggatcagacacgataaagtgccggggcttgggcggatgatcaacgatctccgaaggctcataccccagctcagccgctttttgccgcagtccttccaaactgccctccgcggcaaagctcactaccaatccccgggtgcagacatgctctgcatccgggatcgcgaccagctccagcatcgtctccccagcgccgttagccagaaaagcaatctcacccggtccgggccggaatcgccgcatcacctgcagctgcgccaactcctgataaaaagtcagggatcgctccaaatcccgtaccatcactgtgatgtaacccaatttcataccgtatccctccgtcgttccaagtatctctgccgaatcgctccgctgtgccgactgtctatccgtgcagcggagcattgatttctacgcggccgtaataggattcgccgccctccacggagatctgcaccgcttggacgtcgcccaatccgcatagggattttaccactgagtatagcacatcctcctgctcctgtatggtctgcggcacatttttcaaaaaatcttcagaaaaagtgacataacatatgccctcatccatacgcacggaacgcacctgcacaccttccggcagcagcggcagcaacgcctctgtctccgggccgctcagcagcgcagacagcaccgcctcagcccgggtctgtccctcggccagctgcagtgtgcgcgtctccgccgccaactctcccgtggctgcactgtaaaaatacaaccgtgcgcgcagtgtgcgcgcttcattgtccatccagctcagcaggagatcctccgccgtcatcgactgccgttcccggtaaggcagcgcctgcccctgggccagcacactgacacgctccacctccggcagctggctcagcgtcagcgcgatgcaggcgtcggccagcgtcagatccattccggacaaacgggtatactctgcagacagattcacgaccgcgacaccgccgtcaatcgtcacatccaaaacctgcgtcccctccggcagggggctgacgcctccttcctgggttccttccagcattcggcgcagcaatgcagaagcaatgcgctccgcactttctccttccgctctggtttccacagcgcatactgcgtccgcaccgccggattgggccagttctgtgcggtaatacacgctgtacagcgcgccatcctgaaccgaaggcgcaccgcaggcacagagcgtcagcattccagccagtgcaagcgcaagcacatgctgtttcatggggcatcctcctcccgccacagaggcagcgtcagcacaaacactgtcccgccgcccgggcgcgcccgggcggtcacgctgccgccccaccgggccgcggtatcgtgcacgatggacagccccagccccgttccgcccgcagcgcgggagcgagccttgtccacccggtaaaagcgctcgaataccttcggcaaatcttcctccgggataccgatgccgtcatcggccacctcaatctgcgccgtctctccagtgcggcgcagtgtgatctccacaaagccgccgggctggttgtacttgatggcattttccgtcagattgtacaccatctgataaagatcgtcctccgcgccgcgcaccgtgcacgcatcctgcaaatgcacattcagcaccacaccacgctcctccgccagcagccggagcatatgtactacccgctccaccaccggttccgccgccaccgcgctgcccggccggggcggctccccgtccagctttgtcaggtgcagcagctcttcggtaatgcgctggaggcgctccgactcactgcggatgtctcccacaaactcacgcactgtggcctcgtcaatctcctcggtctgcaaaatggaatccgagagcagccggatggatgccaggggcgtcttcaactcgtgggacgcatccgccacaaaacggcggcgggcattttccgtcacctgcagccggtctgtcaaactgtcaaactcccgtgccagagcagcgatctcgtcgtgccctcccacggcggtacggtgattgtaatcgccccggcgcacaatgcggatggctgaaagcagctccccaaagcgtgccgtcagcaacttggaaagcaccagactgatgagcaataccgcaagtcccgttaccagggatatgttgcgcaggttttgctgcagtcctcccagcagttccgcctgctccgtatcgtactcataggcatacaccgcgccgatgatctgcccccggtacaccaccggcgaagcagcccggctgcggaaagctccgtcctcatagcgggagtgaaacgcatcatagccgcccaacgcctcagtaatttccgtatagagcgcatagcgccccacggcgccgccggtttcccggtcatcataaagcaccattccgtctgcatccgtcaccagcacgcgggataccgcagcctcttccgccacagtcatagcctgggccacatttttttccgtcagcacgtccaaccccgacagggccgacaccatcaccgaaacgctgctctgcatggtggtctgtttggaacggaacaccatattctgcgacaccaccagcgggtaggtgttcagcagcaccagcacagcgatgatgatgagaatataactgagcgccatgcgcagctgcaggctgccgcttttaccccttaaaatagtagcccactccccattttgtcagaatatactccggctgagccgggttttcctcaatcttttcccgcagccggcgcacatgcacgtccaccgtccggaaatcgccctgatattcatagccccataccacgttcatcagcacttcacggctgtagacccggcgggggtgcttcatcaaaagttccagcagatcgtattccttggccgtcagttccacccgcgtttcgccccggcgcaccacgtgctcccgctgatccagcgtcagtgcacccacagtaatttcttcgcttttttcctgtctcccggagccggaagcgcgcttgagcagcgcctttacccgggccttcagttccagaatattgaaaggctttgtcatatagtcgtccgccccacagtcaaagcccatcagtttgtccgtatcttcgcctttggccgtgagcatgatgataggcacatcggagaactcccggatgcgcatgcaagcttccagcccatcgatctggggcatcatcacatccagaataatgagatcatattccccgctgcgggccagctccacggcggcgctgccatcgtagaccccttccacctgatagccttcatgctccagattaaatttgatgcccttaacgagcagtttttcgtcatccaccactaaaattttcactccgcagcctcctccaccgtgatcacgtccctgagatcaccataaattccttcgccgatgccctccaccagcatcaaatcttctttctttgaaaaagcgccgtgcgtactgcggtattctacgatacgtccagccagcaccggcccgataccaggcagcgtatccagcgccgcaacatcggccatattgatgttcagcgggttttctgccgagggcacaggaggctcttcttccagaaccgacgccggaggcgtttcctcctccgccgctctcatcgtctcattgcgcaccacatattccgcgccgccgctgcggctgcgcagcacaaaaatggccccggtaagcaacaggaataccagcgtcatcgccaaaagaagcgcttctgttttcgttactttctccgacactttcacagttgcgctctccttccatctttgctataatgctacatatattatgtcgttttttgccttgttttgtcgctgctcagagagcggctgtacaacagtagcataacacaaataatgggagattagaatgaaaaaacagagatttctttcaatttttttggccgccgccgtgctcgtcggcctgctgtgtcctgccgtcctggccgcgccggaggaggattcctttgaagccctgaccgtttccgccaaagctgccctgctggtggacggcgacaccggacaagtgctgctggatcaaaattcccacaaagagctgtaccctgccagcatcaccaaatgtatgacgacgcttctggtgctgcaggccgtcgacaaagggcaattgacactggatcaaaccatcaccgcttcccagagcgccattgacatgctcacggcggattccagcaccgccggcatcaaagtgggcgaacagctcaccgtggaacagctgctctactgcgtaatgatccagtctgccaacgaagcctgctacatcctagccgaaaccgtttccggcagcgtggacgccttcgtggaggacatgaatgaagaggcagagcgcttgggctgcgaaaacacccattttgtaaacccctgcggcctgcaggacgccgaccattacacctccgcctgggacatttacctcatcatcaaggaagccatgaaatattccacgttcatgactctggccaacaccaccaaatacaccctgccggccaccaatctctccgagcagcgggtgttccacaccacaaactatcttctcgacggctggcgcgccacaggctatatctatccatacgccaagggtatcaaaaccggccacaccagcgacgcaggctattgccttgtgtcttacgcggaaaagggcgagcgcagcctgatcagcgtggtgctgggtgcgcaggctgtgaccacagacgggaaaaccgactaccagagtttttcggaaaccaagcgcatgtttgaatggggttttaacagttttaagcgcaccacaatcctcgaccacgctgatctggtgtctcaaatgcccgtgacactctcccgcaaaacaaattatgtctccgttcacccaaaagaagacgtagaagtcctgctgccctccaatttgacggcagaggacctcacccaaacggtcaagctggacgccgaatcggtagaggctcccgtgaccaccggccaaaagctgggtacagtcacggttacagacagcagcggaaccgtgtatgccaccgctgacctggtggccgccaatgaagtcccagtctcccagattctcttggtgctccacaagatccaggtgctgttcgccaatcctttggtgaaaatcctggcagtcgtgatcctggtgctgatcatcctggctgtaatctcccatttgcgccgccgtcccaagcgctaccgcggcgggcagagctaccgcacccgccaccgcaaccgcagttatcacggccgccggcgctgaatggaaaaacggaaagtaaaaaccgtctctgcgtatttcatacgcagagacggtttttttcagagtgcgctttatcccaccaggaacatggagagaggctccacaaacgtaatcagcatcagggcaatgatcgacagaatgaaataaggtacaatccatttgaacatgctttccatcttgatctttgccaccgccgcaccgacaaacagattgcagccgtatggcggcgagcacaaaccgatcgccaggttgacggacatgatgacgccgaactggatcggatcgatgcccagggtctgtactgtgggcagcaacagaggcgccatgacgataatagccggcaccgtgtcaagaaacagtccgatgaccagcaaaatcgcattgatcagcagcaaaatgatgatcggattctccgacaccgtggtcaggaaatgcgaaatcatctgcggcacctgctcaaaggtcataaaggtggaaaacaccgtggaataccccagcaggaacgacgtgacgccattgagcacagaagcggccaaaaaggtctggaacagttcctttttgcccatttccttgtaaatgaatacactggcaaaaatggagtacaccacactgacgcaggccgcttcggtaggtgtaaaaataccggaataaataccgcccagaataatcaccggggacaacagcgcccagaaaccgtccttaaaagttttccagatcatgtgcaggcgttctttcatcgcccggcgcatcagcgctttctgttcctctttggtcagcaccttttctgcgtccgcctgtgcctgaatggatttctgccgcaaatcccagccgtggcgtttgcacagaaaaatattcatcaggataaacagtacgccgatcaggacgccaggcagaatgccggcccggaacagatcgggcaccgaggttttcgtggccgcaccatagagcacaaaggaaaggctcggcggaataatcggccccacaatggccgcaaagcacaccaccgtggtggcatacggcacatcgtagccttttttcttcatttcggggatcatcatgctgccgatagcagaggctgtggccatgccggaaccgcacagggcgccaaagaacatgcacgccaggatcgtcacgcagcccaggctgcctgtgacaaaaccgatcagcgccgaagcgaagtccacgatgcggcgggcaatgccgccagtggacatgatgacgcccgccagcatgaagaacgggatcgccatcaccgtaaaggaaaagatgccagaatagcagtactgggcgttgaccaccatgttcagatcggaacagaaccacatggccgccatagtggcgccgccgatggcaaagcccacaggaacgccgaagagcataaaggccaccagcagcaccagcactacgatcactgccgtcgtcattgctctgcgccccctttctcttctccgtcctgctcagccggcgcccccttaaacagatacttcagcgaccgtccaaagccccatacgctgcgcaggatcatcagcccacagccgacaaccaccgcaagataaccccaggaaacgctgatcttgatgcccgcataatgcgttcccatctgggaaaacaccagcgtgattccgtagtaaaatgtaacggcacaaataatgatcacaatgatctctgacagaatgttgacgacctgcgccacccggaagggcagtcggtctgtcagcatcgtaatcttgatgtgctcccctttgcgctcacccaggctgatgcccagccaggtgatccatacaaataggaatttgcccagctcttccgaccaggacagggaattactgaacacatagcgcatgatgacctgcagaaagataacggccaccatcagcgcaaacattgccacgatgacgatttcttccgtatgattcaaaagatagaataaacggttttcttttcgctctttcatataactgcgcatgataccctctgaaaaagcaccataccgtcctcccttctctatcgtctcccgcggccgggcacgctgtgcaccccggccgcgggaacgtttctctttttacatgtttggcgcagactccgcccgcgccatggccgttcagtgctgaggcaccgtagccagccaggcatcgataacgtcgtcgcccactttctcgcgccacaggtcatacaccggctgtactgcttcagtgaacgcggccacttcttcgtcggtcagctcttccaccgtagcgccttctgccttgaagcgctcgatatattctatctcattggcgcgttcttcctcgcgctgctgctcacacatcaggcggacgccttccttaaccagttcctgatcctcttccgacaggctgttgagccactcgagcgagcaaatcaccgggaaaggcgagctggcatggttcgtcagcgtgatatacggcgcaatctcatggagattgaagtcgttgaacacacccagagaatgatccaggccatcaatagcgccggtggacagagaggacaccacttcgccccaggccatgggggaaggattgccgcccatatctttccacatttccacattcagctcattctgcgcgatacggatcttctgacccttcaggtccgcggcgttgtgataggttttattgcggctgatcacctgacgcataccgttgtaatacataccgaggcaataataaccagccggctcgatggcctcgttgaacagttccaatccgccgttctcaaaagtaccttccacccaatcttcataagtgggatagagatagggcagatccacgcagctggcttcgtcgccggctactgtagccacgacggacgccagatcgaactccattgtcagtgtgcccagcttcacgccggccaccatatcgggggagtcgcccagagagccatcggaatgaacctccactacaaagcggccgggcgccttttcctccagatactcgcccagccagacactccacttatgggtggagcgctgggatgagtccgtgtggccgatgacgatcttgatcggctctccttccgcgccgttactggccggatcgttgttttcgctccccggccgtgcgcatccggaaaacaggctcaggcccaaggcggacgccgtcaacaaggcaaaaacgcttctttttttcatagttctcttctccttttcaaaaatatacccctcagggttatgctcattcacagatctttgggcgttccgatgtgcagaatttctctggcctcggcaggcgtggcgatggggcggcccagcaggcgggccagcgctgccactttttccaccatctctccgttgctcttcgccagaacgcccttttccaaatacagattgtcctcaaagcccacgcgtacatggccgcccaggcagattgccgccgccgcgatggtccaggcgtttttgcccagacctgtagccgtccatgtggagccggcggggacgctttcggccataaacaccagatcccgcaccgtagcactcatctgtacacccagaacaaagtcaaaatgcagcgggtgcttcagcagacctttccggtctgctttcagcgcaatgtcgatcattcccttgtcaaacacttccagttccggcttaatgccgcgctcagccataattttggcaaagttcatgacggtattatctgtattgacaaagatctcatctccaccaaagttgcacgtaccgcaatccagtgtagcaaattccggcgtcggttcgatctctgtggactgcaggcgctccaggtcgctcatgcctaccgcgccgccggtggagggctgaataatcgcctcgggacacagagcgcgaatcgcatccacacattcctgaaaacgtcccttgtcctgcgtaggtgtaccgtcgtcccagcgcacatgcagatggatcacggaagcgcccgcatcgtacgcacttttcgcctcccgggcaatctcttccacggtgtagggcacggcaggattctgctccttggtcacctcagcgccgcagatcgccgcgctgatgatcagcttttccatggttctttcctcctttccttctcagtttcctttgcagtagcgcgcttccagatagcggcgcagcttttcctcccggcggacaatatcaaaggcgatcgccgcatggccagggtaataaccattgccgatcagcatgggaacatattttttgatcccttcggcaccgagggatgccttggcaaaatcggtgctcatactgaagaagtaaatcatgccggtgtcctttgtcaccaaaatagaggacagctccgtgttaggtacattcacagtattgaccgaaaaatcggccagtcggccgccggtagctttcagataagcttcataggcctccagcggcttctgtccatccgcctgcaccacaagatcggcgataccgagactgcgtaccagttcacactgctcggcggaatattccatacacaccacaagccccgtgggggaaacccgtttttttgcttcagccaggcacaaaagccccgccttgcccgcgccttccaccaccacggtgtcgccggctttggcatgaacggccacctgcgccggcgcgccggcaatatccatcagcgccaagctcagcggcgcacccagatcttccggaagtttcgtgtaaatgccggattcaaacaaaatggcgtccgctttgcagaaaacctgttccgtatctgtgtcaatgcctgtaatttcatagattttcagcggcgtcagggaaagggataccagcgttgcaatgcggtcccccacttccgcttcggttttgccctgcagcgccgcgccgatttctttgaccgttccaatcagaattccgccggatttggtcaccgggtcctgaaacttgccccgctcctccacaattttaaagatctccgccttcatctgttccgtatcgccgccgcactccttccggatgcgtccaaacgccgtagcggtgggctgcagcgcttccacagcaattaaaatttcattgtcgcagatcaccggatcattgttcacccgctccgctgcctgcggcagcaggcccaccggtgaaattacacggtgacttccataagggtttcctttcaaacagatcacactcctttttgtgcagattatgagatatccttctgccagagataaagcaaatcctgtgccaacaatgccgcgcaccaggttttgtatgattgtgctgtattttcaatttcaattttgacagatcccccaaagttctccctatcctatacgctgcaaaaattcatttttgaataaagtccaattcaaaaatgaatcatttattcaaaattgaattttttgcttcttttaaaatgcctgcagcaacgaaatacagcctgttccccgcgtttttttcattggcatccaatttgctgcaagaaaggacgtatctgcagaaacacccccctgccatcgctgcccacagcgcagcctattttcagaaaggatgaatttttatggaaaaaatcacatcaaccctgcgcgtccgtatgtcggccaaagacgctcactatggcggcaacctggtggacggcgctcatatgctccacctgttcggcgacgtggctacagaacttctgatcaaagccgacggcgacgaaggccttttctgcgcctatgacaacgtggagttcctcgcccccgtctacgccggcgactacatcgaagcctgcggagaaattgtttcttttggcaacacatcccgcaaaatggtatttgaagcacgcaaagtgatcgtttcccgtccggacatcagcgcttccgccgccgatgttctgcccgaacccatagtggtctgccgcgccagcggcacctgtgtgacccctaaggagtgcaagcggaaataaccccccataacggcggcagcagcagggacacgactgcagctgccgccgtattctgtcggtatcgccacagcacacaaaacaggttgacataacccgaaatcatttgtatgcttatagatggaaaaatggcgcaaaggatgctgccatgcgctctgcacaaaggaggcacatcggaatgaaccgatttgaagcaatgggaatcggacgctcgctggaacctgtcaactccattctccagcccgcctggaaaatcgataatgatatgcgtctgcgaccgggcgaactcctcatcgacgtgaaaatcattaacatcaatctgaccagcttcaacgaaatcggcgaggaaaccgagtttgatgaggtgctgttccgcaggcgtattctggaaatcatcgatcagcgcggcaaactgcacaaccccatcaccggcaccggcggaatgctgtacggccgcgttttaaaaatggatccgcaatacgaaaaccactacggcctgcaggtaggagatgaaatcatctccctgacttccctgtcggtcacacccatgcggctggaccgcatcctgtcggtggattttcaaaacgcccacctgacagtggaggggcagtgcattctgttttccgactcccccctgattaaaatgccctcggatcttccaaacaaaaccgtgatctccgcgctggacgaggcgggcgcgcccacgaaagcctattcccttattcagccgggcgataaagtgctcgtcatcggcgccagcggaaaaagcggcgcactggtggcctatgccgcccacaaaaaactgcagggcagcggctccattgtggcgcttgtgctgcagccctcccaccgtgagcggctgcgtgactgttcattttttgacgacattctcgtcctcgacgccgccaatatcccccaggtctgcgccagtgtgctgcaggataaatacgccgattattttgacgtcgttatcaactgcgtcaataagcccggcacggaactgtctgctctgagcagcgcccgccagggcggcacggtattttttgccacactgggcagcgactacaagttggccgccctgacggccgagagcatgggcaaagaactgtctatcgttccatataccggcttcatgcgcaatcacgccgccttcacgctggccttgctgcgggaatttcctgaagcccaaaaatttctttcgccctacagcacttatccctctttcgaagatcacgtccgggcctacaattccaccctggcccaaaaatgcgacgagatccgttcctccggttacattttcaacagtcctctctcccaggccacgctgcgccaggccctgaaagtagcccgctacaattccacggtcctgatctacggcgagtctggcaccggcaaagaggtgctcgccaccatcatccaccagaacagcgagcgcaaaagttttcccatggtgaagatcaactgtgccgctatcccggagaccctgctggaatcagagctgttcggctacgaaaaaggatccttcaccggcgccagcacaaaaggcaaaaccggcctgtgggaaacagcccaaaacggcacactgtttctcgacgaagtgggcgaactgccccttgctttccaggcaaagctgctgcgcgccattcaggaaaaagagatcacccgtgtgggcggcaccgtacccgtcaaagttgatgtacgcattatcgccgccaccaaccgtaatctcgaggacatggtccatcagcatttgttccgcgaagatttgtactaccgtctcaatgtattccccgtgctgattgatccgctgcgcaagcggcaggaggatatcatcccgctgaccaacttctttattcaaaaatacaatcaggaattcggcctgcacaaaagcatcagccccgcagcgctgaacctgctttccgtccagccattgcagggcaacgtgcgcgaactgcagaatatcattcagcatgccatgatcaacacaaccttcgacgagatcaaatcctcagacatcctccacaccttcacctgcgtttcgcggcgcacggccgccgcgccgcataccggcggcgcacagcagcagccccggcgccccgcctccctgaaacagatgcttgaggaaaaagagcgggaaatcctgctggattactcccgctattaccgaaccacccagcagctggccgacgcactgcacaccagccagcccaccattgtgcgcaaactccagaaatatcgaatccgtagcggcgaaggataagcggccgccccatcggaacagctgcttatcccggccgcaaaaatttgaatttcagcccatgcgcaagggagtgtgaaaaggcttttgtactgcaatcagactcacaaaagcaacgatccgagaaaagtacgatggaccggcggcctcagcgagcaagggtaaggcggaagccctgcgccggtgcgcgcggaacacccccgcaacctgaacggtccgcccgacgtgaatggggcaacattggcagaaacgagcacgaagggtggcctgcgcaatggcgcgcaggtaaattcggcagcaccgcgggtatgacagctattcgtcctaaattgggatgaatgctgtcttttcttgcaccctttttgccagtaagagtgcacaaacaaaaaacgcccggcaccgccgcctccagcgcccgcgtgctgaaaaaccacggcgccggcagattctgcatccaggcaaaaagcgggtggacggtacaataccgtccacccgcttctttttttccattccaatctgccgcagcaggccttttcctgaaaaggccgcctgtttttcacagttcccgcttttggtaaatccgtaccgaaagaacataggaaagcagcagcacaaccgccgcagcaatcgcggcaacccccaccaccgggagcatccctttccattgcacatgttcgatgccgtccaaccaacccgtcacatcgacgaggctcagtaccgtaaagccaatggccacaatcgcaccgagcacgccgaaaaagaggatgcgcgcccgctcggcgccaaaacggtacagcagaggaagcaaaatcgcattgagcagcacgctgaagcccagcgcgccgatggcgctgctgagatatagaccccagtcctccatctggcccaacgccgccagcgctgccccaaataaaccacacagcaccgcagaaaacgccagcgccagcagcacggtgagataccgcgccagcacgatccggctgcgccgcaggggcagggacaggccgtacaactcccatttcgctatattgtcataggaaaaacagctgtagggcagcatgctgatcagcaccgccagaacggtggacaaaatcgtgccgtcccaaaccccggccacggtcagcagcccgtagatcgccaccacaaacagatagctggccgcgcttttgcgcaggcataaaaaatccttatataccaagccaatcatgcttccgcctcccgctctttttccgcccggttgataaacaccataatatcgtccagcccgacgcgctccacagtcaaatgcgggtaggccgcggcaaagcgcgcccgatgtttcaccagcgcttcgcaggaaaatttcccgcggcgcacgcccgccaaaaacgaggcgtcgaccgcgctcaattcggcttcggaacacaccagacgtccatactcttccagaaggcggtccttttcctcacacagcagcagcttcccctgatggagataggcaatataatccgccgccttttccagatccgaagtaatgtggctggagatgaggatgctgtgctgctcgtcgcaggcaaacgccagaaactcatccagaatttcatcccgcaccaccggatccagccctgcggtggcttcgtccagcagcagaagccgcgggcggtgtgccagcgctgccgccagggacagtttcatccgcatgccccgggacagtgcc

SEQ ID NO: 4385 - DNA, 32759 bp, Unknown
  16S sequences of unknown bacteria
gtgcggcgtttgagcatctctgtgcgccctccgcgtaggagtatataatgaaatcgaaagacgtaagtctttcttcttttcttctcacttaggacttaagtgaaacttacagaggggaagtctcttagaagaccccagtcgtctaaggtaaagaaattagctgcgctctttcttgttttcccacacaacgtgtgatataataaaagaaaatttgctaatcttaaaggagtaccccatgacagagcgtgaaaaaatgaccgcgggtcttgccttccgtacgggagatcccgagcttatgcggaataaaagcgacgcgcgtaccttggcagaggagtataaccgttcccctgagaatcagccggagttgagatatgcaatcctcaaaaaactcttcggcaaatgcggggagaaaatcatgataaaacccccgttccattgcgactacggatataatatcttcctcggagagaacttcttcgctaacttcgactgcgttttcctcgacgccgcacctatccgaatcggcaaaaactgcatgatcggtcctaaaacctgcatctacgccgtcggacatccgcttgaacccgacgagagagcaaagggcatcggtctgccggaggaggtcgtaatcggcgacaactgctggatcggcggcggcgttaccatccttcccggcgtgactctcggagacaacgttgtagtcggagcggcttccgtcgtgacaaagtccttcccctcaaacgtcgtcatcgcaggaaatcccgctaaggttatacgtgagctgtaagaagccgctgatttaaggttgtttttgcgccaaaagcccctaaattttagccttttaccgcaaaaactcgattaattcagcgtatctttaatcaaaactgcaacttaacgtagcatatcccgcgcctgcgaatttacatagcattatttgcgctaaccattgacaaatctgtgtgtttctgttatactgtccatatagaggatttgaattacgtattttttggcggaattggctactgcaataaacgcagctacataaatagttacaaactcggcaaaaaaatgacgaataaaaattaatccgacaccgaaattaattatttaacatacaggaggttccccgcaaatgaaaaaatcgctttcactgatactcgcgtccgttatccttgcctgcgccgctctcacctcatgctccgaaaaagccgccgatgagacaacagcagacacgactccgactaccgcaaacgcagaaaccgccgcagacaccgagacggagaccgaaaccgaagagcctgaccgctttgcaggtgtaaactacggcggaaagaagttcaccgtatacacctccgttgacacaaacgactccaccaacggcgacgctttcatccgcggtacgggagaatacacgggtgaagccataaacgacgcggtgtacgacagaaacaacaaggtcatggatctgctcggaattacccttgacttcgttgaagcgaactacgactataacgccgccgctaaccagattaaggtgcagattcaggcgggcgaccctgcgtggaatacggtagtaaacgatatccgtgctctcgcttcgctgtcctccggcggattcatcgcgaatatttacaacaacgacatcctcgacatggaaaagaaatactggtacgccgactccatgcgcgacctcatgttccttgacggcggtatgtaccttcttgtaggcgactatttcaccgacgcgctttcctcatgtcacaccctctacgcgaacgaggagataatcaacaacgtctacggcgacgagaactacgttaacaagatggttttcgacggcacatggacgatagacaaaatgacaaagataatcggcgagaactataccgatacggacggcgacggcaaaaagtctaacggcgatacatacggctattcctgcgtaggtatgtgggcgcccgctatccccatgcttgtcggtcaggacatcagcttcgtcaacaagacggcggattccgttgagtttgctttcaataacgagcattcgataaccgcacttgacaacctccactcgctgttctactccgacggaactatctcgtcaatcagcgatatcacatccctccgcacattcttcataaataagcagagcctgttcatgggctacaaccgtctcggcgacctttcaagattccgtgaggttgagttcccgataggcgttcttccttatcctaagttcgacgaaaatcaggaaaactatattacaaccctccacgacacaagcgaaatcggcgctatcccctcgactgttgtgggagatgagctgaacttcgtcctcacctgccttgaggttctcggtcgtgagacgtcgaagtcagtaatgcccgcattctatgaagacggtcttaaggtaaagtacgccgacggtcaggacgacgctaagatggtagacctcatccacgactccatcagctcacccttcgcagtggcttatgacagcactctcggcaacttcctgctcagaaacgtgttccttgatcctctcgcgaacaacaacatcaacttcgcttcgaactacgacagatatctgaaagctgctacaaagctcctcgatcgcacaacagacggctttaagtcaattcttgaagcacagcagtaaaactgcgcagtaattttatcaagtaaacaggaaatcaggtcaatttatgtcatccttatccccgcagcttttcctttcggttttgcccgccctcacccccgccgaaataatttcgcaaatcctcggtatcttagcgcttgtctgcaacatattctgttatcagatgaagtcaccgaagaagctccttttctggcagattacggcgtccgtcatgtggataatgaatctcggcataaagggagctgtagtcggtgtgcttctcaacgttcatgccgtagtcagacttaccgtttactactttgccgaaaaccataagtgggcaaggtcgaaggtgtggctgcccgtgttcatgataagcgcggctgcgatagtcattctcacctacacgggaataccggacgcactcgcactcatcggaacgctctgcaccatttattccttctcggcaggagacaccgcgaaaacaagactttttactttgccgtctccaccgtgctggttcgtgtaccacctcatgcagaaaaatctcggaggggtgctgaacgaggtctttgtgttctcatcaattatagtcggtatgctcaggctcgacagaaagaaggcagaagagggcggaaatattgggtaattaacacctacgtaacgcggcggatataaatactacttgacaaatcagccgttttcgtgtacaattactatgcaagataaatttaagttttgatgggagaacaacaatggataagaatgacggactcttcgataagaataacgaaatcgaagaaaacgaagagtacgatcccgaaatatatactctcaccgacgaggaaggcaatgagcttcatttcgcactcctcggcactcttgagcataacggcgagacatacaaggctctcattcccgtaaacgaagacggcgaagaggaaagcagcgagtatgtaatattaaaatgctcagttgacgaaaacggtgaggacattctcgaaaccatcgaggatgacgatgaatttgatgaaatagcggatatctttgacgacgaattctcggatattctctatgacgaagactgattttacaataaaagtattcatttaagcaatcatcgaaggcaagctccctgaggtgtgcgagataaaaatgagcgtaaaaacccacaaagagtaaaaaggagcccggacttccgacgtgaggtttgcagacctccctccgtcgccgtgagacgcatttgcgccaccgctacgatcaggatgctgggagcacgaaccgccggagagggcaccgtccttgcgagagcagggtttctgtacgcttgttttgaaacggcactttggggagcttttatttgcctttgttttcacaataatccgattaattcacataatgcatattttatcattgaaggtgtattgttatgaagttttatcagcattataaagcatattcgcccgagatagactgtccgcctttccccgcgtctgttcccggaaacgtgcagcttgactatatcacggcgcatccggaatttgtttccgacataaactacggcatggagcacaagaaaatggttcagcttgagccgtatacttggttctataagacgaatcttgagtttgaccgcaaggacggcgagaagatttggttcgtcacagagggaatcgactacatctggacgctgattctggacggcaaggagttctataaccacgagggtatgttctcccgcgtcgacgtctgccttgacgatgtttcagaagagctgttcggacatccgctcgagaagggcatggagttctgcataaaaatacatcctcatccgatgcttgagggcatgccgatggacagaaatcaagcgtcgcagtgctgcaagcctcctgttgcttacgaatgggactggcatccgcgcgtgattccgtcaggcttatgggatgaatgctacatcgaatcccgtgacgaattctacataggaagaaccgaagcgagatatacgcttgcgaaggatttttcatccacagagctgacgataaccgccgacgtgaaatcccctgccgaagtgacggtgtactctcccgacggagaagctgtggcgtacggtgcgattgttcggggcaagtttacggcaaaaatagagaacccgaagctgtggtggtgccgcggttatggggacgcaaatctgtataaatatacggtgaaatgcggtgaaaatacagtcgaaaagcatttcggaatccgcagagttgagcttaccatgaatacgggcaagttcgtcgaaccgcagcagttcccgaaaacccgcgcatatcctccggcacagattacattaaacggcgtgaatgtgttcgcgaaaggctcgaactacgtcaatcaggagattttcaccggcacaatgacgcgcgaaaagtacgaggagctgataaaattcgcggctgaagccaacatgaacattttccgttgttggggcggtaccggctgtcagaaggacgatttctactccctctgcgacgaatacggcatcatgatttggttcgagttcccgctcgcgtgcaacgactactacgactccgatgaatatttatccgttttgaagcaggaagctaccgcgatgattctaaagctgcgctcacacccgtgcattacgctgtggtgcggaggaaatgagctgttcaattcgtggtcgggtatgacggatcaaagacttgcgctcagattgctcaacgctctcactctcgaatacgcgccggaaattccatataatccaacttctcccatctggggtatgaagcacggcggatacacattccttgatccgactacaggtgtagatcagttcacgctgttctcgaatacagaggcaacggcttacacagagtttggcattccgtcaacaccgttggctgaatatttatccagtttcattcccgaggacgagctgttcccaccgaaaccgggcggagtttggcaggcacatcacgcattctacgcatggaacggacgcgaaccgtggctctcactcccgacactcgaacgttttggagacgtaagcacgctcgaaaatctcgtcgaaacttcaaactggctccagggaatcggttacaaagcgatattcgaggaagcgagacgtcagaaacctctttgcgcgatggcgataaactggtgctggtgcgaaccttggaaatgtgctgcgaacaattcactcatagcctacccgaacgtaaagaaaaccggttattttacagtaaaagattcgctcagagatgttgttccttcggctaaattcaataaattctcttgggatgcgggaaaaccgtgcgaatttgaaacatggcttctcaacgacggaattaagcccgcttccggcaaaatcactgcaacagtcgagcttgacggagtgaaatactatgtcggagtggacgaactctcaaccgaagctaacgtaaatgcgaagggcgcagttcatcagtttgaaattcccacttcaattgcacctaaaaccagaatgaaagttacgctcacctttgaatcagactccggcgagacgatagaaaacgaatacaatatggtagtcggcgcgtgattataaatatacagaaataatgaaataatataaggagtattcttagatgttggacgtttgtctccccggaaccggcggcgttgtaccgcgacttgacaggtttttgagctgttgctatctccgctatgagggagtaggactgctcatcgactgcggcgagggaacacagctttcggtaaaaaaagcaggattttcgctcggaaaaatttccattttgctgctgacacattaccacgcggatcacgtcagcggactgccaggactcttgctttcgattggaaatgaaggaaaaacatcgccgctctacatatttggaccaaagggacttgacgcgattattaaaggacttttagtaatcgtgccggagcttccgttcaagataatcacaaagacactcgcggattttgatacatttacacagtataattatacagtgacagcatttgagttgagacattcctgcccgtgccttggatatgatataagaatatcgcgcggcggaaaattcgacaaggagaaggcaattgccaacaaagttccgctgaaatactggtcgattttgcagagaggagaaacaattgacggttatactcccgacatggtgctcggaaaaactcgccgcggacttcatgtgacatattctaccgacaccagaccctgcgaaatcatctcgactatggcatatgacgcggatttgctcgtgtgcgagggtatgtttgagctggaaaagagcgcgagagcgaaagaatctgctcacatgacgatggcaagtgcggcaaaactggcgaaagatgcggaatgcgctgaactttggttgacacactacagtccgtcgctcccaaatccggaggaattcgagaatgagccgaaggcaattttcccgaatactgtaattagctcggatggaatcacaaaaacgctttggtttgcggacgagtaagaacaaaataaatgaaacagaggatgttcaatttgatgagcaccctctgtttttttgtataaatatgcagctaatagaggaatcaaacctcaatcagcactccgagcacggttgaataaatatagactttgtcgaccgcttcgtcaaatatctcttcgcagatacgtttgtaagtcataagctgatttctgtgccgttcacgcagctttttgaacgctaatttgtgatttttgaactcttcgccggagaaaccgtccgttttgtagtcgatgagttcgagttttccggtgtctgagttgcgataaatgcagtcaataacgccttgaaccgtaatatagtcgccgttatttgacaattgagttttaagttcttcgttttcggtaaaatctgcggcaggcaagttgatgttgaacctaaattcgcgcttgaggaacgttgttgaagacattcgtttatacaactcgcagtgcataaatattaatatttgcctcttgtcaattaaatcagctagcttacgtgagataattctctcgtcattcatacgttcaatttcggcgttgattccgttttcggcaagattttgaatattcataaactgcataaaagtatgcattgcagttcctttttcggcggcagtataagtgttagcacctgtcgtaaatttcggtaaaatgagcgatgccggagaatctacagcttcattcgtatcactttcatcagtcgaaaaatgttgatttattacaactttgtcaaggtaagatggtgacagctcacctgccatagctttcactggaatagagactgatgttgatatattgttacttgaatgattgtctataacgtcagataaatcagtacaaatggaagaatcaaacaaatttttgttaaaattacttccgtgctcaacattacaagtggaaataaatgacaaaacacctattggtgttatgctgaaactttcggatttttcattagcggtacacataaggatccagtcaaggtaattgtcagaatttgctattgaataagcgtcaattccgtaagccagagcggcgcacttttgtaattttttgtcaacatcagctacttttccggtgattatcaggcggttcttggctcttgtaagcgctacgtacagcattcttatttcttcaaatgaagaagcttgcgcaaggcgattggctattaaatctcgtttaagagtagacttcaatgcgagtccgctttcgtcagaaattttggtggcgaatccgaactctttgtcaaacagcataggctttgattcatcgacggttgaacggtatctgtcagtttcgcataaaaagactatgggaaattccaaacctttggatgaatgtatactgataatgctcactgcgtcggaagagttttcggtttcatcagaactgcgattgcggctgatttcggacttgatgtactcaagaagagacggtaaagacgaaattgattcagaatctgcttcaccgattagctcaacaaatttgctgaatgcttcgttttccagtggatctccgtctgttgaattcaaaagttcggacgaattctcgtttaggaagttctgtacgaaaacatcagcgcacgttgattgggaaatttgcttgtatttattgagccagcctatgaacgtttgaattttagtggtaatagatgggtgcggacttgtagatgataaataagaatatagtgaaacaaaaagatgggagtctgcgttggcgttgttaattattgctaactcgtcaactgtgaaatcgaagaatgtgtttaacatagctccggcaagatagacgtcgtcaagtggattatttataacttcgaggagacagactatggatttaactacttgaaagttctcaagaggttcggatttcctaagttgacattttataaaacgacgtgaaagtgctgctttgaattcttcaccatgcgatgaaggactgcggagtattatcgcgatgtcggaagctgtaatttttcggtttaagtctaaactatattcaccaataagagttgaaattctatgagctacgtattcagcttcggtgttggtaaaacgttcatcctgttttggaagaagaatcacttcaacgggatgagactcattgatactgttgttgctgaatattaattcatcagactgagcataggtaatgtctgaatttgcaaagagttttcctgtgacggtgttagtaaatgcaataatctctttggaacaacggaaattctcgctcatgtatagcgtataattgttagcggtggatgggatttcaggcaaagtagcccagatatttttataattattgaaaacatatggatctgctccacggaatctgtaaatcgactgctttatatcgccaactaaaaacctcgaagaatgagcagaaaggcggctgaaaatatagtcctgcgtttcgtttgtgtcttggaattcgtcaatgaaaatgtacttatagcggcttgaaatttcttctgagactttctcgttcgacagaatttgacatgcataattctctagatcggagtagctcataagtgatagagatgtcttcttatctttaagaaatgcaaaatattcacgtaagacagcgtatagagtttcaaaaaaatctagggtggctttttgctcgatagctaataaagattcatctcctgtgagtaaattcgctttcagattttgaatttctttctttaagctgtcgcgaatttccttgtaagataatgaagctggggttgcgaattctttttttagtattggaagtctctggaattcgatggatgaaactgtggttcttagcgaatcaaaagagatattgttttcggcacaattatttagagcttcgcaaattgatatgtcgtcttctaaagttgagcggtactttttgaatacaacttcgtcgagctcaatatccgaatatatacgagaaaatgcataattataatgagttgcgatttgtttgactaaattaccaagttcatgtatagctgactctgaattgaacattttggtattagcacggagcctttcaatttcaaaattgttgttttcaagagtatgtgcaatggacaaaagttcagcatcaatgtgagaagtatctttagttttgcttataatatcacaaaaatattgccattttaagctcataaattcaacagaaaccgcgaacattttgcttatagcttgagtcatggcttcggattcaagtctttcaatttccgcttcacttgcaattcgagtgtcgggagataggttgatagttggaaaatatttacgtacgtttttgtataaaaaagagtcgattgtgcatatatctgaggaagaaagcttgttgatttgaacagtcaaataagaaaataatgaatgattactcaaacgatatgcatttctaatatcgagcaaacgagacttaattcttgacttcatctctgcagccgctgctttggtgaacgtaacaacaagaagctcgtcgaccgtgcattgcttgttcgctataagctgtgatatcttttcggtaagaactgcggtctttccgcttccggcagctgctgaaatgagcaggtttccgctgtcgaaatctatcgctcttttttgtgaatcggtaaatttaatgtcagccattgttactcctgaaattgcaaatatatgcaaaattgcaccatgtacacggatctacgccgtcaatgatcctaggtgctagctcaaagctgttgtgtaaaatattatcaccaatggattttacgtccgctatcagtttatcttttgatgaggaaagttcactctcacttaagtagacataatttgacttgtcatcgctcgaaaacgaatcgggtaaaatgccactgaaaacgattttatctttggctgtgtctataacattttctgaatcgacttcgcgagaaacattgacggttgaaagattgttggagacgtagatagcaccaccaaaactcagaggtttgttgaattcgtacaagttgcacgcatttaatagagaaaaaacatatataagaagctgaatttcggtgccgttttctagatctttcattgaaaatttcttgtttccggtcttgtaatcgagaacgcgtatcattacagaagattcgttttcacgtatgtcaattctgtcggcgattccttcgataattatacgtaccccgtcgcttgatacgaattccatcggccggattccggttcgtcctattttatgctcgaaaaggaaaggcgtgaagccggattcggtaatttcttcttccagtttttcgatgaaaactttgacttgccgttcaattcggatgaataagtattcgtttcttacttcagcagttcctacatttttttctagttccgttttgattgaagtgataatattatgtaagagcttttctcgtgagtcggcagtattataatcttttgaatgggaatatatggcagagaagtattgctgaagaatcgcgtgaattataattccgatatcgggaagtgacatttctccggttggacgctgcttgattttcatctcatatttgcaagcgtaactgaacggacagcgaagataagttgaaattttagattgagaaaggtataaaatattagctttttgactctcgaagtgaggggttggagaaactttaatatcactggaattaactgcaggaatatccgttgaagtgtcggaaatagaatgatttatagtcaaagaattcattacttctttaacatctcggcaaccttttgatagcagatagttctcgcaacttcgcttgtcgtatactaaaaaattaacatcaaaatcactcgaagaaacaacacttctctcaagcaaatggcaaatagtggataccgcgaaagatagctctttcttctcttcgtataaaattatcaccttgtcggaagcggctgagatggttcggtagaacatgcagtattcacgcgcgctgagcgtttccgagttgtcgcaggatagctcaataccataatttacaagttcagcgcgatctctttcgctgaaatactgcttgtcaggattggcttcacctggaaattcgccttcgtttgcaccgagaataactatgcattttttattttcaagacgtataccttgtgcgctaccgattagaatctcgttgctgccggaggggatgctgccggtgtcaatcgactgcgcaacacgatagaataacccgctaaattttctcgcgtcaatatagcagtcgcccaaaaagtcaaccatcttgtcaagaatttcacaaagcacacgccatcccgaacggcatttttctgcttcctcgagcattccgtatgatttgtatgactcacatatcttctcaagccctacggaaatgttgaagacttcggctaaatgcacaatagctttggctatattgacaacgggtgtagctcgattttcgccgtcaaaaacattcgcaaattcaccgagaggttctgaaatctgcgtcttaagcgaatttacaatcctcaaaattctctcgccgtattctgtgattcctatcttaaatccgtcgggattcatcgaccagtcgtcacctgtgtatgccgcgcgaccgtttaaattccaggtatttacataagtctcgaatagctcaatggcataatttgacagctcatctgcttcttcgttctcgttgagaaccggattaagagaaaataatcccgttttcaaaagacaaattatgtcctctttacgccatccgtcggagatgattttcagcacatacgtgaagaattttattaccggattctgcaaaactccggaggattcagagataaaacagttgaaaccgtgctgtctcagttctacgtcaactatgcccttgtagctgtcgatgtcatgcgcaactaccgcaatatcactgtaattatatccctttttcagtaaatcattgaccacagccgagcatattctcgcttcgtctatcttgtctttacactgcacaatttctatattatcggagaaaaactcatctgaatccgatggaattacgccatatttctcacgaatagcatcatctgatatatccggttcatcaaagatatacctctcacaaagcgcaagctcgggactcaacttgtggcgcaggttttcacacagtgggacgacactgtactccagattcagccggttcgcaagtgttatcagcttttttaaagtctcgtgagtttcggcaaactgcggctcgagcgtttcggcggaatagtcaaattctgtctcgttcttagctttaacggaagtcataacagttgcggtaaaatcagctgacgtgcgcattatttcacgaagaattttctcctgaccgcttgtgtacgaaagaaatgaatcgacaaacacgctctttcccttgaagtacggattttccgcgatggatttcgcaagttttgtttcaaggtcggacttgtcaatgtagtcctcgtgaagaatgctgttgtacgccgcgtatacgagggtcacatccgataatctgtcgctgaagctgccgtatttcgacggttttgcttcgtcggatttactgtcgctttcgtcattttgccgtgacatcatttcgagcgcgttttccgccatttcgggagtgattccgctgcttttcagctcgtcgacggcgcgaagaagtatcggaatgcacctgtcctcgcgggaagaaagattgttgtagaccttgagactgttccacacggagagcatcgcgcgccacatgatgaggattctcgaaccgtcgtcgataacgctatcggcaagtccaccatattcgcgaaatacagaacgtgcgagatttgtgaaatttgtcacttcaaggcgcaggtttgacgaaggtttaagaagtccggcgaattttctctcccagactactgtttcctgctcggggacgatgacgacaacttcgcgtccggtattgtttatcagatcgcagaccttgcgggtgacggtttcgcttttgccgctgccgcttcgtccggttataaatctaatcatttgaacctcaatttacaaaaccgcgcggaatgtaccgaaattcggcagcaagcgcgcggttttatctttagtttgcgtggggatttttactgaaataaatctaaaatagtcggtgaaataacagaaaatccgcactaatgtaggagaattactcgccagaggaattctcgagaatcggctggtgttcctacctatacagctaaagtatatgccgattattattcatcaatcttcgcgataacgacttttccgtggtcggtggagtcctgccatgtgtcgtagggggagacgaacgtgctgccgaccgacattgcgatgtgcgcgccgacttctcccgtgaatccggtctggcccgtcgtgcctatcttgtcgccgcgtgcaaccttgtccccaacagagacgtcaatcgagccgaggttgtagtaccaggtcttcagcccgtagccgtgttcgattacgaccatgtttccggcgtataggcagtcggaggaggcgtaaaccacttcgcccgcgtttgctgctacaacatcctgtcccgccgcagctctgtagtcaacgccgttgttgcggtatgcgggggtggagctgccgttgagtaaaatttgtctgccgaagccgcggagaagagtggagtcgccagagatgccttcaaggaagtagccatcaaagtatctctcggaagagccggtcgccgtcagcttttctacagtgttcgagaacgccgcgaggttggcttcggtgcgatatgtgttgattatagtgtcggagagctggtagttcgaggtcttttctccatcattttctattgtaatgttggtttcctgagttgtgccgccgtatacgaacgtgatggtgtatatgcctgaggggatgtcaagcgagatggggagcagacctaccgcggtgctttcgtcagccttgtagaacacgggagtgatgtcgacgcccatggtggaagtgaacttgatattctcgggctttgtgacgttgagagcggttatcgcggtgaactttccggcttcaactgtcgtaagaccgaggtagaattcagcgggagcggtcacgagggacgagaatttgtagtcaagctcgccgcagaagttacgcgcagggtcttcgtaccatcttgcgataacttcaacgttgacgtgtcccgtgtcgtttgtggagtaggtggaaatgtccgcgagagagccgtcgaaaatcgaattgccctcgtcgtccgttatttttacggagcagaagtcgggcgtgatgtcgaacgtcaggtccagtccgccttcaagctcgtacgattcatcgtggtcgaacacaagggaggaggtgtcagcgtcaacgaacgagccggtgtagtttttgtactgccaaaccgcgctgtccggctgaatgtcgtatgtgtgagagagcgtcagagtgggcattgcggcttccccgtacaggctctcggcgtattcgcttgttatgaatgtctccgcgtccttggcggcaattttgtaggttgcaccgtcggcagagcgcagatagcacgtctccgggtcggtagtgaagtagtattcgtatgcctcatcctttattccggtggagattgtcaccttaaagaacttttctcccatgagagagtcggggagtgcgacgatgggctgcgcgttctgtatcgttccgaggaagtattttatcatctgctcggcgctctccccgtcagtgtcctttgtgagggtgtagtttctgccgtttatatcgtcaatggagacggagactgcggtgttttcatcgacgggagcgttctgagttctatggtagctcgaataagccacagccgacgggatcaggcaggcgacaaggagcaggcaaagcacaattttatttttcacgctgaatccctttctgaaattcttataattatactattttatactattatactatatgagatgtgaaaaatcaagaagggacaagtaaaaaagaagccgcaagcggtacaatctgcactgtacgtcgacggcttcgcatattcggttcgaattttactgattatctttaagaatcttctccgcgcacgctacttttatgcatgagcaaagtatctcgatcgcctgtgaaagctcgtcaagctcgggataggagggcgcgattctgaggtttgcgtcgtaggggtcgcgtccgtagggatatgtcgagccggctgttgtgagcgtaactccgacagagcgggcaagctggtacacacgtctcgcacagccattgtttacataaaggctgatgaaataacctccgcgcggctttgtccagtgagctatgcccagccctccgagaatttcttcaaatttgttttccacaagctcgaacttcgggcggagaatagcggcgtggagtctcatgtgcgctcttatgccgtccgcgttcttgaagaatttgacgtgtctcatctggtttatcttgtcgtagccgatggtctgcgttgcgataatcgggcgaatctgctcgaggtttttgtcggacgccgccattatagcaagaccggagccggggaacgttatctttgaagtcgacgcgaagtagaaaatgttgtcttccgtgccgtactgctttgcaagctcaaagatgttcgcaagaggtacgttttcgtcgtaaagctcgtgaacaacatacgcgttgtcccagaaaatacggaagtcgggggcggcgggcttcatcatggcgatctgctcaactacctcgtcggaatatgtaatgccttcggggtttgagaacttcggaacgcaccacatacccttgacggacgggtcggagcaggcgatgttgtaaacctcgttcatgtcgggaccgtcgtcgttcatcttcaccggaaccatttcaattcccatctcgcggcagattgtgaagtgtctgtcatatccgggggaggggcagatgaatttgattcttccctgacggcaccaaggctcatgaccgccggcgacaccgaagagcattgcgcggactatcgtgtcgtacattacgttgagcgaggagttgccgagtacgagaatgttctttgccgggatgtcgaggagttcgctgaacagctttttcgtttccggaagtccgtcgaggataccgtagttacggcagtcaagtccgctggcgctgaagcagtctccgcgatcgcttatgatgttcagcatacctgacgagaggtcgagctgtgcctgattcggttttccgcgggtgaggtcgagagtgagatccatgtctgaccagtggtctagctttttctgctccgctgcgataagggctttaagctcctcggggctcatctccgaaaaggactttgtttccgctgttttctgcatgattgtgttcctcctgcaaggtgaagatttttgtcagaaaatgaatttgcaccgctgaatttattcaaaaaaatcgtcggcgcacgcaagcgggagagagaacgtgaaatatttttttacctcacttgcaaatccatgactatattatattccattttatcccgaaaaacaatagggtagaataaaatttcaaaatatttatcactttattctcatatgcgcatgaattttattatataattgtgcaaatattttcctcgggaggggcgcgtatggctcagcgggacacaaatccgtatgaatactcggattcaaacaagagatacatgacctacgactggtatctgaaagaacgatacggcggaaaggtcgcaaaggtgccgcttgacataggctcgacctgcccgaatcttgacggaagaagaggtcacggcgggtgcatatactgtctgaacggctcgtcctccgctgtgggggaaagcatagaagagcagtacaaacgcgggtgtgagataatgtcgcgcaagtggaagcccgtcggattcatcccctatctccagtcgaacacaaacacctacggagatatcgacaggctgcgcgggatatacgacactgccgcttcactcgagggtgcggtaatgctcgatatagcgacgcgcgccgactgcctcggggacgatgtgctcgagctgctttacgatacggcagagaaaataccgctgaccgtggagctgggtttgcaaacgacgaacgacacaaccgcagagaggataaaccgctgtcatacctatggcgagttctgcgaggggtacgaggggcttataaaactgcgcgacagagtgaacgccgagttcccgacagatactttcatcaaaaacaggttcaccgtcgccgtgcatctcataaacggtctgccgggggaaggtcgggaggaaatgctgaaaagcgccgccgacaccgcaaagctgcaccccgacattgtgaagatacacctcatgcacgttttgaaggggacagttctcggagagatgtacgaggggggagagtacagtccgatggagagggaggagtacgtcggcattgtgtgcgaccagctcgagatacttccgccggacactgtgattggcaggataacgggagacggcatggcagacacgcttttagcaccgcagtggagcagacgtaaaaccgaggttgtgaacgagatagacaaggagctgtaccgcagaaacagctatcaggggaaatattataaagaataaaaaacaacggctctcggtctggtcactgaaagccgtttttgttatgctgttttactttttcttttttgcgagatgggtaagaagtccggtcataaacaagaggaacgccgccaatattgcaatttccgcgtatgatggtacataaacaagctgtgtcatggtgtgaatacttcctttcccttaatgtcatctatattttaccatagaattcacattttgtcaatagatatttgcggaaatatttacagaataagcgataatacgtaacttaaaatttatgcggagacaacaaaatcattctgtaaccagctcgaacgttatcttgcgggtggggacgtcggtgtcgaccagctttgctttcagcggggtgccgagctcgtatttctttccggcgtagtacagtgtcatcatctcggggttcgtttttgagccggggagggtcagcgcggggataaagccttcgacaaggttatcacactgcacgaacataccgctgcggataacggaggacacgaccacatcgaacgtctcaccgagcttaggctgcatataaagcgtcatgtagaggtcttctatgtctctctccgccgtcagcgcaactatttcgcattccgtggaggagtttccgcgcgcttccgctacatttgcaagctccgttacggcgtgggggatgttttccatgaccgtcgagaacgtaagctccgtgaggtttgtgttctcgaagactgtagttataactgtgtgtacgaacgtgtcggggtaacgtctgatcggggaagtgaagtggcagtaggtgtccgcgcccagaccgaagtgggggagacataccgcctgatatttcgccttcatcatggagcggagcatcatttcggatacggagtcctcaatgcccttttcccttgcctcgtcaagtatctccatcagcgcagtgctaagctcgtgcgcgtcttctgctttaactgcgtgagcggtattcagtccgacgttgtgcgcgaaggtgacgaaattctcaatcttttcttccgagggcttctcgtgaatacggtaaaggcacggcagaccgagggattttaagacttccgctactcccatgtttgcctgaagcatgaactgctctatcatcttctcggcgtctccgcgctcacgtttgataatgtcaatcggcatggagttttcgtcaactataatgatgggttcgcagtcctcaagctccattacgccgcgctgttcctgaagctttgcaagtttaaagtacatctcgtgcatatcggagagcataccgagaaccggcgcgtatttttccctgtattcgctgtcgggattttcaaaaatgtcgtttacttcatcgtatacgccgcggacggtgcttcttatcatggacttgaaaatgcgggtgcttttgcggtttccgttttcgtcgagggttatttcagccgtcagcgcgtacttgtcctcgtgtgcgttcagtgagcatactccgtttgagagaacttcgggaagcatcggaacgaccttgtccgtgaagtatacgctcgtgccgcgcagtcttgcttcttcctcgacgggtgtgttctgtcttacgtagttcgatacgtccgcgatgtgtactccgagaatccatccgccgtcgattttttcaagagataccgcgtcgtcaaggtcctttgcgctcgctccgtctattgtcatgatgagcttttgtctcaaatcccgtctgttgccgagctcgagaggggcagaagcgactttttccgcgttttcaagcacctctgcagggaagacagtgcgaatgcccgactgataaagcacagccgaatagttggcttcgcgagtgagagccgagccgaatacctttgaaatctttccctttgtgtcaaagtaaggcatatctgccggtccgcgcactgttatcgagcgtgttctcgtgaatgcgtcctcacctgagggtattacttcgaccttctccatgtcgtgagcgtttgcttcttttacgtcctcttcggtgatatatacgttgacgcccgctcttttgttgtcgggaataacgtatgcgtagccgtcgaatctgccgtttttcggtacaacgtggagcgtgccgattattgacttcaccgacgactcaaccgacgtgacaatgccctcgggagagcctttttcgccgattcccgtgacgcttaccgtgacatggtcgcccgtcatagctcctgctgtgtccttcggggagatgaacacgtcgccgttcgtggaagcgtattcttcatcgggaacgacaaagccaaatcctcgtccgctgtatgagaacgtaccctcgattttgtatgcgctgttctttttcggcagggaagagagcatggacgcacccttgacactgcggacgccgcccgacgagttgcggcttgagctgttgctgcggtcacggcttgagctgtccttgcggtaattatcgttatgcgagccgccctttgagtagccgcccatcgagaatccgccgccctttttgctcatcgcgctgtttttgccgccgacgctgttcatcagccttcttatttctttctctgttaaagttttactgttcttagacaattcctactccttaaatctctttgtgtatattgtgtataaatcatgcaaaaattatgtgcctgcaaaagaaaaagcggaaccgcataagtcccgcaaagttctctgaaaattattctgctgcggcttctgtatctgccgttgtatcagctgttgtctcaccggttgtttcggctgtggtatcagctgtagtgtcagccgtagtttctgtgttggcagcaacgcccgacgtgttcagtgtggtcttcttgccgacaccctgagtgaggtacgcgacgagaacgagaactacaaaaacaacagcaacgatcgttgtgagcttagagagctttttgtccatagttgaagccttggacttaccgaagaaggtctcagctccgccggcgattgtaccggaaagattatgactcttgccggactgcatgagaactgcgacaacgaggaatattgcggcgagtattaaaactataccgatagcgatttgcatgatcaagcctccgtaatttttctacttagccttactattgtaccacaaagaaaatcgaaatgcaatagtttgacataacttttttctctctccgcacgcatatttttgccttcacgggtgaaagatagagaaaaagatttatgatagggagagaaaaatgcgcggaggggaatattcacagaaaagcgtgtcatatccggcactggaaaacgacgcggtgtgcgactgtcttgtggtaggcgggggactttgcggagtgctcacgtcatatctgctgtcggagtcggggctgagcgtcatacttgtcgaggcggaagaaataatgcgcggcaggagcggcagaagcacggcaaaagcaacggtagctcagccgtatctctactcgaacctgtacgggcattcgtctccccgaaaagctcgcgcggtatctgcggcaatgcgtgacagtatggacctgctctactctctcgtgggtgaatacggctgcggcgagaggacggacatgtattattatacgaaatacggctccaccagactgcgcagggagtacagaaccatgcttgaatgcgggatagactgcgcgtttctcgagagcggacagagcgatatccccgacgaatacaccgccgccgtgagagtatttaaccagctcgggcttgacgcgaccgctctcggtgaaagactgtgccgcgccggaagattcagagcatacgagcatactgtcgccgaaaacataggtccgagaggatgcacggcaaacggataccgcctcaggtcaagccaaaccgtgtgcgcgacgaactatcctcccgtaagagaagctgaaaatccactcagatacgcgagaaaaacgtcggttgtggtacgcggaaaaattccaaaagaaaccggcaacgatacaggagagaggatgtactactgcgcggactgcggatacgggataaggttcacgcgcgggcatattctcgtcagcggaatggcacatcgcggcgcacccgaggagggaacagtggagaagctcaccgagataatgcataaggtatgccccgacgcggtttacgacgctcactggacgagcaacgacacttacaccaccgactcactcccatgcgtgggaaaaacaaggagcggcgtgtacttcgcgggcggcttttgcggatggggaatggtttcctctgctgcggctgcgctcatgctgaaagaaaacgtgtgcggtcgcgagagctggtacgacgaggcgttttccccgcagagaagcgtgttcagcggtacggtcggcgagcatatcacctcggcagtcagcgcggagatgaagaatttcgcgaaagctcccgacaggactgcggatgagctgcttccgggagagggcggcatagtgggcgaaagtggacggcgtgttggcgcatatcgggatgagaggggagagctgcacacggtggaagcgaaatgcccgcacctcggatgtgagcttgagtggaactcggcggagaaaacatgggactgcccctgccacggctcacgcttcacctacgacggagaagagctgtcctcccctgcaagtcatggactgaagaaggtataacaaaaaggctgactgcactcggattgtttccgataatgcggacagcctattatatttgtaaaacctgctgcgtcagctgaaattacttcgcgtagtcgatggcgcggctttctcttatcatgtggactttgatctgtccgggatattcaagctcgtcctcgattttctttacgatgtcgtgggcaataagcaccatcttgtcgtcgtccaccacatctggcttgaccatgattctgatttcacgtcccgcctgaattgcgtaggatttttcaacgccgtcgaattcgttcgctatctcttcaagcttcgtcagtctcttgatgtagttctcgaggttttcgcgtcttgcaccgggtcttgcggcggaaatcgcgtcggcagcctgaacgatgagcgcggttattgtctgagcctcaacgtctccgtggtgagcttcaatcgcgttgatgacttccttcgattccttgtacttgcgggcaatctctacgccgagctgtacgtgcgagccttcgacctcctgcgtgagagcctttccgatatcgtggagaagtccggcgcgctttgctattgtggagtcaacgcccagctcgtccgctaaaactccggagataagcgaaacctcaacggagtgcgcgagaacgttctgaccgtagctcgttctgaatttaagacgaccgagcagctttacaagctcgggatttatgccgtggattcccgtgtcgaacgttgctctctcacccgcctgacgaattgtagtatcaacttccttgcgggctttttcaaccatttcttcgattcttgcggggtggattcttccgtcggcgatgagcttttcgagggctatgcgggcaacctcacgtctgacggggtcaaagctcgataccgtgatagcctcgggagtgtcgtcgatgatgaggtcaactccggtgagcgtttcgattgtgcggatgtttctgccttcgcgtccgatgattctgcccttcatttcttcactcgggagcggaactgcggatactgttatctcggaaacatggtcggcggcgcatctctggactgcgagcgctatgatgtcgcgcgctttttcgtccgcggtttccttgaattcttcttcaagctcgacgattctcttagcctgtctgtgcttgatttcgccttcaagctgctttacgaggtttgcggtggcttcttccgctgtcattccggcaactctctgaagctccgcgtactgctcttcctttattttttcaatgctttcgttaagctccgtcgtctccttgagcttctttgtcaggctttcgtcctttttctcaagagcgtcggtttttctgtcgagcgtttcttcctttgactggactcttctttcctgtctcgtaagctcgcttctgcgttcatttaattccagctcaaagtcgttttttgttttgataatttcatccttggcttcgagcagagcttcttttttcttgttttctgcggatctgattccgtcttcgagtatttttcttgcctgaatttcagccgagccgatttcagcttcgccgacctttttacggtagacgacgccgagggcaaagccgcacgcgaggcaggcaataccggagatcagtgctgcaataacggtctccatcccgcacctccttttactttctgtagttttgttctgcattttaatcaccttttaagtaatgttgatgtataaaaaatagcttagaaatatgtcaaagtcaatccgggggaggagaaaatatataaaatgcaactcacagccttacaaatcaataaatccgtacaccctgcggaatgaaaacatactactcaatattataactccgtccgaaaacaaagtcaataggaaatattgtattcttcattcaacatgaggtatacggattgtataaaagcccgtctgctatgtgaaaattgtagaattatgcgctatatatcacttgtgtgaagccgtactttgtcctctgcaagtctggactgcacggcttgaatgtcacttttatcgggggatagagcggcgagagttccggcagcctgacccgtgagagcgcacacctgaatgaccctcgtcacgtcccacatggagtcgtcggctgagatgcaccgtcccgcggcaaagagattttgcacctttctgccccacagagaggacagcggcagctcgaataccggtccggcttttctccagtcggagaacattcctccgctgtcttttacatatgcaccctcaagctctcgcgtcacggtagtctcacccacaagacggcgcgtcatgcgaagctgcggtatgccggggagggaggtcagcgctctatccttcgacacacctccgcgggagagaaaatcggtgtaagccttgtcgtgcgagaggaacatgaagcgtgagttttcctcggcgtcaatgcccgtgaagcggtcggggacgagggttttcacgttgtccttcggtttgtccgcctcgggaacttcgcaccatccgagacagtgcagagcgttccttccttcttccgtcgaataataccaagccgcgagtacgttcttctgcggatataatgccgtgtcttcacccgagagcgcgcatatgtcggcgtcgcccgtcgcgtcaaccacagccttcgtgcggtaagccttcctgccggacttgttttcgactacgacgtgagttatccttccgtcctctacaggagcagagcatacgagagtgccgtagagtatgtccgcgccctcgccgagcagtaatttctcgcagtcaacggcaaacacattcgggtcaaactgagcctcgtaccgcccgcttttctgccgctcctcacgggtatagtcttcgctcagccacttttcgggacaccttcccgccgcgccgtgtttaattgagagctttaataattcttccgttatgccgtagctcacctgatttcccatgccgtcgcagagagggaggtatatcgtcacaagtccgagcgtcgccagtccgccgagcgtgtattctctctcgatgagcagtgttttcgccccgcagcgtgatgaagcgagagccgccgcgacgcctgctattcctccgccgcagactataatgtcatattctccgcatacatctgttttgcgcggagcttcggataaatattccataagcacctcttttttgcttttataaaggtaatatatcaccgacatacgcaaaagtcaatagcgcgcttgtctcatttcgtcattaaatacaaaatccgcgtaaagtttttctacaaagctacaaaaatagtccgcgacgtgccgaatttgtggagaatcgttgaaaattacaagataatgctatataatgttggaagttaaaacggttttcagataaagagttaaatcaataaatatttgtgaaaggcattgctatggacaacaataacaataagtcccgcttcccgagaatagccggatgggtgttttccgcagtgttcaccgcgcttcttctcacacccctgtgcctgcttttgactaccggtcaggacaaggtcgagatggagcaggaaaagcagtacgaacgcccctcattcagcgtgggagactttctctcgggagatttccagaacaatttcgagctttggttctcgacaaaatatccacaccgctcggatttcgtcaaggcgtacagacagctccgcttcgacgtgtcggacatcggctttgacataagcacggcgttcctcccgaagcagaacgatactcccgccgaaaccgagcctgctgaaaccgacgtaaccgagacggacacgcttgaagagacaacgccgccggagccggaattcacatacagcgatttcaatcccctctacaccgagataaaccgcagactttacgagcgcacacccgttgagcctacgggatataagggaaccgaccaggtcatcatcggcaagagcggctactgctacgaaaacggatacataaacgaagaatacggatatacgcagaagtacgccgactgcccggattcatggcttgaggacagagcggagaagctcgagtacatccagaagcgcctgaacgacatgggcatcgcgttcactctcatcttcactccgagcaaggcgagcgcgtacgaaaaatacattcccgactggtacaaggcgcagaacaccgctcccgacggatatgtgcgccccgttgagagacttcgcccgctccttgacgaaaagggaataaactatatctactgtcaggatttgtttggggaagtcggacttgacgaaacctttcccgtcaccggaatccactggaacaagctggcggcggttgaagcgacaaacgccctcatcagaagctacgaggagcagaagaacacagtcgcgaaggagcttaatatcacaaacatcatagaacagcatgagccgtccggattcggaaaccccgagaacgacattttctccggagtttacagcggcgtcagcacaaagaacgccattgtcgacgaatactattacgttcccgaggtcgaggtggtaaatcccgacgcggcgagaatcaatatgctcatgcagggcggttcattctgctgggacttcaagtattacttccagtccgagaagatagtcgcccgcttcaagcagttctactacaatacatggcagggtaacgacaaggacgatccgttcaagtcaggaaacgacagatgggaagatctgctgcacaagatagactacgttgtgcttgaatgcaacgagcagatggtcagccagatgggatgcaacgctccgagatgggcagccgcagaccgcgaacccgccgacacgaattcaagcgacatttacgaatcgctttacatgtacctcaagtcaatagagtaaacgaaaggataagccaatggtattcagtacaccgatatttctgttccttttccttccggcggttcttgttctgaactacattattccgaaaaaatacatcgccgcgaagaatgtggtgcttcttattgcgtcattgttcttctatgcgtggggagagccgaaaaacgtccttctcatgctcctctcgatagcggtcaactacgtctgcggtctgctgctcggcaggttcgactccgacgagaaaaaacgcaaggtcgtcctgtgggcgtctgttgtctttaacctcggactcttgttcttcttcaagtattttaactttgtcaccggcggactctttcccgtaatcaaactcccgataggcatttccttcttcacgttccagattatgtcatacacaatcgacgtgtaccgcagaagcgtggagccgcagaaaaacctcgttaagctcgcgctatatatctcactgttcccgcagctcatcgcagggcctatcgtaagatatatagatgtagaaaaacagctcacctaccgcgaatgcacagccgaaaagaccgcccgcggaatgattcgcttctccatgggtctggcgaaaaaggtcataatctcgaacactgtcgccgctatatgtgacggaatcttcggctcgaccaacaccgttcccgcattcaccgcatgggtcggagtaatatgctacgcactacagatatacttcgacttctcgggatactcagatatggcgataggcatgggacatatgctcggctttgacttcctcgaaaacttcaactacccctacgtctcctgctccgttcaggaattctggagaagatggcatatctcgctctcgtcgtggttcagagattacctctacatacctctcggaggaaaccgccgcggcaaggtgagaacctacataaacctcatcatcgttttcgcatgcacgggactttggcacggagcttcgttctcgttcatcgtgtggggcctgtggcacggcttgttcctcgttatagagagactgggctttaaaaaagtgctcgataagctgccgaaattcatcggatggatatacacaatgctcgtcgtgctcgtcggctgggtgttcttccgcgccgatacgctctcggctgcaatgaagtacctcggagaaatgttctcgttctcgggcggagtcgcaaacggcatggcacagttcgataacctttccttcattataaccgtaatcgcgataatcctctgcactcctgtatatcagttccttaaaggaaagctcgagaagacggaaggcggaaaaaaggcggcgtttgtcataggcgcagtgctcgcgacaggtctgttcatactttccgtcattttccttacaggttcaggctataacccgttcatatacttcagattctgacaatgcatacaaattcataagagtttttatgtaattcggtcataaatgaaactccgaataaaatttccgtcacgataaaaaatgtatagatattcctatgaacagtcctaaaaacggctgaaatcgcggggatatcttttttctataaatttttattcataaaagcggcggaataagggcataattataaatattgtgcggcaggtgaattttatctgaaaaaggcacaatttttaggggactgcaagctgaaaatttgtgttattcatcgcgaatttaacattgacaaataaattgtaatttgatacaataaatgtatattaaatcagtgctttgaagcggtctataaagcgctccgggcgatggtttataatcggcggacaataccgtctgatagtctccgatagatttccttttagtttttctttcgggtgacaaaaattttataaactaaggagaaatattatgaagttcaagagaagtctcgcactcatccttgcctgcctcctcacagctgcttcattcgctgcttgctcaaagacagacggcaatgaaacaactccttccgagacaacaggaacagagacaacaggcactgaaacaacagaaggcggcgaaacaacagccgaaacaaccggcgaagctgtactggcaacatcaaacgatatcggcacattcgatcctactcagcatatacccgcagaagccttcacagacgctacacaggaatacaccgacgcttcctctgctatctacgacgcagttctcggtgatttctacgcagagtacaccaaggctaaggaagaagctaagacgacatccgaaagatacgctctcatggcactcgctgaagctaagcttctcgaatccgctgtaatgcttccgaacactgctaacggcggtaactatgctatcggcagagttgctccctacacagccgactattcactctggggcaacgactataagagatatcatcaggttcttgttacaaccgacatcatcacctccgaacacagagctgagatgaaggctaagtgggctgaactcaagggcacgggcgaatacgaagcttgggctaagcagtaccttgcagacaagggctacacacttaaggattcttacacatacggctacaccggcgacccgcagacatgggacgttttcgcaacctccagatccgctgactccgaagccatcatcaacacatacgacggacttcttgagtacgatacagaaggcacgcttaagcccgctctcgcactcggaaacggcgaattctccgaacccgatccggacacaggctacgtaacagtaacctataagctccgtgaaggcgttaagtgggttgactcccagggtcgtgaagtagcagacctcacagctgacgactttgttgcaggtatgcagcatatgtgcgacgcagcaggcggtcttgaatacctcgttgacggtcttatcgttaacgccggcgaatacatcgcaggtcaggtaacagactttaatgaagtaggcgttaaggcagttgacgactatactcttcagtacacgctcaccggtccttgctcatacttcgagacaatgctcggctactccatcttcgctcctctgtccagagcttactacacatcccagggcggtcagttcggcatcggcgtatatgatcctaccgccgaatcctacaactacggtaaatcctccgacaacatcgcatactgcggtccgtaccttgtaacaaacgctacggctaacaacacaatcgtgttctccgctaacccgacctactggaacaaggacaacatcaacgttcacaccatcacatggctctacaacgatggtacagacgctacaaaggcttacaacgatatggttgcaggcacaatcgacggctgcggacttaacgcttccgctcttgaagctgctaagaaggacggcaacttcgaaaagtattcctacgtaacttccacagatacaacctccttcatgacattctttaacgtattccgtcaggcttacgctaacaccgctgacactacaaccgctgtttcctctctcacagaagaacagaagactgttgcagcaaaggctatggcaaacgtacacttcagaagagcacttgcaatgtctgaagacagaatttccatcaacgctcagaccgttggcgacgaactcgctcctctctctgtaagaaacacctacacacccggtaacttcgttgttcttgaagaagacacaacagttgatatcaacggcacagctacaaccttcaaggcaggcacaaactacggcgaaatcatgcaggctcagatcgacgcggatgaattcaagatcaccgtttgggatcctaaggctgacgacggcgttggttcttccgatggttacgacggatggtacaaccccgaaaacgctatggctgaacttaacgttgctgtaaagcagctcgctgaagcaggcgttacagttacaaaggacaacccgatcgttatcgacattccttatccgtcaaacgctgaaaactacaccaacaaggaacaggctgctaagaagtccattgaagctgctctcggcggactcgtaaagattaacctcgttgaatgcgttgactacgaccagttctacaatgcaggctatcgtacagactacggcttccaggctaactaccatacctacgacgtctccggttggggccctgacttcggtgacccctgcacataccttgatacattccttcctgattactcaggctacatggttaagtgcatcggactcttctaatatctgaataaaactataactaaataacaaaaataacggtggaggatggactctaagggttcatcctcttgccatatatttttgaatttcaagaaattggccggaggaatcggttggaatggttgaaaaccgaactgccggcgggtggaaaggtatgtaagtaatggctaaatatttactcaagcgtattttgcacgctatcctttctgttatcgcagttgttatgatcgtaatgatcctcatatattccctgatgaacagacagctcatcttctcatccgaccctgtttacgcgaagactacaaataacgcgaagcagacgtatatgct

SEQ ID NO: 4386 - DNA, 30026 bp, Unknown
  16S sequences of unknown bacteria
ttgatggaaaaataacaaagaagcgacaacctaaaaatattatcatagtaacaacatttaaacgagagttatatagagttaaaacagtgtcaagtagagaagatgcgttagcttatatgggagatttggtttcaaaaataatggctgtgatggatgaatttagaggtgttcaactattattcaatatattgaatgaagaagactatgcttcatttgaagtatttaaaaagttagaatttcaaaaaataatacctaagctagaaattgttttatttaatcctgagataggagaaataaaggaaaaaaatagagtaggagaatagatattacgaaaagaatttgctttaattttaaatagttttgaaaaataagaggtggaataatatgtatgaatataaagttttaacacaaaaagataaatggtttacaggaaaatttgatcctttgatgcttgaaaaagctattaatgcttatgctaaggaaggatggcgtgtaaagggagtttctacagctgaaataggttcgggagttggtagtagggaagaaattattgttattttagagcgaaaaacaatggaacatgaagatttcaatatagataagattgaagaaatcatgttaccaaaattataggaggtatttaatgatgaatgtttcagaatataaaggaatattgtttatagaagggaaagtcgattgtaaaataattgatgaagatccatttaatttggatatttcaggatttggtaatcaattaaaaaattttgctgatttaaaagaaagtgtgtatcgtaaattaaaacaagctaataaaaattataacgttgtttataattttcaatattatcagaaacaaagtatattagcattagatgatattgtctttcatgcttcaggacattttgcactcgtagatcaagaagattattttaaatataaaaatatgattaataattcttctcttgaacagttattttcaataagaaataatcttttttacagatcaatgcctgtccaaattgataaaattgcattatataaattaaaaaataaatatttaggccaatgcaaattgattaatttttctatgaaagaaataagaacagtaaaactagaagctcaatcgattaattcttttggagaattaagtggtaaaataaattactttgaaataacaagaaaaaaagaagattcaaattttagttttggtgatgataaaacaatcgttttcgaagaaagtgatgtagctgactttaaaattaaaattaatactgtaataacatctacaggagaaattgcatatgacgaaaataataaagaagcaattgaaaggtttgttccattctccacaaggttagatgatgatcaatttaaatatttaaaatttaaaaagtttaatgaaatatttaaacattataatgtagatattaattcaaatattcctagactttataaaaatacaattattgattttgatggaaatttcattgatacttataatccagaattattgtcaatcgaaccatatatatcggacaaattgatgaatgattttaatctgtttatgaaagaagaacaagaaaaagaacaaataagaaaacaaaaagaagaggaaaaaaaagaacaaattaataagttgaaaaataaattaaaaattgttttccctgtattaattgttattttcatttgtgtatggggaacggtcaccttaattagaaatagtaataaaacatcagtggaaaaatttgaatcgttaacttttgattctttagtagattctttctctgaaacagatttaaatttaattgattatactgataaaatcaatagaaaaagccctggagcaggacgagtcgaatgcgataagtattatctaataatgaaagataatatggaagttgggcatttttataagggggataatatttttgaattagagtttagctatattaatactcaagatgacgccgctaacgaaaaatattttttgaatcaaggtagtaatttgaacactttaagcatttcatatttaaaagtagatgaagagtatgaaaaacatataaaattttactttatggatagtcctcagaaatttgaaggttgcctagaagaagaagttctaacatctgacgatgatatattaagtattatatataccattgatccatatattgatgattgcttaaaaaaagcagatttgttaagtaaagaggagtcaaatgaaagagggtataaagtttatgaagactctaatgaaagaatgtatttagattcagatgaagagtatttatcttatgatgtacaagtttcaatgccaaaaatattggaatagacacgtttaataacgttttgagattttttgacaatgcaacaagtaagcgacaaaaaggctttaaaactcttattttattaggtttcggagttctcaaaacgttagtaataattgttgtgagaaaattagagaagtatttagattttgtgagaagtttagatacttcttttggcgctccaaaataacatggagtcataaaattttgagtttcaagtaatgtggggtagttgtcgccccacattgttttgaagcttcatgagcagagcttggatactctgctttcgttttgtatcatgtaaatagtgtaggaggctttgaaatccagaaaataaatcataccgttaagaactgcttctatttgatgtcagattttaaatagttaaggtattatcaaagttcccttgttagtttgactggattcaaatgccataaaaacattttgtatgccagggaatgatcgaaaggtacatttttaattctttaatagtcaaaagtgcaattttcttttataacaactgggccttctattaccatactgccataatatttctataaagcaagactcagatgtaataaagttattttttgtcattttttaattttgtcgcgatgtttttctgactctttcgttcaattaaatctcctgttttgaagctaaaccctgctacatacggagcaatgcgggcaagggacgaggaaaagaacgatggaacggatatcagcatcgtaatcaaattgagaataagagttgaaattactggcaataaagcatatcatagaattgttcatcaatgaacgggagcgaacgagagctgtggtaggttttagggcgctccttttttgtgttcaaataacgctcgcgtatcaaggtcctttcatactgatcaaaacataagggtccatgataaaggccccatgaaactgaaaaggaagaccccaaacaggctcttcccatccccatataaaacgaaatacactagataccccatctacttttatatatcccttctttttttcttactttaataagggtataataaggatagttagtattgaaaggagtaggtaatagttatggattatatagaaaagttatttaaacagtttccctttgtatatcgcattaatgaagaatactatgcatttggaacaggcatatgtgcaaaattagatgagagtagtgttttgctaaaatcgagatttaatcgttatatagcttctttaacggaagatatattagattcagaagcttgggaaatatttcgtaaggtaatgagtgaagctaattggaaaaaagataatttaggatatcaaggtaacgaaaagaaagaatttgataaattgggttttaatgatttagagattaaagaattagaatcacaaattcaatcatatatcgatttctataaaaaacacaatttaaaagaatatattggaggaaaaattctatgatgaaaaatggtaggccgtatagcatagaaaacggtagtatagacgatgcattaataacagatcattctcaggacgatattaatttagtatgtaattggattagaaataatattataccaagaaaaactcctttatatggatatagtagttataaactaaaacatatttttgaacacgatacaaaactttatttaacaaacaatgaatttaaagatgcaatgttgatgtgtggatattcaccagtgaatgcaaatgaattaaattgggagtattgtataagtaaaaaatcacctgctttactaaggaaatagaaaactaaaaaaatctctagtaattgaattgatagatgtaaaatattagatttatatataacttaatgcctgattttacagataaattgcagtgaatctctctaaggtgtgattgcaatgcaataagtaagcgacaaaaagactttaaaacccttattttataaggtttcggagttctcaaaacgttaatcgttgtattgagaagatcagagaagtatttagactttgtgagaagtttggatacttcttttttttatcaataatgatgcacaaaacttatttaagtaatatgctatatacaagttgttgttgaacttgtttaagtaatgtgatataaataagttgaggtgttattatggattataattttgcagatgatctaagggcaataagagaaatactaggctatactcaatttgagatagctgaacaaataggagtagagcaggtaactatttcgaggaatgaacttcataaaactaatccttcaaatcgattgatggaactagtatataattttgcttttgataaaaaaatacaattaaatagattaaaagaaatgttatggatagaaaaattacctttaaatcataaattattgtttcacggagctaaaagaatcatagaaggacctttaaatgtacatgttggaagaataaataatgattttggacaagggttttatactggagaaacatatgctcaggcaatatcttttgtctctggatataatgggtcatctgtttattatttagattttaatagtcaaaatttaaaatgtaaagagtatcaagtaaatcaagaatggatgatgacgatagcctattatcgaggcgctttagataaatataaagatcatgcaattattaccagaataataaaagattcaagaaactgtgattatattattgcaccaatcgcagataataggatgtttaaaattattgattcttttattcaaggagaaataacagatgaacaatgtaaacattgtctagctgctacgaatctaggaaaacagtatgtttttgtgagtgatttggctatttctcaattaaaaattgtggaacgtgtatatcttgctgataatgagaaaaactattataaagaaatgagaagttctgattctaaacttggagaggataaagttaaattagcaagaatacaatatagaggaaaaggtaaatatattgatgagattttgtactaaatggataaggtgaaaataatgagaaaaatggataaagatggtttgttattgtgtgatttacaaggaaatgcttttgaactttctatccaactaacatcaacgagctctgaaatatttatgcgaagatttatgaatagtaaagtggcaaaaatgatggataatgaaagcattttacagatgaatatacaaccaaaagatataattaaacgagtagaagaagaatataaagaatcgaaatatggatcagtaaaatatacaaaaaatgaaatgtattggataggatatttgtatagatatttttcatatacgtatgaattatcatcaaatcgagtctataaaattgtaaagccaaaggaattgagaggattatttttaccatatcatacacttagccctgaacaagctatagaacgtatattagaggcaaaaggtatgatcttaaacttggaagatgaaataaatagacaatttgaaatctataagagaataagaggtaatcgttgacattaaatcttaatatagtttgacggaaatttacaataagtcgttttaagtagttttgtcaatgcaacaagtaagcgacaaaaatgatataaagtccttattttataatgcttcgcagttctcaaaacgttaatgattatcgtcaagagaaaatcagatcactcatttatttgggtgatcttttttattgtgagtcgttttcaaaactgaaataaagttgtagattaaagtatgaatactttttttgtttgcatttccacatagtgaggaaaaagattataattttcatttatttgcaaaatggctaataaaaaataagtattagttatatagtttatgattgcgaaagtaaagtggaatcatattatactgaaattaaaagtttataacattgatgtgataaactttgtttttgaacagagtttttcacattcttttatatagaagatagtgtgattgttttgataacaaacacatattgcttcgggttgtgttggcaatgaagcaagtaagcggcaaaaagactttagatccctcgttttataagatttcggagttctcaaaatgttaatgactatcgtcaagggaaaacagagatcatcctttatgggtgattttgaacaagaaaagcagacccattatagaatctgctcaaattgctttaaaatgttatctctttaatgtatatgctaatatcttttcaagaaatagcatgattatttactgtttcgcttgctatgacacctttgataagatgcatatgaatatgatgagtgtgattgatcttgttttttagatggtatcctcctgcttttggtgcgcccttggactcaattaaatggctgtgtatctggattctcttggaaatgatattgctgttcattttaggatgctctggtgttaatatattcactaattctttccttttaatactaggatcctttccaatagcctgaataatatctgcatctcttgaatcagcaagtttaataacaatttcatgatcaagtcatcttaatccaatatttacgccgccatttgctctgccatttattctgccatttactccgccatctactttatcctgatggttaaatgcttcgaaatttatatttggcaaagttattttaaaaatgtcaagcttgttttcatttcgggaattaagcttactttttaacagcagaaagaagaatgcgcacctgcctttgatctgaaacatcgggaagacatgtcccggatcaaggcaggcggattggcatccttccgctcattcccttcccttgacgacgcactcctcaggttgcttatcctcgcggaaccccttgaatacaggctgacgcagcccgcctcccgtcatgaagtgcatgaaccgcaccgtaccgacgagaaagggatcgaaccagagagcatgctcatttccagcaggcagaggatgaaacggacatcgtccgcgggtgcttgtttgtccgctcagcattgccgaagatacgcccagcgtgacatgtccccgatagatcagcgctccctgatcatactgcgcgaggatcaggctgcatgcgccattgtctttggaaatcatgccggtgatgacaaaatcatcgtcgagcaggttcttgcacttgatccactctttggtccgacgccccggatgatacaggctcgtccgccgtttggcgacgatcccttccagcttggtctcttccgtcagcgaaaacaaagagatgccatgttcctctacgaaacgagagacattgatgcgcgtattctccatgatcatctcgctcaggatctgttttcgctccatcaatggccgccgcatcagctgctcatcttccacgcacaggatatcaaaggcggtaaacacggcaggatgttttccggcagccagcttgatccggaaggggtcgctgagcatcatgcgtttctggatctctgcgaagtcggtgatgccgtctttgaatacatacagctctccgtccaggatgcagtccgttttgatctgcgcgccggcgtcatcgagttccgggaaccgctgcagcaggcgctgtccgcgtttgttatacagctgcagctttccatcgcacatgctggcgatgcagcggatgccgtccagcttcagctcatagataaagtccggatcatcgaatgccggctgctgagcaccgatcagcatcggcgcgatccacccggtcaatgccttaccctccgtttcttgacgctggtttgtgcggcagtgacggaacgctgcagcgcttccatcaggtcgagcgaggaggtgtgtgcagaacttcgctttacctgtgtgatctgctgaccgcggatcttctgctcgatggcatcgcgcagccgcgcctggtactcatcatgatatcgttccggcgcaaacggcttcgtcatggagcggatcaactgctgcgccatctcgttttcggccttggaaaggcgcggatgggcaaacgtctgaggcggctgtacgagctcatcctggaaaaacagcgtgcacagcaggatatcttcttcacgcggataaagcgccagcagcgtctctttggtgcccatcacggtcttagcgacagctgccgcattcagcttctgcatgctcttcctgagcagctcatacgctttttctgcatgcggctcaggcacgctgtaaaaatacttttccgtatagagctcatcgatctcatccggactgacgaaatgcaggatatggatctgttgatcgctgtcgcttttgagcgcttccagctcatcatcgctcaatgcgacatatttgtccttttccacctgatatcctttgacgatctcatccggtttcagctctcggctgcatccgggacagaattttcgatagcggatccgctgatgggtctctttgcagagctgattgaaggagatgctggtatccctcgtcgtgcggtaaagccgtatcggaatgtggaccagaccgaaggaaatggccttgctttgtgatgacggcatcatgatcacctctctgcagtcagtatggctgattttagacgaggttatgagcctgcttttctcagcacggctgtctgatcgtccaggacatcctttgtctggctgatgaaactgcgtttgacttcatcgtgtccgcttttgtccctgcggcaggggatgatcatgcgatgagcgctttgggatgtgatacaatgaagaaaaggcattgccggaaaggagaaagaccatgtcagtcaatgtccgcatcacacaggatcccgatcaccgccgccgcttagatcttgcgttcgttcacggtcttgccgctgaagaggggctgtatttcggcatcatgaacgatatcttctgtctggagacgttcgaggaagaagatgtgcatgacgtgtggctggtgctgttcagccagaggatctattgccggggcgtgcagatgaagatcgatgctcaggacgatctggaattcatcctcaatctgccagccgggccggccgatatcgcttgcttttaccgtctgatttcccgctgctgtctgacgctgggcgccgcttccttcgtccaggaggaagaggtctgcgcgcttgaagagatcgaccgtctgcgggaagagctcatcagatcgaaccgctctctcgtgcatgaggcgctaaaggcggatctgtgcgtatttggctgcatctatccgatcacgcttgatgagagcttgttttcgctgatcgagcaggccgggaaagatcaggcggatctcgtctttgagcgttacatggatcatctgcagaagaaagactgctattatgcccgagtgcgggtataccgcgatgcagagggtgcgttccatgcgcgttatgcgctgacggaaggggtccccaccatctttccgacagatccttatctgccctttggctatgatcaggatctgcaggagcggatcttgagctggaatgtctccatcatcacgaaacagcaggagacttatcgcgaactggtctccattccctttgatctctttcgcgatatgatgaaccgtgtgcatcgggaaaagtttgacgcgcgtcatgtcatcctcacgctgaacgagcagctcatgtggttcatccggccgtatgagatcgagcaggcggtgcagcggctgagtgagtggctgagcgatccgcgggaattggggaaaaagccgtacagcgtggaacatacccgggtgttcgagcaggaggatggtgtccgctgccatatcttccgctataagaagagcatgttttccgcatggctgctgggcatcgtcagcgatgccggcgtctacagcgagatgaaggaatatcatcgaaagagcgaatatgcggatgcacaggccctgctcgctttcttgcaggcatgctggaaggcacaggcagaacagttggatgaatgagaatacacatccaggctgtttggccgataaaaaaggagtgaatgcatcactcctggtaacgctccggataataatttcgcaggaacgtctctttgtattctgcaaatgtcccatccaggatcgcagcacgcgcttcttccgtcaggcggatgataaagcgcagattgtgcatggatgcaagattgaagtatttgcatcgctcttcaggatcctgtgatttcagcaattcgcgcagctgtcctctcgtccagccggcacggcaggtcggacagtcgcagccttcatcgatcggcatatcgctgtcgcggaatttggacaggttgatgtggccgtgtttcgtgtacagacggccatgtctggcttcgcgggtcggcgctacgcagtcaaaggtatccgcgcccatctccgcgccgatcaggatgtcgtcggggcgggaaaggccgagcaaatggcgcggtttgtcttccggcagctcttcgcagcaccagcgcaggatctcgccgagattttccttgaggaaggcgccgcccaggccatagccgtcaaagtccatcttggcgaattttctggcggtgcccgccctgcagcacgccatacagcgcctgatggtagccgagatcgtcgcaatgacggcgatgttcgcgcaggctgcgcttggcccatcgctcggtgcgggccagcgcctcgacgttgtattcataggaatcggccagcgaggtcagctcatcaaaggccatgtggatgtctgcgccgatccggcactggatctgcatcgactcttccggaccgatgaagtccttctggtcggtgaacgggtcacggaaatggacgccgtcttcagtgacgcgggtcaagcgctctttcggatccgcgttggtcacttcctgttcgcggtccatactgacgaccttgccgatgccggagcccagcgacatgatctggaatccgccggaatcggtgagggtcggcccgttccatccggaccagctggccagcccgccttcttcagcgatctcttcggaaatgttgcgcaggtgatagccgttgctgagcatggcctgcgcgttgatgtccttcagatcttccatggagacgaagcgcacctcgccctttgtgcccacagacatgaaggccggggtcttgatgtcgccatgcggcgtatggatgatgccggcgcgtcccagcttgcctgggatccgcttgaccacctcaaagctgaagcggttgtcgttttgatattcgcacagcctgccgctgagccggcgcgcgatccacacttccagcggggagagcaaaagctccagcccgatgcccagcacatacgcgaagaccgcctggctcaggaattcagggaaggaaagcacgccgaggaacgcgacggtctcgaagatggcagagtcgagcatatgcgcgaaggccgatgagccgagcgcccgggcgatgaagcttcgggaaaagaagccatggctgtttttcatcctggtgaagatgaagttgttgaacaggttggcacagacataaccggccagcgaacctgcgatgaccctcggcgcaaagcccagcaccatcgaaaatgcgctctgcatgccccagccgctgtaagctggcaaggcgatgacgatggtaaagacaagcacggcgatgatgttgaccagcagtccggccaacacgacatttttggcaatcttctttccatagaattccactgtcagatcccctataatataggtaagtggaaaaacgatcacacccccgtccacggcgatgccaaaaaggttccatagctttaccgctgccagattggagatcagcagcgcgcctgcggatatcgcagtcagatagatcaggaatcggtttcgaaatttcagcatgccgctattatagcataaacgacggggatgaagaagaggcagatgagaaaggaagcgcacaggatgagcagacagagcagccaggaaaagatcgcagcggtcaaaacgctgtttgaagcgcatcaggacgcagagcaggcggcatccatgtcccgctatatgcgggatcagtttctcttttacggcattcccgcgccgcagcgcaggaagctgtaccggccgtttctgaaggaggagaaaaaggggaagcagatcgactggacgtttctggatctgtgcatggatgagagatgccgggagtttcagtatctggcctatgattatctgctcgcgctgaaggatgaagtccgcttggaggatatcccgcggatcaggaaacaagcgctgacgaagccgtggtgggacaccatcgatttcttcgaccaggtcatcggcagcctcaccttgcgcgatgagcgggtgaaggcggtgatgcgcgaatgggcgtgcgcggatgacatgtggctgcgccggatcgccatcgatcatcagctcgggcacaaagagaagacagataccgccctgctggaggagatcatcgtgcaaaatctgggcagcgatgaatttttcatcaacaaggccatcggctggagcctgcgtgattattccaaatacgatccggactgggtgcgtgcgttcctggtgcgtcatggagaagcgatgcatgcgctgagtatccgggaggcatcccggcacctgaaggaaaagcgcccgtaatccagatctgacaacacttttcaatcctgggggaacatgttaaaatcatgacgatgtaaagaaagaaggggatcgaatggcttttttaccgacgagcagggaagagatgcttgaacagggattcgaacaggtcgattttgtctatgtgctgggagatgcttatgtggatcacccctcgtttggctgtgccatcatcacccgtacgctgcaggcgttcggctacagctgcgccatcctcgctcagccggactggcaccgggatgaggagtttctgcagtttggagagccgcgtttggggtttttggtgtctgcgggcaatatcgactccatggtcaatcattattcagtcaacaaacgccgaagagataaggatgcgtattcggatgacggggtcatggggaaaaggccggacaggccgaccatcgtttacacgcagatccttaagcggctgttcccgcatgtgccgatcttgatcggcggcatcgaagccagcctgcgccgtcttgcgcattatgactactgggacgatcgtgtccgccgttcgatcctgatggattctcaggccgatctgctgatgttcggcatgggggaaaacaccatcatcgaagtggccgacgccctcaacagcggcatgaacatcgcagatatctgttacatccgcggtacggtgtggaagaccaagcgcatcgactggatcgtcgacgactacatcgtgctgccttcctatgaacaggtcaagagcgataagcgcgcctatgcgaaaagcttcatgatccagtatgaaaatcaggatgccatcaattcccgcatcctgatcgaaccatatgacggctggtatgtcgtgtgcaatcagccgccgctgccgctgacgcaggaacagatggactttacttactcgctgccttatgagcggacgtatcatccgaaatatcattatgtgccagccatcgaagaggtgcagttctcgatcacgagcaaccgcggctgcttcggcgcctgtgccttttgcgccatcacttcgcatcaggggcgcgtgatctcttcccgcagcgtggacagcgtggtggaagaggcgaagaagatcaccgcgatgcccgcgttcaaggggtatatccatgatgtcggcggaccgagcgcgaatttctcccgcccggcctgtgacaaacaggcggaacacggcgcctgtgcgaaacggcagtgcctgtggcccaagccttgcacgaacctgaaggtcgatcattcgcattatgtggagatgctcgacgccgtgcgggccttgcctggggtaaagaaagtgttcatccgctccggcatccgttatgattatctgatgtatgatcaggatgagacattcttcgaccgtctggtacaatatcacatcagcggacagctgaaggtggcgccggagcacatcagcgccgccgtattggataagatgggcaaaccgcgcaaggagctgtatctgaagttcgtggaaaagtatcatgagaaaaaccgggaattcgggaagaagcagtacctggtcccctatttgatgagctcacatccgggctgtacgctcaatgacgcgatcgagctggcctgttatctgaagaagatccgccatacgcctcagcaggtgcaggatttctatccgacaccgggcacgttagccacctgtatgtattatacggggctggatccgcgcacgatgaagccggtatacgtcgccaagacgtatgaagagaagctggaacagcgcgcgctgatgcagtacagctatccgaagaaccatgatatcgtgctgcgcgcgctgcgcaaggcgcatcgggaggatctgatcggcaatgggccgaaatgcctgattccctggaaaaagccgcatgatgtgaagcggcggcgatgaagacgagagagcttacgcgcatcgcgctgatgggtaccatcctctatgtggtgttccaggcattctcggacatcctctatctggagatgatcacgtttacgatcctggcattctcgcaggtgttcacgcggcgggagacggtgctttcctgtctgttgtttgcggccgttcacctgcttctgcatgggatcatgttctggaatatcgcctacctgatcatatttccggcttacggactgctgttttcgtcctgccgcggcttcctcagccgccatccgggctgcattccgttttacggcgccttcttttcgtttctcaccggccagctggtggacctgccctttttgctgctgagcgacacggtgacggtgctgtatatgatcatgggactcaagacatcgctgatccagggctgcctgacctttttgacgctgctgtttttgtttgagccgatcaagaaggtgctgcttcagatcgaaagacggatgatgagatgacaagaaaggaaaatgatgatgaagaaaaaactgatccttgcggccgcggccgttgcggtgatcgccgcagttgcgatcggcgccatgctgctgcgcccttccggcacccaggggacaaaggaggtcacggtgaccgtgatcgaccagacccaggacccggaaaaagaagtgctgaatgaaacgttccgcacagatgcaaagacgctgagcgaattcctggaagagacagaagggctcgacgctgagctttctcagagcgattacggctctttgctggaatcgatcgccgggctgaagcaggatatggacaacgggccatggctgacctacagttccgagaacaacgcatcctgtcaggctgccggctattgtccggccgcagacgatgtgatgatcgagaacggagacgccttcgtcttcacgctgatcgccgagttctgatcagacgcggaacgctgaatgcacgttttcatgaaaaaatgtgaaaattgtgtaaatggtattgaaaaaatatgcaatgcggtctataatgcttccaaagcaatgaagaggagtagtacggagggcgttcttctgcagagagaaggcggttggtgaaagcctgaggaggaccatccggaacgtgtcttggagctttgatgtcgaaatgcaaatgaggcagtcaacgtggttcgcgttacgaacgaggcgtcatccatcatacgggtggatggaagtaaggtggtaccgcgcaatgtcgtcctttcataggacggcatttttttattgaggaggaacagaaaatgaaaaaaacgtacaacaagatcgtgcttgcgtattccggaggtctggatacctccgtgctcattccgtggctgaaggaaaactatggctgtgaggtcatcgcagtcagcggcaatgtcggacagggcaccgaactggaaggcctggaggaaaaggcgctcaagaccggggcgtccaagctgtacatcgaggatctgaccgaagagttcgtcaatgactacatcattccgacgatgcaggccggcgccgcttatgagcagtatctgctgggcaccagcttcgcgcgtccgctgatcgccaagcgcatcgtggagatcgcgaagaaggaaggcgccgacgctatctgccacggctgcactggaaagggcaatgaccaggtacgctttgagctggccatccaggcatttgcgccggaaatcgacatcatcgcgccatggcgtttctgggaactgaattcccgggagaaggagatcgaatatgcgaaggcgcacgatatcccgctgaagatcacggcagagaccaactattctaaggataagaacctgtggcacctctcgcatgagggattggatctggaagatccggccaacgaggcgccgctggaaaaggaaggcttcctcgagatgggcgtatccccgctgcaggcgccggatgaaccgaccaatgtcaccatccatttcgaacagggcgtgccgaccatggtcgacggcgtagcgatgaactgtgtgcaggtcatcgaaaagctcaatgagctgggcggcgccaacggctgcggcatcctcgatgtcgtggagaaccgtctggtgggcatgaagtcgcgcggcgtatatgagacaccgggcggaacggtgctgtataaggcgcatgagaagctcgaggagatcacgctggacaaggagacccagcattacaaggcgcagatggcgctgaagtttgccgagctggtctacaacggacagtggtatacgccgctgcgcaaggcgatgagcgcatttgtcaagagcacgcaggaagccgtgacaggagatgtgacgctgaagctgtataagggcaacatcatgccggtatccgtcacttcgccgttctctctgtactccgcaggcatggcgacctttgatgaggatgactgctacgatcagtctgattccgcaggcttcatccatctgtatggcctgccgctgaaggtgcgggcgatcaaagcgaaggaagaaccggatatgccgggcgtggagtagcctatggcaaagctgtggactggaagatttgcgaaagagaccgatcacagcctcgatgtgctgaatgcgtcgctgccttttgatcagcggctgtatcgccaggacatcacaggctccatggcgcatgcgcagatgctggccagacaaggtatcatcagcgcggcggacggagaagccatcgtcgacggcctgcaggggatcctggcggatatcgaggcaggcaggctcatcatggaaggagcggaggatattcattccttcgtggaacaggagctgaccgcgcggatcggcgatgcggggaaacggctgcatacggcacgctcccgcaacgatcaggtcgccctggacatgcgcatgtatgtcaaagaagaactgcagaccatccgcgccctcatcctggagatgatgaaggcgctgtgtgagaaagcatccgaacatattcatacagtgatgcctggctatacgcatctgcagcgggcccagccggtcacgctggcgcatgtgttcatggcgtatggcaatatgctgagaagagactgcgtgcggctgaagaacaccttggcgctgatggatgagatgccgcttggctcaggggcgctggctgccacgacctatccgatcgaccgtcagtttgtctgtgagaagctgggctttgcgaagatcaccgacaattccatggatggggtatcggatcgggattattgcatggaagcggcggcgtactgttccatcctgatggtgcatctgtcccgcatctgcgaggagatcatcctgtggtgcacatgggaattccgctttgcggagctggatgacgcgttctccaccggctccagcatcatgccgcagaagaagaacccggatgtatgcgagctcatccgcggcaagagcggccgcgtgttcggcgatctgatgacgctgctgagcatgcagaaagggctcagcctcgcgtataacaaagatatgcaggaagacaaagaagcgctcttcgatgtgctcgataccgtgaagcacagcctgcaggtgctcatcccgatgtttgagaccatgaggttcaatgtggaaaacatgaagcaggcagcgctgggcggattcatcaacgcgacggactgtgcggattatctgaccaagaagggcgtccctttccgggatgcgtatcggaccatcggcgagctggtggcatggtgcatcgcgcatcgctgtgccctcaatgatgtggagctggacgtgctgaaacagttccatccactgtttgaagaggatgtgtatacggccatcgacttgcagacctgtgtcgcgcagcgcaaggtgccgggcggaccggcgccggaggcggtgcaggcgcagatcagcgcattgacgcagtttatcggaaaagaggaagagcagaatgcctgaaatatatatcgacggccaggcggggacgaccggtctggaaatcgtcaagcggctctcgcagcgggatgatatccatctcatcctgatcgatgaggacaaacgcaaggatgaagcagagcgccgcagatgcatgaatgcggcggacctggtgtttctgtgtctgccggatgaggcggcgatcgaggccgtcaagctgatcgaagatcctcggacgaaggtgatcgacgcatctaccgcgcatcgctgtgacccgcagtgggcttatgggttcagcgagctgggagagcacttcttagaggacatccgcaccaatacgcgggtggccaatcccggctgtcatgcgaccggcttcatctccatcgtctatccgctcatccagtgcggcatcctttcaccagaggagacggtcacggcatactcgctgagcggatattccggcggcggaaagaagatgatcgcgcagtatgaggcgggcaaagatgaggcgctgcttgcgccgaggctctatgggctgtccatgaagcataagcatctgccggagatgaagagcgtatgcgggctgagcaaggatccgctgttctgtccggtggtggatgattattaccgcggcatggccaccagcatcatgctggatgcggatgccgcacaggtgcacgccgcgctggatgccttttatcacgatgggctcgtacatgtgcgtccgttcggcgaggaaggaaccatcagcgccaacgccatggcgggcagagatgatctggcgctgatcgtctgcggcaggaaggaacagacgatcgtgacggcgctgtttgacaatctgggcaaaggcgcctgcggcgctgccatccagaatatgaatatcatgctgggacttgacccgtatgcggggctcagcatcgcagagaggtgaatgaaatgaaagtgatacagggaggcgtgtgcgctgcgtccggcttcacggccggcgctgtgcacagcgggatcaggaaagccaaggacagggatgacctggcgctgatcgtctcttcttccccatgccaggctgcggcggtctacacgcgcaaccaggtgaaggcagacccgctgcaggtgacccgggaccatctgtccgaccatacggcccgcgccgtcatcgtcaactcgggcaatgccaacgcctgcgcgatgaacggccatgtcaatgccgtgcggcagtgtgaggcggccgcgcgttatctgggcgtagatgtcgatgatgtgctggtggcgtccaccggcgtcatcggccaagagctgccgatcgcctgcatcgagcaggcggtggatcagatcgcgctgtccgcagacaacgatgtgcgctgcgcgcgtgcgatcatgaccacggatacgaaagagaagatggctgccgtgtcgtttgagatcggcggcgtgacatgccatctgggcggcatcgccaaaggctcaggcatgatccatcccaacatgggcaccatgctcgcgttcatcacgaccgactgtgccgtgagcgcgcagctgctgcagaagctgctgtaccgcaatacgcagatcacgttcaaccgggtcagcgtggacggcgacacgtccaccaatgatatgtgcatcgtgctggccaacggacaggccggcaacgcgatgctggaggatgaagatgagcagagcgcagtgttcgaagaagcgctgcatgccgtcatggaggatctggccaagaagatcgccgcagacggcgaaggcgcagaccgcctgatgacctgcacggtcacgaatgcggcggatgagcagactgcggagacgctggccatgtccatctgttcctcttcgctggtcaaggcggcgatgttcggcgccgatgccaactggggcagggtcctgtgcgcgatgggctactccggagcgaagttcgatccgcaggccgtcagcgtgacctttgcctccgcggccggagagatcgttgtatgcgaaaacggaaagggactgttgtttgatgaggatctggccaagacgatcctttccgaagatcatgtggagatccgcgccgatgtgcatcaaggcaatgcgcaggcaacctgctggggctgcgacctcacctatgactatgtgaagatcaacggagattaccgcacatgaccagcatcgatgccaagatcaaggcccagatcctcgtcgaggcgctcccttacatccagcaatatgccggggagatcgtcgtcatcaaatacggcggaaacgccatgatcaacgaagaactgaaggaagcggtcatcaaggatgtcgtcttgctcaatctgatcggcatcaaggtcgtgctcgtgcatggcggcgggccggagatcagcgagatgctcgataaggtcgggaaggagagccagttcgtcaacgggctgcgctgcaccgacgatgagacgatggacatcgtccagatggtgctgtgcggcaaggtgaacaagaacctggtctctttgctgcgcaaggcaggcggccgcggcgtagggctggccggcgtggacggcagcctgttcgaagccgtgcgccgggatgcggagcatggcaatgtaggcaacatcgtgcgggtcaaccccgacatcgtgctggatgtgctggaaaagggatacattcctgtcgtctccagcattgcggcaggaatcgaccagaccatgaattacaatatcaatgcagacttcgcggcggaaaagctggcgatcgcgctgcatgccaagaagttcatcctgttgacggatgtcaaagggctgatgcgtgacttcagcgatgaggattcgctcatccgggaagtcaaggtatcgcaggtgccggggctcatgaaggaaggcgtgatctccggagggatgatcccgaaggtgcagtgctgcgtcgaagcgatccgccagggcgtgcacacggtaaatatccaggatgggcgcatcccgcattccatcctgatcgagattctcagcaatgagggcatcggaacggtattctattagaaagggagggaccggtatgcatttggaagagatacgcgcattggaaaagcgctatgtgatgcagacatatggacgcaatgagatcgccctggtcagcggtgaaggcgcccgtctgcgggacagtgaaggaagggaatatatcgatctgacctccggcatcggcgtaagctgcctgggctatcatcaccctgcgctgagcgcggcgatcagcgatcaggcgcagaagctcatgcactgttcgaacttgttctacagcgagccgatggcgcaggtggcagagcatctggtgaagtccaccgggctttcccgtgtcttctttgccaattcgggcgcagaagccaatgaggcgatgatcaagacggcccgcaagtattcctctgaccgctatggcaaggaccgctataagatcatcacgctgcgtcagtctttccatggccgcacgatgacgacgctgatggcgaccggacaggataagttccatcagtatttctatccgctgccggaaggctttgcgtatgtcgaggccggcgatctggcgcagttcaagtcctgcgcggatgagcatgtgtgcgcggtgatcatggagatgatccagggcgagggcggcgtgctgccgttggatcaggcattcgtgcaggaagtcagcgcttattgcaaggcgcatgacatcctggtgtgcgtggatgaggtgcagaccggcatcggccgtaccggcacgctgttctgttatgcgcagtatggcatcgagccggatatcgtgagcatggccaaagggctgggcggcggcgtgccgatcggcgccatcctgtgcggagaaaagtgcgcggatacgctgcagccgggccagcatggctctaccttcggcggaaacctgctcgcctgccgggcggcgcagaccgtgctctccgtggtcgatcagccgcagtttctggcttccgtcaaagagaaaggtgaatacatccgcgaacagctgctcgccatgcattctcctgccatccgtgaagtcagaggcatggggctgatgctgggcatcggcgtcgatccgcagaagcgttcggactatgtccgcgcactgcaggaaaaaggcgtgctcgtgctgacggccggtgaggatacgatccgtctgcttcctccgctggtcatcacgaaagaagatatcgatcaggcgcttgcctgcatgaaagaggtgctgaaatgaaacatttactgaagatgatggatctgtccaaggctgagatcatcgcgatcctcgatctggcagatcagctgaaatatgaaaagaaacatgggatcccccaccgccgtctggagggcaaggccatcggcctgatcttccagaagtcaagcacgcgcacccgggtatcgtttgagaccggcgcattccagctgggcatgcagccgctgttcctctccagccgcgacttacagatcggcagaggcgagccggtgcaggatacggccagagtgctgtcccgctatctggactgcatcatgatccgcaccttcgatcagaaagaggtggaggatctggccaaatatggttctgttccgatcatcaacggcctgaccgatttcagccatccttgccaagtacttgcggacctgatgaccattcgggaaaaatacagcgtattggaagggctgaagatgtgctatatcggcgatggcgacaacatggccaactcgctgatcgtcggcgggctgaaggtcggcatgcaggtcagcgtcgctacgccgaaaggctatgagccggatgaaagcgtgctggcattcgccaagacacatgatacgttcttcctgacgaacgatccgcaggaagcgatacgggatgccgatgtcgtgatcaccgacacatgggcgagcatgggcatggagagcgagaaggagatccgccagaaagcctttgcgggctatcaggtgaatgacgagctcatgaagctggccaagccgaacgcgatggtgcagcactgtctgccggcatatcgcggacaggagatcaccgaggagctctttgaggctcatgccgatgagatcttcgaagaagcggaaaaccgcctgcacgcgcagaaggccgtcatggtcaagctgctggagcagtgagctgttgacgaataagaaaaaactgcaggacagatgctgttatggcatatctgttctgcagcttttgtttctgcgggcctaattgctggtgttgctggggaagaaaggacgcagggcatcagccagattgtggatgttcctggtctggatatataccttgccgtttccattgaactcgttgaccagcccttctcccgaggtgaagccgaacgtgcctgaagcgacccggatcgaatagtccagcgacgcatcccaggccacgacgtgttcgttgtcgaccgtgacagggctgccaggggagacttccagctccaggatatcgccgaacgcggcgatgagcacgtctccttcgccctgtgtctccatgacgaacagaccgcctgttccgccgaagaacgctttgccgatatcctggcgcctcatcacatactgaacggaatggtcacaggccaggaaggcgccggtgttcagccggtactgacgggcatcgtccacattgaggcagacgatcttgccgggcactgcgggcgcgatgcccagacagccctgatcgctcgttccgctcgcctcggtgatgaacatggactcaccgctggtcagcgatctgccgatcgcgctgaacatcccgccgatcccctttttgccggaattcatctttccttcgagcctgacgtcgctcatgtatgccatgcatccgcgttcgatgcgcaccgtctcgtcctcacgaaggcggatctggatcaatggacagtcgttgtcgcctgcaatcgtgtaattcatcatttccctcctcgaattcttcttcgcagaaagcattctgcggtaaatgcgctcactccagcttgctcaggctgaagagcgcttcgatgccccgcatcaggatatgttcgtcgaaatcgaaatgatcgctgtgcagggggatgccggtcccggtgcccaaaaacatgaacataccggggacgtgctgcagataccaggagaagtcctcggtgatcagctgcggctcatcgagcagtatcatgtccgggatcgcctgaagcgcctgatcgacgatctgcggcgtgttgacgagcgctgggtagccttcgctgaacgagaaggcgaactgtgccggcgcatagcgtctggcgatcgcattcagctgatcgcgcatgtgatcgtagatctcatcccggcaggcacgcatcgtgccttccaggcgggcatgatcgctcaccacattgcggatggaaccggaacgcagcacgccgaagcgcagcagccggtattctgccggatcgatctgccgctccatcgcatacaggtcgcaaagatagcggcaggcagtctccagcgcgtcgcagccttcctgatagctggcggcatgtgcgcttttgcccgtgatgtcgatgttcacttcgctggagcgcgccatcatctcttcgtgccgggtgccgatcacgccggcgggcagctggggccacaggtgcatgccatagatgcgtttgacatggtagcgttccaggatgccggcttcgcagagcagccgggcgccgccggggttttcctccccgggctgaaagatgagcagcacattgtgcggcagtctctgatcggcagaagccaggcggaaggccagccccagcagcatcgccatatggccgtcatgtccgcaggcatgcatgtttccctcatgccggctgcggtaaggcgcatcgctgcgctcggtgatcggcagggcatccatgtcgctgcgaaaggcgatggtctcctcacggccgttgtcgaagaatgccgtgatcccgctttcgagcgggaaatcgagctgacaggggagatcctgcagctgtgagatgaggtatgccttggtcatcggcagggaaagctccagctcagggatctggtgcagctctctgcggatccgctgtatgcgttcaaacatgaaatcactcctctgatgttattctagcggaaaatagcgtcatagacaatgaaaataattacacaggtgaaaaatattgcaaaactagttgaaaatgaatgaaaagggtgtataatacagtcaataaatgatagaggcgcggatgcgaagaagaaacggagagccggcaggtgtctgatccgtttcggcggcaagtccgccgaactgttccatcaggcatgatgggatggtgggccggtgcagaacatgcatcggactgtctacgtgatgtaggagtgctatcttatttcagcgggaacgaaggccggtaagatcagtattcttaccggtcttttttcaggaggaagcgcgatggaaaacatgctgaagatacaaggcgtgccgctcagcgagctggcagagacatatggcaccccgttatatatctatgatcagaaccgtatcgaggaacagatggagacataccgaagctgcttgaacagcgatgtgctgcagaccgagatcctgtatgcgtccaaggcattctgcatacaggagatggtgaagctggtgcaggcgcacgggctgagcctggatgtcgtctccggcggagagctgtatacggcgttggcggccggctttgatccggcggacattcatttccacggcaacaataagtcgccgcaggagatcgaagaagcgctgcaggcaaaggtcggcaccttcatcgtagacaatgtcatggagggggaatatctctgcgcgcagatggcgcgtttcgatcacgatgtccatgtgatgatccgggtcaatccaggcgtggaggcgcatacgcatgaatatgtggtcaccgcgcatgtggacagcaagttcggcatatccatccacgagcaagagacgctggcggcgctgatccggcggttcatggagacggagcatgtgatctttgacggcttccatgcgcatatcggctcccagatcttcgacgcgcaggcctttgcggccgagatcgacgtgatggggcagttcatggctgacatgcaggaacgcttcggcatcgtctgccgctgtctggatgtcggcggaggctttgcggtgcgctatacggaagcggacagcccgatcccgatcccggaggtctgtcagacgatcctgcgggaatgtgagcggcagaagcagatgcgcgggctcgcactggaaaaggtcatgatcgaaccgggacgaagcatcgtggcagaagcgggcatgacgctgtatacggtcggtttcggcaaacagacgccgaaccgcacatatgtattcgtagacggcggcatgagcgacaatatccgcccggcgctgtatcaggcggcatacagctgcgatgtggcaaaccggatggatgaggaaaagcgcatcccggtctgtgtggcgggcaaatgctgcgaatccggcgatgtgctcatcgaggaagccatgcttccgccctgtgtgcccggcgatctgctggtcgtatacagcaccggcgcatatggcttcagcatggccagccactataaccgactgtgccgcccggccgtcgtcttcgtgaaggacggcaaggcgcgctgcgtggtcagacgcgagacatacgccgatctgctgaagggagagtgcggagaatgaacattcaggtaagcaagtatcatggctgcggcaacgatttcatcatcgcccgggcatccgtgctctctggcatcgatctggcggatctggcccgtcatgcctgtgaccggcataccggcatcggcgcggacgggttcatcgcggtcgcagaagatcccttggagatgatctattacaatcaggacggcagccgggccccgatgtgcggcaacggcatccgctgctttgcggccttctgtcatgatgaagggatcatgatccaggacgcctatgatgtgcagacattagccggcatgcagaaggtaaaggtgctgcaggaagaaccgtttcaagtacggatcgatatggggatgcccagcgatgcgcttgagcagatcgggatcgaaagcccgatatggggaatgcccctgcgccttttcgacgggcgtacgatcacgctgtacagcctgttcatgggcacgatccacacggtggtgttcgtcgatgaatttgcggcggatctcgcagagatcggccggcaggtctgcatgcatccgctgtatgcacatcagaccaatgtcaatttcgtacaggtcgtggatgagcatacgatgcgcgtgcgcacatatgagcgaggctgcggcatgacgctggcctgcggcacaggcgcgtgcgcttcgctggtctgcgccgtgcgtgaaggaaagatgagcgagaaggctcatgtgctcttggaaaaaggtgagcttgtggtcgagctgaatgcccaggggcatgtgatgatgagcggaccggcagtccgcgtgatgaaaggagaatacagatatgagaccgattaagggaagcatcgttgcgctggtcaccccgtttcatgaagacggcagcgtcaatttcgagaagctgaaggagctgctggactggcatatcgccaattccacagatgggatcctcgtgctgggaacgactggtgagagcagcacgatgacgcatgaagaggatgatgaagtggcgcgggtgagcatctcgcatgtgaatcaccgtgtgcccatcatcgtcggcgccggcagcaactgcacccagacggccgtggaaaaggccgtccgctatgcggacatgggcgcggatgcgctgctcatgatctccccgtattacaataaggcaaaccgccgcggcatggtcgagcatttccgtcaggtggccgatgtgacgagctgtccgatcatcctgtataatgtgccgggacgcaccggctgcagcatcagcgaggatgtcgtggctgagctgagcaagcatcccaacatctgcggcatcaaggaggccagcggcagcatcacttatgcggcccgcatcgcccgttatgtaaatgatgactttaccatgtacagcggcaatgatgacatgatcaccagcatgctctcgctgggcgcaagcggcgtcatcagcgtgctggccaacgtcgtgccgaagcagacacatgacatcgtcgcttcctggcatgccaaagatgtgatagcaagccgggaaggccagctgcattatctggatctggtgcaggcgctgttcagcgaggtcaatccgatcccggtcaaggctgccatgaacatgatgggcatgcaggtcggcggataccgttatccgctgtgtgagatgatgccggatacatatgcgcagctgcgcaaggtcatggaggactatggcttatgcgcgtgatcgtcatcggcagaggaaagatgggcacattgctcagcgaaagcgccgcggcacatggccatgaggtgatcgccatggccgatgcggccaatcaggatgaggtgaagccgctggactgcgatgccgtcatcgatttttcccatccggacaatctggaatgggtatgcgcgtatgtcagggcgcggcactgtgtgctcatctgcggcaccacagggctgaatgacgcgcagaagcagctgctgcagcagaccgcgcaggcatgcccggtattctattctgccaacttctcttatggcatcgccatgctggagaagatgctggagatgctcaccccgctgttgaaggaagacttcgatatggaagtggtagaggcgcaccatggccagaagcaggatgcgccaagcgggacggccgccatgctcgtggaggcgatggacccgcatcatgaatttaaacgggtctacggccgcgagggcttcgtcggcaagcgcggcaaggagatcggcatccatgccatccgcggcgggacggtggccggagagcataccgtgctgtatctgggagaggatgagtcgctgaagatcacgcatacggcaagcagccgcatgatctttgtgaacggcgcatggaaggcgctggatttcatggccaaacggccgaacggttattacacgatgaaggatctgacaggagaagagcaatgaatgcacaagatatcatcaatttcatacacaacgcggagaagaagacgccggtaaaggtctactatcgggcaaagacgcccgtggattttccaaactgtcatcagtttggcgatgtcgtgttcggtgactggaaagacatcgaaccagtgctgaaggaaaatcaggataatttcctggatgtgatcatagagaacgactgccgcaacagcgcggtgccgttgttggacatgaagaacatccgtgcgcgcatcgaaccaggcgcgatcatccgcgatcaggtagagatcggggacaatgccgtcatcatgatgggcgccatcatcaacatcggcgcgatcatcggcgagggcaccatgatcgatatgggcgctgtcctgggcggacgggcgacggtcggca

SEQ ID NO: 4387 - DNA, 7094 bp, Unknown
  16S sequences of unknown bacteria
gggacatgtaagaaactattcgataggcgatgtcgtagcgagattcaagcatatgaacgggtttaatgtgctgcatccgatgggctacgacagctttgggctgcctgcagaaaacgcggccatcaaaaatggtgtagagcctgcgaagtggacattttccaatattgcggaaatgacggatcagctcaagcgcctcggcctttcatacgactgggacagagaggttgaaacatgcacgcctgagtattatagatggatgcagtggattttcattcagttttacaagaaagggcttgcctttaagaaagaaaatccggtaaactggtgcccaagctgcaaaacagtgctggcaaacgagcaggtagttggcggctgctgcgaacgctgcggaagcgttgtcggcaagaagaatttgtctcagtggtacctcaagataactgattatgcggaaagactgctcgataatcttgaaaagctcgaaggctggccgcagaaagttaagacgatgcagaaaaactggatcggaaaatctgtcggtgctgaagtaaactttgaaatcaagggctttgacaagcctctccaaatatttacgacaagaccggatacgctctacggtgttacttatatggtaatgtcgccggagcatccgtttatagacgagctcgtttccggtactgagtatgagcctgccgtaagagaatatcaggacaaggttcagaagatgaccgatatagaaagaacgtctacagcaaatgaaaaaacaggcgtatttatcggcagatatgcggtaaatccgctcaacggaaaagaagtacctatctatatttcagattatgtacttatggattacggtacgggcgctattatggccgtacctgcacacgatgaacgcgactttgatttcgcgaaaaaatttgacctcgaaatcatcccggtagtacagccggatgatcctgagatagatataaacaatctcaaaagcgcttttgttgccgaaggaaagatgataaattccgcaatgtttacaggaatggacaataagcaggcaatcgagaagattatcgattatcttgaggaaaaaggcatcggcaagaaggcaataaactacaagctgagagactggcttatttcaagacagagatactggggaacgcctatacctatgatttactgcgagcactgcggctgggtgcctgaaaaggaagaaaacctgcctgttttgcttccgacagatgtggaatttacaggcaagggtgaatcgcccattgctacaagcaagacatttgtcgatacggtatgcccgatatgcggcaagcctgcaaaacgcgaagtagatacgatggatacattcctcgactcttcatggtatttcctgcgctactgcgatgcgagaaacgataaggcggcgttcgacccggaaaaggcaaggtactggatgaatgtggaccagtatataggtggagtggaacacgctatactccacctgatgtacgcacgtttcttccagatggtattttacgacctcggccttactgataaggaagagccgtttgaaaacctgctcactcagggtatggtaataaaagacggcaagaagatgagcaagtccatcggcaatgtggtatcacctgaggaaataataggaagatacggagcagatacggcaaggctcttcatactctttgcggcgccgcctgacagagaactcgactggtcggatgcgggtgttgagggctcgtacagatttttgaacagagtgtatagactcatatttgagcttgcggagaagtgtaaagacgctccgaagaattacgaaataagcggtaaggacgacaagtcgctcgcatatgaaatgaatgcttcggtaaagaaggttacggaagacgcgggcggacgctttatgttcaatacggctatttcctcgataatggagcttgtaaacgaaatgtacagatataaggagataagcaatgtaaatacgggacttcttgcggatgcggcagaaaagcttgtgctcatactctctccgtttgcaccgcatatctgtgaagaaatgtggcagcatctcggacatgaaaagtctatatacgacgaagcttggccgtcatatgacgaatctaagatagtaaaagacgaagttgaaatagttgtacagattaatggcaagattaaggaaaaacttaacgtacaggcaaaccttgacaaagcgacttttgagaaaactgtaatggaggacgacagagtaaaagctctgcttgacggtgtaagcgtgataaaagtcatagcggtgcctgataaacttctcaatgtcgtcgtaaaatagaaaggacgaaatgagtacggaaaacaaagaacagaatattaaagaaaagaaaacgccgcttagaacggcggcaaaacgcggcgctttaaaaactgaagccgccgccaaaaaagaaaataagcagaagacgcagaagtcttccggcacgggaataacaaaaacagcggcggcaaagacgccgaagacgaaaacagtaaaggcggaggcaaagactgcttctgcgtctgctaaagcagtaaagacaaagagtgctggcaaaggctctaaagttaagaaagatgcggtaaaaacagaagtactgccgcttaaagttataccgattggcggactcaatgaaattggcaagaatatgacgcttctcgagtatgacgatcagatattgattatagactgcggtatgtcgttccctgatgatgatatgtttggtattgacagcgtaattcccgattttacttacctggtggaaaacagcagcaaggtaaaggggcttatacttacgcatggacacgaggatcatattggcggtataccatatctgctcaaacagataaatgtgccgatatacggcacgagactcacacttggtctcatagaaaataagcttaaggagcacgggctctcggcaaagcttcatacgataaaagcaggagataggataagaataggcgcatttgatatagaaactataaggactacgcattcgatcgcggacgctatctgcctttcgatagatacgcctgcgggacgcgtgtttcatactggggattttaaggttgactatacgcctgtggacggtgaaaagatagactttagaagactcgcagagatagggcttgaaggggtagatctcctgcttgccgattctacaaacgcgataagacagggctacacggcgtcggaaagagtggtaggacaaaaccttgagactattttcagacgcacaaattcgagaataataatagcgacattctcctcaaatgtgcatagagtacagaagataatagacaatgcggtgctctgtaaacgtaaagtcgccatttcgggaagaagtatggtgaatgtagtaaatctggccatagagctcggatacatcagtattcctgaaaatgtgctcgtcgatataaataagctcaaaggtataccagataaggaacttgtgataataacgacgggcagtcagggcgagccgatgagcgcgctttcgagaatggcgacaaacgaccataaatcggtgcgcataagaaagggcgatacggtaatattgtcgtcaacgcctgttccgggcaacgaaaagatggtagcgaatgtagtaaacaagctgtatgaaaaaggagcaaaggtaatttactccgatattgcggatattcatgtatcggggcacgcctgtcaggaagagctcaagctcatacattcgctcataaaaccgaaatattttatgccggtgcacggagaatacaggcaccttaaacatcatgcacttctcgcgcaggagctcggacttccgagcaaccacatttttatactcgagaatggcgatgcgctgacatataacaagaaaagattcagcattacaaagggctttgctccggcggaagccgtatttgtggacggactcggtgtgggagatgtcggaagcatagttctgcgtgacagaaaaatgctttcggaagccggccttatagtagtagttgcggctctcgacagcacgacaaacagagttgtatcaggccctgatattattacacgcggttttgtgtatgtaaaagaaaatgaggatctcatagaaaaggctcgtgttatagcggaaaaggcgcttgatcgctgcataaattccgaaaaaaacgaccgcagctttatgaaaaacgcggtcagagattctctgcgcggctttataaatcacgcaacgggcagaagccctgtaattttatctatatttttagatgtataggaggaagaaatgaatgtatataacgaggctcacaatttagctcaggctattaaagaatgtgaggagttcaagacatacgatgcgcttaaaaagaagatcgatgagagtccggagctggcaaaggctgtgtctgattttcaaatgatgcagatgcagacgcaaatttcgcagatatcgggtgaagaaatatcacaggatgtaatgagtaagttgcaggagctatatggaatcctgctgcgcgatcccgtagcggcggaatatatgcaggcagaaatgcgtttttcgctgatgatgaatgatgtatacaagattctcggtgatgctatcggacagactatgccgggaatgtctgataccgagtaaatagatgctgtaaaaatgagaatcaaatcgcgcataatagacttggcaattatgcgataatttggtataatattgggtgttaattatgttaattattatttacagcataaaataaaggagagatatttatgatttacgcaagtgattttagaaagggtattacttttgaaatcaacggtgaaccgcatgtagtgctcgattttcagcatgtaaagccgggaaagggcgcggcatttgtaagaacaaagtatagaaacatacttagcggagctacgagagaggaagcatttaaccctaatgataaatttcctaaggctcatattgaaacaaagacgatgcagtatctttataacgacggagagctttactactttatggatcaggagacatacgagcaggtgcctcttatgcaggagcaggtggaggaggctatcaaatacctgcgggaaaacgatgaagctacaatcaagttttacaagggtcaggctttcctcgtagaagcgcctaattttgtaaatcttaaagttattgagacagagccgggagtaaagggcgatacggctacgaatgtaacaaaggccgcaaccgttgagacgggtgctgttattcaggtgcctattttcatagaagaaggcgagcttattcagatagatacgagaacaggcgaatatctgggaagggcgaaatagtttaaatatgaagtataggaaggacgcgccctgcgtcctttctctttggttagcagccggcgcataatatgcagctttacagcattttgcaaatttatgaaatttatatttatagtaaaagagacggtaaaatgggaaaaaagagaagaaacagtgcagttaaaaagaaaaatataattcttatagttatattggcagtagtagttgtaataggagcggtgatcataggcggcagtgcgtatgtgagcagtctcaataagccgtatgatctggaaaatgagaatcttatcgtcatttccgtaccttcaggctcaagcacgtctgagatcggctctatactgcaggaaaacggcatcataaaaagtgcggacggatttaagctctacggcaggataaagaagtatgacggcaagcttaaagcgggcgaatattcgctttcaccagcgatgaaccttgaagagatattcggcatacttgtcgaaggacactccaataccgaccgctttaccgtgcctgaaggactgacgatagcacagacagcagatatacttgaagataagcagatgataaacagggataaatttatggacctcatcgcaaacggaaatttcgactacgaatttatggatgagcttcctgcgggtgaaaacaggctcgaaggctttttatttcctgaaacatatgagatatttacctcggcaacagaggaggatatcataaacaagatgctttcacagttcgacctcgtgtttacggatgagtattacaaacgggcggaggagcttggctacagcgtttacgaaatagtgacgatagcttcgctcatagagcgcgaggcgcgtgtagattctgagagggcaactgttgcaagcgtaatatataacaggcttgcgataggccagcagctacagatagacgcaactgttcagtatgcgctgggagagcagaaggaaaggctgacatacaaagatcttgaagtggattcgccttacaacacatataaagttcaagggctgcctataggacctatatgctcgccgggacgtgcttccatagaggcggcgctttatcctgcggacacggattattattattatgtgctgaaatctaaagatgagattacgcataactttgcggagacatacagcgagtttttaacgtataagtcgcagtatcagaattctttttaggaattgcatatctgccaactgcttttaggatagtcagcattaaaaattaaaaaagagaggcggctaaagcttgccgcccctcttgtgagaaggagcattatgagcaatatcgtaaacgataaggtgcttgaatatatcaatgggtattacaagccgaaaagcacagagcttgcggagttcagagctgatgcagaaatgcggaaaatacctataatattgaaggatacggagagttttctcggtatgatagccgatcttagccgtccgaagcgaatacttgaaattggcacggctatcggatacagcgcggcatttttggcatctgcgttgccgtcgtgcagagttgtaacgatagagcgcgaggaggacgcgcatgcggaagccgtacttaatatggaaagactcgggcttgcggatcgtgtgacctgccttaagggcgatgccatagagattatggcgcagcttgcagatgaacaagacagacggtattttgacatctatggtgattgcgaaaagagcagtgcggaaagcggtgctgagccaacagaaggcgagccatttgatttcgtatttatagatgc

SEQ ID NO: 4388 - DNA, 1932 bp, Unknown
  16S sequences of unknown bacteria
tacgaaggcttttgcagttacgaaacgtatttattcctatataggtacatttcttgggtatatttactttccgcaattttacacatccgctaaacattccataatttaattttgttataccattatatagcttcacagttttcaaagagcggcaatccgaaaacatctcattgttgatatattccggtaacattgcatgccatgtccttttattgatgcggaaaccagcaccttttacttccgcatattttaaatcagtacattttttaaacattgttaatgtataatctgcatcttttggcaataccaccttttttaacgatttcatgttacgaaaaatagctcgataatatttacagtttttgccattataaacgaactccggcaaattcttcattttagtcagaccatcaaaggcacatctgccaacaaatcgcacgttttctccgccagtcactttctgtaaacgcttattatatgcaaatgcccatggaccaatgtattgaacatccttccctaagtgtattttttttaagtatggatttgcttttgctgcttgatgatcaatgacctcaattccatcagaaattaccagtgtttctgcttttcctgcatctacaaatgctaattctttaaccggaagtccatgaaactgcgacggcacaatgatctttttggtatgttgcggtttcactatcatcaattttatcgctgttttgttacgaattaacgcatattcataaattccatctgtcttccactctgtttcctgctttgcaggtgttgcatagtctgtcacatatggttcaaatccaagatctgcatcacttgcctgcaccttttcctgattcacacttaagccccatgcaataacagctaatatcaaggcaatatttatgattccttttttcaatctcatattcccttcctccttttacattatttttttatcttactataccaagacttttgactgttcacttattattacagcaaatctaatttccaccgtcaatacattccgcgtaatcttaagaattcttaagaattaacctcaatatcacagaaacggataccattgcacggcatccgtttcttgattatttcaatacaatttctttgtcccatataacggactcactctttgcctcagcattctctttctatcgttatgatttataacggtatttcatttcgtacttttttgcaaacttctctgcagcacttcctttatctacggtcaatgtaagatttttgctaccataaaaagcccattgatcaatgtttttaacggtttttggcacatacagactacgaagattcttgcatttaccaaaagccagcggtccaatcgtacgacatccttttggtatattgacctttttaagattactgcagcgcaaaaatgctgatttgccaattactttacacttctttgaaacggtcaccttttgaagactcttacaatttaagaatgcgccctctccaatgtatctgcattgtgttggtatattcaccttcttcaaacgaatacaattagcaaatatttgttcatttaaatgtgtaatattgttagtcaatgtcaccttctgcagtttacggcaattcttaaacattgcacgattcactgctgtgttcgtcatggttttccacttttgcttattcggcttatatccaacaccttccacacgtgctgtcttaagctggtcacaatttttaaatgttgcaacagtatatttcatagttcgcggaacaacaacatttcgcaaaccttttgctttcataaatatagcctgaccatatacacagtttttgttcgtttttacaaatgctggaagttttgttattccataacattcagcaaaagcacctcttcccagaaatttaatgttttgtccgccagtgatcttagttagttttctgccacgcgga

SEQ ID NO: 4389 - DNA, 25752 bp, Unknown
  16S sequences of unknown bacteria
ttcgggctttcacgaagggcttccagatactcggagaaatgtttacgaatctcgtccgggttgccgaagcaggctggattgattgccataaaaccatgacagatacccgtcttatccgagaaagtacagcactgatcagaagtaacacccatggaaaggatggaactgaacagttcgcagatcataccatatccatagcctttatgacttccggttacttctttatttccaccaagcggcatgattccaccgccttttttcgatacgatattggataacacatccggagcgttggtgctggcatgtccgtctttatcgagtgcccatccttccggaagcggtttgttcatcttattgtacatctccagttttcctctggtcacaaccgttgtggagcagtcaaagaaaaatggatacggatcagcaggcatagcaactgcgatcgggttggaaccaagcattgcttttcttccaaaagtcggaaccatgatagcctcagagttagtacatgccattcccataagtccctcatcacatgccatctttgcataatatccggcaatgccgaaatgattggagttgcgaacgctcacgattccaacacctgtggtctttgctttctcaatcgccttcttcatggcatagatactgatcagctgtcccattccattatgaccatcgatcactgcggaaatcggtgtttcgaatactacctctggttttgcctccggatggatcgtgcctttctgaatacctttgtgataacgtaccattcgctgcattccatgactctcaataccatagagatctgctttcagaagaacatctttgatctcttcactctcctgctcagaaaaaccaaatgactgaaatacatctttgcagaatgcgtttaatgtgtcatatgaccaagttacataacccatacaaaataccctcctgtcggtttgaccaaataaagatattggtattaccaatttatgtgcaattatatcattggtaataccaattggcaagaggtatttttatttctttgcagtatatttacatctataattgaatcatctgctccatttcgttcatataagcttcaattgtttccatatgttctgacatgcgctgttctgccagttttgcatcttttcttacaatcgcatccaccagctgccgatgctgttcatcaatatctgaagatgactgtttcttttccataatatatccgcggatacctgagatgattgtttcagtcagttgatctgctgcgctcaacacactgtagagcatgggattattagccatctttgcaatcttctgatgaagttgctgatccagcatacctcgttctttttccgtgtcagcaatctcaagctttgcaaggatcatacgaagttcagcctcatccaatgctgtacagttctgcgctgccagtaatgcagtctctctttccagtgctgcacgtaattgctgattctgccgaagatatccgttgttcagcttgaacatgatcgacaacgggccaatgagccagctggtcagatcctcggtaatataattaccccctccctgtacacagtgaacaataccgagaagttccagtgctcgaagcacttcccggactgcaggtcttgagacacccatgctctcagccatcgtccgttccgccggaagcgcatcccctcctttaatatttccatcctgaatattatctataatttgatttaagatagcgtcaaacgccttttcttctccaatttttctgaacatactgattctccatctgatacgattatttcacataactccatacgagcagccaagtaacctcacgctactgtctttgctgcccagtatagcattttgctgttgtcgtgtcaaaattgaaccttataatagctcgtcagaataatatggaagaataatcttccgtccttcgatcaggcatgtatcatgcatgccattgatggtcataacttcattaatataatccatgcgatcctcataatgtgcagcatccatataatctcctgccagatcccacagagtatctccgtcctggatctccacattcgcataatatttatacatagcaggcgcagccggttcctttgctctggtgatcatggaaccgaatcccataccgatcacaaatattactacaagtgtcagcacaatcagcaggatcatctttctcttttcccgctgctttctcagtgctcttgctctgcgctctcttctcatatcttctctctgaactgtctgtgctgcatacatttcattcactctccttttgccaagaaccaaacatctgttctatatgcttattatagtatcagaacacatgtttgtcaatagacaaatcgaatatttgttcggaaaatatgttctgtttcatgcaattggaattttacaaatgaagcgagtgacctgtcatttccatgtttactttatgtacacagacatgctataattagttttcattctaaggaaaaagataataagagaacaatagtgagggagtttttcagatggcaattcgtaaaaacggaatcgttgtattaggagcagtatttgttgatatcaaagggtttccggaggatatttatattccggacggacggaatgcaggaacggtagaatatgttcatggcggagtaagccggaacgtggtggaggacattgccaatcttgagctgcgccccacatttcttggtattgtagatgactctgcactgggtgaggatgtcatccacaagctgaagaatcataaggtaaacaccgaatatatgcagacaatccccaatggaatgggaacctggcttgccgtatttgatcacaacggcgatgtagctggctctatttctcagagaccaaaccttctgccgatcatggataccttggaggaaaaaggggacgagatcttcgcagaggctgattctgtggtaatcgaagttgatatggataaggatattgtaaaaaaagtggtgcagctctgcgagaaatatgaccgaaagctgtatggtgtggtcagcaacatgagtattgctatggaacgccgtgatcttcttcagaaattcgactgctttatctgcaaccagcaagaagctggcatgttcttctccgatgattacagcgaaaaaagccaggaagaacttcaggagatcctggcagactgtctgaaaaacggcaacattccttctatggttgttactatgggtggaaaaggctctgtctatgcggactgcgaaggactgcgggggttctgcccgcctaagaatgtatctgtaaaagataccactggtgcaggtgattccttctgtgcaggtgttgccagcggactgacatacggaaaaactcttccagaagccgttgatataggtacccgcctggcagcttctgtgatcacttcttctgaaaatgtatgtcctcgctttctgcctgcggaatttggacttgaagtgtaaaagctgctatctcctgtgatagacaccatactccaaggatggtacggacaatcaaaaactccgacaagatattgagtaccttaatcactcaattctcgtcggagttctattttttatctacagatctgcatatttaccaatcttccattatacagctttctttgcagttggttttttccatgcacaccagcagataaacccaaggaataccactgctgcgatcatccagcagacgaatgtcagagtgttttttccgctgaacatatcgtaataacctttcagatagatgaacgcgatcaaaagtggcaggaaccaggtcacataagcgcgcagtgcggccgggaatttgattccctcaccggcatttgtctcatccataaatccatcccatccccagccgttctttctggtacagaacagaacatagccaagacttcccagcggaagcaggttattggatacgatgaagtcttccagatccatgattgtactgccctctcccaggggctgaataccagaccacagattgtagccaagaacagcaggcatggacagcaggatcaccaggactgcactgactgccacacttttcttacgggaccatccgaacagatccatatcaaatgcaataatattttcaaatacagcaatgatcgtactcagtgctgcaaaggtcaggaacaggaagaacagtgcgctccataaaaatccaccggtcatctgtgcaaaaatattgggcagagtgataaatacaaggctcggtcctgctccaggctcgattccataggaaaaacatgccggaataacaataaaaccggcggtcagtgctacaaaagtatcaaggatcgtaatattgattgcttcacctgtcatgcttctggaatgatccagataacttccgaatatcatcatagcgccgataccaagggacagggtgaagaatgcctggctcatggctccgaataccacatttccaataccggtctctaccatcttctggaaatccggaaccagatagaaacgaatgccatccactgctccctcaaggaacaccgaatggatcgccaatacaaccatgatcgcaagcaatgctatcatcataacttttgttactttctcaataccggactgcaacccaaatttacatacgataaatccgatgacacagatcaggacggtccagaagatcatggtcggataatcagccagcatggatccaaatgcattggtaacgtattccggatcagcctgggaaaaatcaccccttagacttctgaaacagtaatatatcatccagccgccaaccatggtgtagaacatcatcagaagataacagccgaaaataccgatatatttcatcagatgccaggaagtaccctctggctccagctgttcaaatgccatagctacgctcttcttgcttccgcgtccaatggaaaattcgcagaccatagccggaatacccatgatcaataagaacaataagtaaattaaaataaatgcggctcctccgtattcaccgcacatgtacggaaatttccatacgttgccaattccgatggcacatcctgcggaaaccaggatgaatcccagtctggaactgaatttttctcgtttcatactctatactccctccgtatatataacatttaatcattataaaatgttcctgtcacccttgcaaccacacgatttttatattagaataagaaaaacttatattatcaggagatatctatgaacatcaatcaattgaaatattttatctccgtggcagaataccggagctttaccaaagctgccaatcagttttacatctcccagacagcgattacccagcagatccaggcattggaagaaagtatgggcgtgaccctcattgaccgttcccgccgccccattatgctgaccccagcaggaaatgtgtttttaaatgaagcccgggccattctggaacggatggatatggcagtcagccgggtacgtgatgcttccaccggactggtgggaactctgcgaatcggttataccaaaggttatgaacgaagcaatctgtctaatctgctccgcagctttcatcaggaatatccgaacattctgatcacctgcagccgctgcgataccgatatgctggcggctggtctgttaaacggcgattatgatatgatctttacctgggacagcaccaatattctgctggaggatcaagtctgtcaccggctggtagaacgagttccgctgatcgttgcactctatgccggtcatcccctttccggccgtcatacattgaaccgtatggaattaaaaggtgaacagattctctacatgtctccctccggtgtgggtgattccttcggggatagccattttatggagctgtatcgaaaagcgggatatcaaccggatattctgttccgttcctctgatgccgaaagtattcttatgatggtagccgccgaggaaggcatttccattctgcctgcttacgtaacaaataagctgaaagatgccgataatcttgtcttcgttccactggtcggagaagaagaatacgaagagatcattgcagtctggaaatcagacaatgccggacaagctctccagaaatttgtcctgcggatcacaggtgctgaataaattgaatccgactgttgcattttgaagaagaagtgttataatattctttgttcaggaagtatagctcagctgggatgagcgttcgcctcacacgcgagaggtcatgggttcgagccccattacttccatgtaaaaaaccccgaaatctcggggttttttattttcatgttgcatttcgtgttgcatagttctgtaaattactgaataaactataaaacagcatatgcttaacataatattcttacattaagcatatgctgccatttcattatctaaaattccctcttttcaataatccgaacagagattcgataagatatcccaagtattaatgcatagatgagtattccaacaagcaccagcagtaatcctttcgcttgcagcagtgtctgtatctgcaccagcagtaatgaccctttcagtttctttacaccgacaatcccactcagaaagaaaccaagcatcataccgctgaagagactccttcctttctcacttccaaatttaagattcagcggaagtgccagtgcaaggaagagaatcacaacaggaatcatgaaacatgtactgctcaggatctcccacataacgacttctgtcatcgctcgatgcctgatgacatgatatagcagttccagtataaggatcagcagactgcctgctcctgccagtgccatggcaaacagatatttctctgttacatatgtttttctcttgatcggcaaagtcatcagataggtcataccatgctggtattcgtcatagctgattgtactgatggtaaaaagtccgaataaaaacggaaagaatccaagaatagactgtcccatgctgttgtccattacatccaacaacccataaaaaacaagcacagcgccaaacattttcccctgatttttcaataatttccagtctttgataaaaagagctttcatgctatctccctcctgccataatcatcataacctgatcaacactgcccttttcaacagcaatctgtggccagttctccatatagtactgcttctgattggtcagacacgcatagccatacgactcttccttttccttcaggatccattctttgtcaagtgtttcgtactgctccggcgtcactttcaggattccatactgctccagcagcacatcggtctgctcatgaaaatgaatctgcccatgatcgatcagataaatatcatcacacaatccttccagatctgaagaaatatgtgaactgatcaggattgaccggtcacctgggatcataaactcccgcagcagatccagaatctcctctcttaccatcacatccaatccggcggtaggctcatccagaatcaacagtctggcatctctgttacagattgctgtaagtacctttaatttggctttcatacctgtagagaattccctgacttttttatccatgggaagtgaaaaacgttcgcagtaattgcagaaccgttccttatcaaaaaccggatacagagcttccagaatcgggagcagatctttgatcgtcaggtattcagaaaatcccgcatctgacagtaccacaccaatttgctgccgttcctctatcgttagttcactgactggatgctcaaaaacggttacctcaccgctctctggacggatcagtccaagaattaacttaaaagtcgtacttttacctgctccattagcaccgatcaatgcggtaatctgtccttctcttatctccatggaacaatccagctggaagcccgaatatgttttctttgcatgctctaatctgatcatgataaatcctccaatatgagttcaaatgtatcagtcagctcctgattgctaaggccaaggcttcgtccttttcggacagcctgctcaagcagattttctacttcctgtttttgctgctctaaaaataattcctgacaggcagatgatacaaagctccccttgccatgtacggttctgacaaatcctgcctgctccagatcgtcataggcttttttgaccgtcaacgcgctgatccttaactctttggccagagcacgcaccgaaggaagcggctcgccttctttcatctgcccggtactgatcaatgcccggaactgtctggataactgctcatagatcggttccattgaggaatgattgataatcaagttcatatgagttcctccttgtaataaacagtatataacagtatagaactgttgtcaactgttatatgctgtttatctgtaaaattatataaaaataccgccgaattatctatcagaataattcgacggtcatataaatctattttcattatctattctgtaaaatcatcagaatcagtctaccactccggtctcacatcctcattaatcggatgactgtttactgccggattgctgtaacgctgctcagtgatttcacgatagaaagcagcacgcgtagcttccgtatacggagtgatccagaagaatccgattcccagtgtcaggattcctacaagataccagccaaagaaacttacatccaggcagaacagacgccacttatttcccatcatgatccgcttggattcagtgattgcctccatcacagacagattctcattttctgccataatatagggtgtcatagcatatcgatacaaagcaatatatccgggaatcacaaacaggatggaccagagcataaccatcatgccgcggaagaactgcatacagaagccttcccagagtctgcggatatgggaaaacagatttcccacagacggatcattgtcatcggtcacattcagaaaaaactgagcatatccaagcgtcactgctccaccaatcacaatatggatcaatgccatgaccagcaccgtaattccgattcccataaaaacaggaagaactgtatcataaacacctgcgttcttcaactgatccaccagatctgtattgcttgtgcccgtctgagtaaatatctcggtactgtagctgacatccatgaccgcacccaacagtcctccaagaaaaccaacaacaatggccggaaaccatcgtccacgcaggttctctcttgcaatttttctaaaatctcttgatagtaacatgtctctctcctgttatttcttctttcgtatacaatgctcttatctggcggtcgtttcataaagagaacaacatttatctgccagacagacgatcaccgcctccctgctcttcggaatctgccagggaatcagcggccacatatggctcctgataatattttcttctttggctcccataggaaaatgccgtcttgcatttttccatgcacgggaagggtgactgaatccatgccatctgtgccaggtactcttctcatgccagtcatacagataaaaatcatgaagaagagctcctgtcagcaacgcacgctcattggcacttaaatgtagatgcttattgatccagaagcttaattttaccacattcatgcaatgctcataggtagatgtccttccatgctgcacaaacccatgcatggactgtaccctactgtcttcctgatattgcttcaggatctgatggatcttctgtcggtcttccttggtcaaatgaaataagaacatacgatctccttttattttcttgcgatcacataccaggttttactgtaatttccttcattttccaggaaatgattggaacatttttccacgcgaaacccatttttacaaagcagctcacagacggccttctcatcatgaacgatctctttgatgttttcctcgaactgcctgattccattttcgaacacagtcgtcttcagattgatccttccatccggatcatgggttaccataaactgtgccttcaccgtatcgctgaaatcaagatcgataggctcttccataggaacttccttctcgttgagaatatcaaatacaaaataaccaccgtcttccagatcattatatacgttggcaaagatccggtcaatatcagaaagctccatgatatgattcagggcatcacctgtacaggtcacaagatcgaacttctgatccggccggtaagtgatcatatctgccacgtcataatgaatcttcggattacgctcgcgtgcaattgcgatcatcccttctgaaaagtccatgccgctggcgttgatcccatgagcatgcagaatctcacagaggacgccggttccacaggcgaggtcgagacttttctcaatatggatctgattctgttccatccatttcaatagctgctcaccaaatgcctctggaaagtaattccagccgaactggttgtacacattgcaaaatgctttactataactcatcgtattcactcttatataaaataatctcaccggctgtacgggtctttgcaagatcaatgaccctctgattctcacttccccgatactgcaaggtcaggtttcgttctgccatcagaaaaggaccgtctaccagtacatcggccagctccagaagacgctgtacgcctggctcttccattttcagaagctgttcatacaagtagccagtatagatcatcagatgcttgtgcatggctttgaccgcctctgcaactggaaccaatgcctccgcctgacaaaatggttcgccgccggagaaggtcacaccggacagcagcggattctgtctgatgctctccaggatctgcttcacatcagcaatatggccgcctgcaaaatcatgggtctgcggattatggcagccgggacaatgatggggacatccctgtgtaaagatcacataacggatgccgggaccatccacgatagaatcctggatggtcccggcgatccgaagctctttaggaaaggctgtgtttaacacgatcccgctcctccgctctctttgcattgttgaaccgatcagtggttcctacaaggtaaccggtaattctgcggatccggtcaaattttacatctgctcctaccattccattttcaggtaatactcttcctgccataataccaatctccttttctatgtattagtgattcgggtcaaaatataccggaatatccgggtatttcttccgaagttcattcagtcgttcaatggatactgcttccccttcatgccgtccacatcttggacacacgtcatcgatcacacccgtaaatccacatacagggtcacgatccaccggatggtttacagatccatatccgattccactctctttcatgcagcggatcactgcttcaaatgcttccggattctttgcagtatctccatccagctccacataactgatatgtcctgcattggtcagtgcatggtacggtgcctcaatacggatcttctcaaatgcactgattggataatatacaggtacatgaaacgaattggtgtaatactctctgtccgtcacacccgggatctttccaaagcgtttctgatcaatgcggacaaatcttccggacagaccttccgccggtgtggccagtaaggtaaagttaaggccggtcttctcagactcttcatccagatatttcctcatgtgagtgatgatctcaagacctaactttctgctctcctcactctcgccgtggtgcttgccggtcagagctaccaaagtctcagcaagtccgataaatccaacacttaacgtaccatttttcagaacctctcccacctgatcgttgatattcagattttcagaatcgatccagattccctgtcccatcaggaacggataatttttcactgtctttttcttctgaatctcaaaacggtgaagaagctgtctgcagcaaagagccagacgcttgtccagtgttttataaaatacatccatgtcaccttttgcaagaattccaagtcgtggaaggttgatggaagtaaagcttaagtttcctcttccacaggtcacttctttggtcggatcataatgatttcccataacacgggtacggcatcccatgtaagcaacctccgtgttatagtcaccttctttatagtacggaaggttaaatggtgcatcgataaagctgaagttcgggaacagccgctttgcagatactttgatggccagacggaacagatcatagttaggatctcccggattatagttgataccttcttttactttaaagatctgtaccggaaaaatagcagtttctccatttccaagtcctacatccgtcaccttcagaagatttttcatagccatccgcgcttccggactggtacaggttccgtagttgatggagctgaacggtacctgcgcaccggctctggaattcatggtattcaggttatgaaccaatgactccatcgcctgataggtagcaagatctgtctccttcatggcgatccggatagaagtcttgtgacatctgcggatgtcctcttctttcggaactacttccatccagccagcaccttccttcattacccactgtacgaaagcttcctcatagctgtcaatattactcatattgatacgctccggcatggctgtcttcagtgcgttgcggaacggttcacccaatacattttcacagtcatattccagccagaaataccgctgaactgcatcataatattctttacggaacgtacatgccacaccttctgccatggcataatcaaagttcggtactgcctgtccaccatgcatctcattctggtttgcctggatcgcaatacatgccagggaagcataggttgcaatggattttggctgacggataaatccgtgaccagtagagaatccatcatggaacaacttcaccaggtcgatctggcagcaggtctctgtcagcatgtaaaagtctttatcatggatatgaatatcgccattgatatgcgcagccgcaatatccttcggcaaaatatagttgtctacaaaatagttagcaccctcagaaccatatttcagcatggttcccatggaagtatccgcatcaatattggcattctcacgcttgatatctgcatcagccgcgctggtaaatgtaagttcccggtaaatatttaccagatctgcttccgtttttctgactttggtatgctctgcccgatatagaatatatgcttttgctgtcttggcatagccatgctcgatcagcttctcttccacaagatcttgtatctgttccacgttcggaatctgaccatgcggaatggattctacaatctcagtcaccagtttttcaaactctaatggagaaatggcctctaccattgcagcatcatttgccttatgaattgcactgctgatcttctttatatcgaacggaaccggagttccatttctcttcttgatcgtctccggacacgtaattgtactctccctcattttcattcctccaaaactatatctagtattttagttcttatccctgtactaaatacagtatcactaaacgatcagaagtgcaaggacaatttgtacaggctaaatgtttttcgtgaagattatcctggatgtccaatattagaatttatccgcaaagaaacttttatagccctctccatagatctcatttgcgctggtcacgatcataaatgcctgcggatccagttcttttaccagctcttctacctggggaccctgggttcttcgtaccacacagaagatcactttcttctcatctcctgtccagccgccagttccatgaagatacgttaccccggattcaatttcattcatgatctgttttccaatctcatttggctttgatgttataatatagaccatcttagcctcatctccaccgtacagaacataatcaagagcttttccattgatcagaacagcaatcaacgcatacagcgccgtattgacatttttaaataccagaccggaaatagctacaatgatcacatccgtacactggaacagaaaacctgttttcagatagggaaagtgttgacggatgatcttgataataatatctgttccacctgtggttgcacctgtacggaagatcagtccaatccctgttgccatgagtacgcttccaaacaatgcagcgagaatcgggtcgtctgtaaaagcccccattcctgcaaagagatttgtgaaaaatgatgtcatcatgacagcaaaagccgtctttcccatgaactgaaagccaaatttccagataccaagaattacaattggaatattgatcaggaaataaatcgtacctgtgggtgctccggtcatacgatttaagatgactgagataccggtcacgccaccaggtgctaaattattgggatccagaaacaggctgattccgactgcatagatgatggatgcgactgcaatcaccaccagtttcattgccagcatgacatatttattttttcgcatatccacttcctcctgtttctgaataaatgcctatttgtccagcatggtacccatataatagaatccgcggcattcatccaggcgaacacggatcagttttccgatcagttcttcgcttccttcaaaatgtaccacatgattgttacccaggcggccagtcacatagccatccatctgactgtttttctcttctaccagaaccgtctcctcatttccggtaaaacgctctgccatttccttggaaatggtctgtacttcttttaagagacggtcaaaccggtctttcaccacatcttccggaatctgatcttccatcacggctgctggtgttcctgtccgtttgctgtatataaaagtaaatgcactgtcgtagcgtacctgtcttaccacatccagtgtctcctggaaatcttcctccgtctcgcccgggaaccccacaataatatccgtggtcagcgcaatatccggcatccgttcccggatctttttcgccagagccagatatttttccttatcgtaacgacggttcatagccttcaggatccggctgcttcccgactgtaacggcagatgaagatgcggacagatcttcttggaatttgccatgacttcgatcaggtcatcagacagatccttcggatgagatgtcatgaaacggatccgttccagaccgtcgatctgttcaatctctttcaaaagttctgcaaatgtcatgggctgctccagattcttaccatacgagtttacattctgtcccagcagcatgacttccacaaccccatctttgaccaaggcttcaatctcccgtacaatatcctttgcttcacgactgcgttcccggccacgtacatatggtacaatacagtagctgcagaaattattgcagccgaacataatgttgactccggacttgaaggcatatttccgttcatttggaagatcttccacgatctgatccgtatctttccagatatcgatgatcatccggtctgactccagtgtcatggccagaagttcagcaaatttgaaaatgttatgagttccaaagataagatccacaaaacgataactcttctgcagcttctctacaaccgttgcttcctgcatcatacatccacacagggcaatcttcatattcggattctttttcttatatccatgcagcacgcccagacgtccgtagacacgtaagtttgcattttcacggacagtacaggtgttgtagatcacaaaatctgcatcctcactctcggtctctacgtatccggcttcccgtaaaataccggataatttctccgaatcacgggcattcatctgacatccgaaggtggttatattagcagtcaggggacgccccagcttctcagactgtgcttttacatattcctgtactttctttataaaataatactgtctttccggttctgttgtcggagccggtctgttcaaatctatcatttccatctccttgttatctcatgcattttttcattatctttaactatactcaaaggagaagtctcttgtcaataggtcctgccaaataacctcttgccttttctgccagtttcgatataattaaaaatagtatgccaataacaattttgcagtaagacggagagacacatatgattttagcatgtcagaatatacacaaagcatttggagaaaaggtcatcttaaaggatgcatcttttcatatagaagaacgggaaaaagccgctattgtaggaatcaatggcgctggtaaatccaccctcctgaagatcatcatgggggaactggcagctgatgacggccaggtcatcatcaccaaaggaaagaccatcggctgtctggcacagcatcaggaaatggaaagtaacggaaccattttccaggagcttgtgacagtcaagcaggatgtactggatctggaagcacggatccgaagcctggagctgtccatgaatcatgcagaaggtgctgaacttcaggaactgatggataactatgccagactcaatcatgattttgagcagaaaaacggctatgcctggaaaagtgagatcaccggagtcttaaaggggctcggattttctgaagaagattttgaaaaacatgtaaatactctgtccggaggccagaagacccgcgtatctttaggaaagcttcttctctcccgcccggatattattatgcttgatgagcctaccaaccatctggatatggattctatcgcatggctggagacatttcttatgaattatcagggagcagttatcatcgtatcccatgaccggtatttcctgaaccgggtcgttaccaagatcgtggagatcgatcagggaaatgtcaccacttttaccggaaactatacggcttatgctcagaaaaaagctatgctcagagaagcacagatgcaggcctatctgaatcagcagcgtgagatcaaacaccaggaggaagtcattgcaaagctgaagtccttcaatcgtgaaaaatccatcaaacgcgccgagagccgtgaaaaaatgctggataagatcgaagttctggaacgtcctactgaagtgaaggccgatatgcatattgagctggaaccgcagatcgtcagcggggaagatgtgctgactgtagaaggtctgtccaaagcatttccgccacagactctgttcagtcatctggattttgagatcaagcgcggcgaacgcgtagctttgatcggtaataacggaactggaaagaccacgattcttaagatcatcaacggtgttgttcctgctgatgccggtgagatccggcttggctcccgtgtacggatcggttattacgatcaggagcaccatgtgttacatatggaaaaaacggtatttgaagagatctccgatgcttacccgacacttaccaacaccaagatccgcaatgtactggctgctttcctgtttaccggtgatgatgtatttaagcggatcagtgacttaagcggtggggagcgcggccgtgtgtcccttgccaagctgatgctgtcagaggccaacttcctgatccttgacgagcccaccaaccatctggatattgtatccaaagaagtactggagcaggctctcaaccgctacacaggaactgtatttttcgtatcccatgaccgatactttatcaataccgttgctactcgtattttggatctggcagacgagacactgaccaattatattggaaattatgactattatctggagaaaaaggagactatgaccaactttacttctgctccttcttctactacagtctctgttgctgaggaatccatgcagtcagaatccaaattagattggaaacagcaaaaagaacagcaggcattgctccgcaaacgacagaatgatctgaaaaaagtagaaagccggatcgaagaactggagacccgcgacaaagagatcgacgaactccttgccaaagaagaagtcttcacgaatgtggcggaagtcacaaaactctctaaggaaaaagatgccatccagaccgaactggaaggactttatgaagaatgggagaccctgtctgaatagacggggatctcccattcttcatttcattacaattggcaaaatataattcgatacaaaagcaccgatcaggtagatccatgtaaagatcataaatggtttgttaagccaggtaattgatattcttttatgttccggaagtgcaatctccccttcttccagccacagctggttcctggcaaaatccgtcagcagaaataccagtcctgcaattccgatcacaaaatcaataataaccaccacaaccattgccatgtccgaaaaattcttggcaaaaagtggcaatacacttcccacaaaattcaccatcatatgaatacagattgtatagcgaacatccctcgttttgcaatacagatagccctgcgcgcatccgagaaaaaatgcatagaacacctgattgagattcccatgcatcactgcaaatacagttgcagacaggaagattgccgtcttttcaccataaggatacatccggtcgatcacatatttccggaataccagctcttctacaatgggagcaagcaataccaccatggtaatgacgggaagcatatcactgatactgaccagatctatcgttgtggttgtctctgcaccagtaagcatctcgataactgtactccagaacagccccagcaaatttccaagaaccatcagaaactgcgcaatgcagaaccactttaacaggcttctgaaaggcagtttcttcttctccggtgaaaatgtaccgggagcagcctttcttctgatcaacaggaaaaataccggaaatgcaaacagatacggtatcacaagcccgaccatatataatccccagtcactctccagccatgttccaccaaagattccagccagaaaactcgccagaaatgcaacagcaatgctaactgcaaaataaaagaaccaggctcttccaactgcggcaaaatctttttttgctttatcatatgtttccatgttattcccctgttttcagatatattctattggaagggcaacaagattttcctttaaatatcggtttctgcagacgaaataaatccgaaatagaaatacatagcacattcgtctctgtcaaagtttctgaccacaggatgtgcagcagattgcatccgcttctacctcagcaccacattcagggcactttttcgttgcaggctgagcttcctctgccgtatcaggcaaagtacacccacaatgaacgcagaatctctgacctgcctctactgcggttccacagcttgggcacttaagtacaacctcgactaatggttccggtgctgccggaattttctctccgcactgagaacagaatactgttccttttgagattgcagctccacattttggacaggtggagcctccttttatggcagtgatctgcgcttttaatttctcgattgtctgttttgcaagattgattgcctccacagatgccttaacacaatcctccggatcattcgtatgcgcctcataatagtctcttccaatctgcgcataaaactgtgtgatcttcttttcctgttcggacacctggctgttcagcttgttaacttcagcaaatgcgcgcgcctgttctgctgctttctgtcctccatctgtgagtttttttccaagttcatcaaaaaatgccatgtttttatcctttccggctatttaacgatagcccatttcttcttcatattcaacaatcaaatcacgattagcaaattcatagtcattgaacacattatcatcaaaatcttccggttcaatggttcctttataccagctttttgaatcaaaatatgcctgaagatccggatctgaaaactttcttccatgtcgtgcaaacagttcatttcgcgcgatcctgcagtcatcagctgtatatcctttcagttcatccttcgtcaaatatctgctgtcactgcccggaataaaatattcagaagcctcttcgtcgacattttcttctgcttcttcgtcctgagtttcttctgaaacttccatatcctcctccgtttctgattcaggaactttttccaccacctttaccttttcaggtttctgttcggactcggtttcaaattcagccgcagattcaagggctggtatctcctgttcaggttcagaatgagagctccatgccttgatagcaaaaaatccgcctgccagaactaagattacaagtaatacaatcccacctgccagaacaaacggaagtttactcgttttcgttgatccttcatgaatggtgtatccagctcctgttgcatgtttagctactgactcagttactggtttcggtgccggttcaggcatcggtttcagtgctggctcagatgccggttcaggcaccgatttcagtgctggctcagatgccggttcaggcatcggtttcagtgctggctcagatgccggttcaggtactggtttcggtgttggtgcaactgcagatttagacactggtgttccgcaatttctgcagaattttgccccttcggaaagtttttcgccacattttctacaatacataacgataccacctctctcaaatattttttttatgctcctgctcattcatttccagcagtcgataggtcaacagtagatacaataattgatcaggctcttccagatcgatctgcaccagttctttaatatgtgccatccggtacaggaaagtactgcggtgaatgaacagttcttttgctgctttgacagcattcatctggcaggacagataggtcttcagcgtctggtaatactctgtcttatgctctgcatcatattttttcaaggtcagtactgcatgactgcatacaatatcagactccagacgttcggtacattttcccagcagatagtcaagagcgatgtcctcaaaacgattgacccaccggagcgggtgcagccgtagtccttcttccagtgcgatcttcgactgaagataataagatttcaaacgattcagccccgtaaacatatagctgatacccgctttcagataactgtcctgtaagaagtcattggcagccgccagagcctcttccatggatctaccataatggtttaaattcacgtataccacaatgttttcatccagcaagaaggcacaacttcccttcatcaatccttccagacgattacagataaaacgcacaacggtcagattctgccgatccaccatggacacatggatgttcatacagaaatactgatgggtttcttcccatcgaaacttggcaaatcttggagtcagtgaattgtcattcttgatctcaccagtcagaatattggaaagcagacgatccagtgtataactcagatccgactgaagaacagtatatttttccagcatctgctgaatatattttgaaagatgaacgagtaaatactcatcataatgccggaattttctggatgactcagccagaatcacccgataggcattatggttcttatcatagatttccacaaacagattgtttttctgtgtctgtggatcttcatacttctgcacttcaccagaaggtgatgatatctcagattttactgctgccaggatctgattatgctgaagaatgtcctgaaattctggcatagtatccatcatggtgctgtaatcaatgatgaatcctgctgaggtacacaccaggatcggattatgaaaaatacgataggagctatcaagaagtgttcgcatggtccgctcagagagcgccatacgctgcatacgctcatcccacgcatcataggtatcaaacacacgctgtacaatattaaaaagcatctcagctgaattttcagatggaaaaaagcatacgccaaaaaggcgcttactcaaagaaacaaatcgttctcctacaacaagcaccaggttatctccatgctccagaagatctgtttcactgatatctgtttcatggacaatataaactttattcttccggaattctgttccgctttgataaaaaagcggacgtttcaggttcatttctcctgaaagttctccaaaagagcaatcaggataattctggcggagcctgtccgccagaatctgcatactgatacgcataaactatgcgaattttctcatggctgcttcaactacatggccaaccagaacagaagtagtcacgcttcctactccgcccggaaccggagtgatagcctcaacaatcggctctacctcgtcaaatacagcatcacctgcgatggctcccttgccgccttttttgttgatcttttccggatcccagttgatagatacgtcgatcactacctgacccggacgaacatattcttttgtcagactgttcaggacacctgcacaggagatcaggatatctgcttctcttgcgattgccggaacatcaacagtcttggtatggcatacggttaccgttgcatttttgcccatcagcatcatagctgccggttttcctactacaaggcttcttccgatgacaacagcattcttacctttgcagtcgattccgtagtaatccaggatctccatgcatgcctgaggagtacacggcgggaatcccagcggttttccttcaaatacacctgccagagaaagatgtgtcatacagtcaacatcttttgccggatccagtgcattctcgatctcagactgaactgctttcagatgagccggaagcggacggaacatcagaacaccgtgaatagaatcatctttgtttactttatcaatcactttcagaagttcttctttggatacatcttccggaagaaggatcttctcaacttcaacaccaagggtatcacatctcttagttgcacctgtctcataagagatatcatccggtctctcgccaactctgatgatgccaagcttcggagaaactcctttttcttttaactgtgcaacctgtccgatgattttttcattcagagctgcggttacttcttttcctaataactgttttgccatgattattattctcccacttttttgttatctgaggcgtgcattcactgccgcaaaaatctcatctgcttttttgctgtaatcagcgatcattttatctgctttctcattcagagaagctgcatactctttatctgccatagatttagtattgatgaatacattcagggaagctcccagaagtgctgccttacagaaggtcacaccaacacctgcgtcagagatagccagagcagatccttttgctgcaaattcctcaatcacatcgattgcttcacagcatttttccatgatctccatgggaactgcgcatgcatctttcagtacgattgccatgacacgtgctttctcagctttctcttcctcagtctcgcgaggcattccgtaagcttttgccagcggctcaaacgcttctgcatcagcctctaccagacgaagaaaatctgcctgcagagcggttgctttttctttgagcgcaatgatatcggcctcaacatctgcatattttttcttgccgactgtcaggcttccaaccatgttgccaagagccataccaatggctcctaccagtgcagatgcaccaccgccacccggaaccggagctttggacgcaagtacatctacaaattcttcacagctgctttttgtaaatcccatataagtcctccttattctgaacatggcagatggcaggggacacctgttccctgcctgccatgaaatgtttttattcggaattgtataagtcctatttgtttttagaacagaccagtaatctttccgttctcatctacatcgatcttctcagcagccggaaccttcggaagacctggcatggtcatgatctcaccggtcagagctacgataaatcctgcacctgcggaaaccttcagattacgaacggttacttcaaagtctgtcggtgcaccaagttttgtctgatcatctgtcaggctgtactgggtcttagctacacagatcggacaattagcaaatccaagtgcagtcagctcttttgcctgtttctgtgcatttgcagtcagaacaactttcttaccaccgtagatcttggtaacgattgcgttcagtttttcctcaattgtagttccttccagctcataggaatatgtgaaatcattcggctgctcgcaaagacgaacaacttcctcagccagcttcacgccgccttctccaccttttgcccatacctcggacagaacaacattaactccaagctctttacatttctcctcaaccagcttcagctctgcttccgtatcggtcgggaatgcattgatagcaactacacacggcagtttgtatacattcgtaatattacttacatgtttcagcaggttcggaagacctttctccagtgcttccagattctcattattcagatctgccttcggaacaccaccattgtatttcagagcacgaacagttgccacgataacaacagcattcggtttcagtcctgccatacgacacttgatatcaaggaatttctcagcacccagatctgcaccgaatccagcctcggtaatggtgtaatctgcaagcttcagacacatcttggtagcagttacagagttacatccatgagcgatgttagcgaacggtccaccatgaacgatagccggagttccttccagagtctgaaccaggttcggtttcagagcatctttcagaagtgctgccatagcaccttcagcatgcaggtcaccagcggttaccggtttctgctcagctactttaccatatgtataaccaatgatgattcttgcaagtctcttcttaaggtctgcaatatcacttgccagacacagaactgccatgatctcagatgcaacagtgatatcatatccatcctctctaggcattccattggtctttccgccaagtccgtctactacattacgaagctgacggtcattcatatccacacatcttctccaagtgatctttctcgggtcgatgttcagtgcatttccctggaagatatggttgtcgatcattgctgccagcaagttgttagctgcaccaatcgcatggaagtcaccggtgaaatgaaggttgatatcctccatcggaacaacctgtgcgtatccgccgcctgctgctccgccctttacgccgaataccggtcccagggacggctcacgaagggctaccataaccttcttgccaatcttctgcataccgtctgccagacctacggatgtggtggtctttccctctcctgccggagtcgggttgatagcagttaccagaatcagcttgccgttttcagccggtttctccttcagcagattgtagtcaatttttgctttgtactttccgtactgctccagatatttgtcgtcgatacctgcctttgccgcgatgtcagtaatcggcagcatctctgtttcctgtgcgatttcgatgtcagttttgaatcccattgtaaaacttctcctttcatagttatcggcccttctgcggccgacgtctgtggtttttttgtagataatttaacaagtgattcgttcgtatctcttatctactatgtgtcctattatagcgatcaacctcggaatcagcaatcatacactgtgtcgaatattgatattcttttcacgaacttgctgtttcctgattttccgcaagttttcacgttttttcaaggaactttaccagtttttttcgatttcttttctgttcttctctgaaaaatagcatttttcatccgacattttgtagaaaatcattttaacaaagccttactttatatattttttcacaaaacatgggtgtttctgcgcaattttcagccatcattcttattgtaagctaaataattttacaatact

SEQ ID NO: 4390 - DNA, 20729 bp, Unknown
  16S sequences of unknown bacteria
tgttgtttgcctgaactccgggtcgctaaccgccttcggcggttgtatccactggatacccgcttcccttcgttcccctttggaaaccttcgggcgtcaaagccggcgaagaacccatggaagcttcatcccttgcactcatggcagaatggccgcacaccgccgaaggccagaggctttcctcggggcaaacaatcggcgtgccgtgcgctccgcttgttggttgcctgaactccgagtcatttccaccttcggttcgtgcgtcccatagggtagcaagctccatttccccgccgtaaccggcgcgtcatgcccatcctcctttcttgccatcgcgggcaaagtatcgtaaaatggtgatagggtgatcatggaatcccactttctttccaaaagagccttgtataccacaaatccatagaatggagtgaaactctttgtacgaatctctgacctgccttatcccggcacttcaaaatggccaagccggggaatggatagttgacagaaaaaatgatgggaccaaggaacacccgatccaattcccgtttgtaaactatggcgacgcggcttgcaaactcatagaggaaatacatcgcttcgcagagaagcacccggaatttgaactgaatcagtatcaaaccatcctcgaaaaaaagaaaaacgagcagggctgtgactctgtatgggcaatggacgtcgatcagctggacgggaaaactgtcacggcgcttttgcttggcgctgcgcgtgcggagcgttttagcgagggaacgctgctgcgtttttgtaaggacggaagcgttgtaaaatggctgaaaaggctgaaagagctggacgaaggctgaaacagaagccgaagcgcttctttaccatagaaaaaggggcgcaagcaaacggagccggcctcccgactccgtggaaaaaatcgatcgttgtagttcgccttactccgccttttccggatgggactgctgccagagctcgtccgccttgggcttccagcaggcggcgtatttctcgcacttgtcgcagagatgatccaccgtctccggggactgcaggtccgtggagtgcgcgccggtctccttgaccatcttgcgcagaaggtcgggattctccagcatggggcagggccgcagatggttgtggttgaagggctggccgtcgtggtaggccatgaaaatgggagactgcaggccttccagcagcgtcttttcccgaatattggaatcggaatagtggatgaacacgcagggatccatatcgccgttggcgttgatgtggaagtagcgccgtccgcctgcgatgcagccgcccacgaattcgccgtcgttctggaagtccatggcgaaaatgggcttggtggcgcggatgtggcggatctgatggtacatgtattcccgctgctcgggggtaggcagcagctcgggagccgcgtcgttgcccacgggcatgtagtggaagtaccagacgaacttcgcgccccagtcgaccatgtgatccatgaactcgtcggaagcgatggagtcgatgttcttgctggtgtagcagcagctcaggccgaaggcaagccgcttcttcttcagaatctccatggcatggatgaccttctgataggtgccgtggccccggcggccgtcggtggcctcttcaaagccctcgatgctgatggcgggcacgaagttgcccacttccagcatctggtcggcaaaggcctcgtcgatcagggtgccgttggtgaaggacaggaacacgcagtcgttgtgcttgcggcaaatcttgatgaggtcttctttgcgcaccagcggttcgccgccggtgtagatgtagaagtatacgcccatttccttgccctgagtgatgatggagtcgatctcgtcaaagctcaggttcagcttgttgccgtattccgcggcccagcagccggtgcagtgcaggttgcacgcggaggtggggtccagcaggatgacccacgggatgttgcagttgtacttcttgcggtattcctcctcgatgggccagcccagaatgttggcgttgaggatgaagttggtaaagaaggttttcagctgatcccgatccacgtcgttgaaaaggttcaggatgagctgatgcatattgttggcgggatcctccaccacggcgcgtaccgctgcccgctggctttcaaagctgtccgggccagtgccggccagcttgtccacccagttcatcagcttgggcatgtttttctccgggtccttttccagataacccagcgccgtcttcagtgcaatttctttgatcgccttgtatttcatggaaaaaatcctccttgtccgatcgcgcgcccggcgcttttcggttggttcctttttactctatcggtttggaattttgaccgcaatggacaaaaacagggtcatgccgaaaatcggcacatttgctgcgtcctgtctgattttcgaacagaaatggccgcgccgcctgttttttagtcacggcaagcagagtgaccattgcgaaaaatgtcggaatttgttatactccatagggatgctttttcgttcagaatattttttgccgcgcacctgcggcggcctatggatcgcgaaaggagccgaaccccatgccctctttcacccggaaagccattatgcagtcgtttttgaagctggtagatcagcgccccatcaataaggtcaccatcaaggacatcgtagaggactgcggcatcaaccgcaataccttctattatcatttcagcgatattcccgccctaatcgaagccatcgtgcaggaggaagcggcggagctgttcaaggctcatcccaccatcagctcctatgaggaatgtatccggctggccattcaggaaattcagaagaataagcgggcggtgctgcatatctacaattccgccaaccgggatatttacgagcactacctgatgcaggtgtgccagtacatcgtggagacttacctcaacaccctgctgggcgacaggaagatcgaccggcaggatcgggagatcatcgtcaccgtgtatagctgccagtgcttcggcctgttcatcgactggctgaacaataacctgagcgacgaattcccccagcgggtggagcgcctgtgcgagctgcgcaaggggatgctggaagaaatgctggaacgctgcgcacaggcgtagaggcccctctggcgccggaagcccgggaagggcggtccggcgctttttgctgaaaacacatacctcctttcagacacattttctctcctgtctgttttttgggcacgttaccgcccctgtctgctttttgaacaggggcggcaacgtgcccgtttgtatgccgctttttcggtgttatactttccccgaaatccaagcgagggaggtgagaaaccgtgcgttccgaaaatcccattcgggcggccaagatcagctatatcgtcacgtccgtcgcgttctgcgtgctgggcattctgctgatcgtgcttcggaattggtcggtttccttcatcggcgttgtgaccggcgtgatgctcattgccttcggcattgtgaagctgctgggctatttttccaaggacctgtaccggctggctttccagtttgatctggccttcggcatcctgctgatgacgctgggggccattattctggccaagccggagcgggccatgagcttcgtatgcctgatgctgggcgtagccattctggccgacgggctgttcaagctgcaaaccgctctggacgcgaaggagttcgggctgcgttcctggtgggccattctggcgctggcggtgctggcgggcctgatcggcgcggtgctggcccttcatcccacggagagcgccgtggtcatgaccctgctggccggagcctccatgatcgtggagggcgtgctgaacctctgcgtggccctcttcgccgtgaaggtggtccataaccagcagcccgactccccccgccggtggctggacctgtgagccggccagaaccaaagagaaaggaaggatttgcctcatgcgtttttccaaggcggtcgtcaagtaccgcgtggccattctgatcgtggcgctggcgctgctggcgccggctgtgctcggcatggtcaatacccgcatcaactatgatatgctggactatttacccgaggatatggataccgtcatcggccagaacgagctgctgagcgacttcggcaagggcgcgttctcgctggtgattgtggaggatatgcccgcgaaggacgtggcggcgctgaaggagaagatcgccgcggtggatcatgtggacagcgtggtctggtacgacagcattgccgacctgcgcctgcccatggagcttctgccggacagcgtttatcagaaattcaacaccgacaacgccacactgatggccgtgttcttcgactccgccacctcggcggacgtgaccatggacgccatccggcagattcgttcgctggcggggcagcagtgcttcgtcaccggcatgtcggcgctggtcaccgacctgaaggatctgtgcgagagggaggagcccgtgtacgtggggctggccgtgctgctggcctgcgccgccatgatgctccttctggacagctggctggccccgctggtcttcctgttctccatcggcgtgagcatcgtctataatctgggcaccaatgtgatgctgggtgaaatctcctacatcaccaaggctatggccgcggtgctgcagctggccgtcaccatggactattccatcttcctgtggcacagctacaacgagcagcgggaaaaggtcagcgaccccaacgaggccatggccaacgccattcacgccaccctttcctctgtggtgggcagctccgccaccaccatcgcgggcttcgccgccctgtgtttcatgagcttcacgctgggcaaggatctgggtctggtcatggccaagggcgtgctgctgggcgtgctgggctgcgtcaccctgctgccctcgctgatcctgctgctggaccgccccctgcagaaaacccgtcaccgtccgctgatccgcaacgccaacggctttgccaagggcatcaccaaggccttccccgtgatgctggtgatctttgcgctgctggtctatccggctctgtacggctaccggaagaccaacgacgaggtctactacgatatgggtcaatgcctgccgcaggatattgactacgtcattgccaaccataagctgatcgacgactttgatattgcctccacccacatggtgctggtggacaccagcctgtcctccaaggaactgcgggccatgcaggacgaaatggagaacgtggacggcgtgcgctatgtgctcagtctgcagagcgtactgggcagccgggtgcccgcggaggtgctgccggacagcgtgcgcaacatcgtggaaagcgacaagtggcagctgtggctcatcagctccgagtaccgggtggccagcgatgcggtgaacgaacagatcaccggcctccagtccatcctgaagaaatacgacccctccggaatgctcatcggcgaagccccctgcatgaaggacatgatcgacaccaccgatcacgacttccaggtggtcaataccgtgtccatcatcgccgtgttcctgatcatcctgctggtggaaaagagcctgacgctccccttcatcctgatcgcggtcatcgagctggctatcttcatcaatctgggcctgcctcactatctgggccagtccctgcccttcatcgcccccatctgcatcagcaccatccaattgggcgcgaccgtggactatgccatcctcatgaccacccgctataaggcggagcgcgtgggcggcagcgccaaacgggaagccgtgaccaccgcgctgggcgcgtctacgccctctattctggtcagcggtctgggcctgttcgccgccaccttcggcgtggctctgtactcagatatggacatcatccgctccatgtgcatgctgatggcccggggcgcgctggtcagcatgggcagcgtactgctattcctgcccgccttgcttctgctgctggataaggtcgtctgcaagaccacgctgggcatgaaagtgaaaaactaaggaggagatcttcaccatgaaaagcaattggaagcgcatttccgcgctggttctttctctggcgctgctgctttgcgccgccgtcccggcgatggccgaatctgccgccaaggacgaaaccgtgtacattctctccgacgcgcagggtcaggcccggcggatcatcgtcagcgattggctgaagaacccggacaagctggatgagctgaccgacgcgacccgcctgcagaacctgaccgtggtggagggcaacgccacctttgaacgggacggcgaacgcctcacctgggacgctgacggcaaggacgtgtactatcagggcgacagcgacgaggagctgcccctgacgctgcagatcacctatctggtggacggcgaggaagtccccgccgccgacatggccggtaagagcggccgcgtgaccatccgtttctcctatacccccgccgacgggcagaaggcccagtttgccgttctgtccgccgcccttctggacagcgatcgcttcaccaatgtggaagtgaccaacggcgcggtcatcaacgacggcgaccggctggtggcgctgggcgcggccctgcccggactgaaggcccgtctggacgtggaggacaaggacggcaagctgcccgagaccgttgaaatcaccgccgatgtggagaactttgccctgcccctgaccgtcactgccgccaccaccgaatggagcagccttttgaaggacgttgacctgagcctggcggacgccgccgacggcgatatggatcagctgacggttgcgatgagccagctgttggacggcggtcggcagctgtccgagggcgcttccgctctgaatgacggcgttggtcaggtggccggcggtctgagcaccctgagcgaaaacagcgagaccctgaacgccggtgcgctgcaggtcttccagctgctgctgcagactgcaaaccagcagctcaaggccctgaatccccaagtgcccgacctgacggtggagacctatgccgaggtactggacggtctgacccagcagatgaccgccgccaaacagaccaagacggaggctttccagagtctgcaggtgcttaaggcccagctggacagctacaaccagttctataccggcctgaccgcctacaccgctggtgtggatcagctcagcgccaacatgcccgccctgacggacggcgctacggctctgaacgatggcgcggcccagctgtacgcggggctgcagacgctggatcaggacggcctgcaaacgctgacctccatggtcaacgatgaatggaagcccctgttcgaaaacgcccgcgctctggcggatgacaccgaagcctaccagtcctacgccggcaaggccgacgacgcggaaggcgtggtgcgctttatctggcggacggacgccatcggggactaagctgaaattcggaatatagaatgcgccccggtgcagggaagaaaagccctgcgccggagcgttgtgttatgggaaaaacgatcggagccatttcggctccgatcgcatacgttattccgttttacgaaggaaaatcaggccttgccgctgatggtcatttcgcccgcgtcggcgctggcgctgcccatggggccgtaggggaaacggaggtcgctggcaaaggcgcggatgtttttgagcagctcgtagaagttgcccgccacggtgatgcgctccagcggctgatcccgctggccgtccttaatggtgtagcccttggacagcagggagaaatcgccgctgaccgggttcgcgcccgcgtggaggccgcttacttccgtgatgacaacgccgtcgcccacctgccggagcagttcgtcaaaggaaagcacgcccggctcgaagtacaggttggagggagccacccgcaccggcgaggagtagtccgccttgctgccattgcccgtggactgcacgcccgcctttttcgcggtcttcagattgtgcaggaaggtgcggaaaacgccgttctccaccagcatgtgctgatgagagggcacgccctcgtcgtcaaagggacggctgccgacgcagtcggcgcgcaggggatcgtccaccaccgtgacgcagggcgcggcaatggtctcgcccagcttgccggacaggagggacaggcccatctgctccgtctcggcggagaaaatggtgttgaatacgcccagcaggctgaccagcgcctcattccagaagatcacgcgatatttgccggaggccaccggctccgcgttcagccccttcaccgcctgctccacgctgtcgcggcccagcgcgatgggatccagcgcgtcaaagtcccgactgatctgcgcaaagccgccggtggaaacgcagtcgttctccttgacgttggcgccgcagtacagctggcagaagttctccgtgtaggtctgatccatgccgtagctgttggcgatgcgcacggtgtgctttgtggtgtcgatcatattgtagccgttcagataccgcgcgtccgtggccttgcactggttctccatggcttcgatcttcgccagcttggcttcgggagaaaccttgtccagctccgggttgtacagcgccacttccgggaactgcccgccgccctgatagagcggctgctcgtccttgctttcgcatagcgtggccgactcgatcacgccccggatcagctgaccgatggattcgtcgtccagcgcttcggtggacgcatagcccatgcggccgttcaccagcccccggaagcccaagccccgggtgtggttggattgatagtcctccagcgcgccgttgttgcgcatggcggaaaagctctcgctttcgctcagataggcctccgccgcctcgacgccggcggccttcgcctgagatagaagttccttgatgtaatcctgcttcataagataacctcatttctgaagtcgttgagaaatcgttgtttattttaacctttgcggtcataccccaccacatgtccctctacgcccctgtggcgcgcagtccggggtcaagggcggcgagaggaagacgcaaggcgggttgtccatgggacaacccggtctgcctttggcagactgaacttttcaaattttatttgaaaagttcaccgtcgcccagtgggcacaaccgccgcaggcggttagcgaccgacagccgtcaaccgaaacgaggctttggcacggcagtgccaaagacgacgattgaggttgcggatcactgctccttgcgggtctgtaccggccaaccagcatttcgccgaccagaccggcgagctgtggcacccgtcgtgccacggcggtaaaaccccggccaacctgcaagtcctctacgcccctgcgcgcctgcggcgcgcagtccggggtaaaggggcagtgccccttgcgcgagaccttccgccgagcggcggccatttccggccaaccagcatttcgccgaccagaccggcgagccgtggcacccgtcgtgccacggcggtacaaccccggccaacctgcaagtcctctacgcctgcgcggcaaagccgcgcagtgacgggtgcagggctttagccctgcctgccgccgaccgtgatggacttgacgcggatccagggctggccgacgttgacgggaacggagccgctcatgctgccgcacatgccctgcgccatgaccatgttcttgccgacccggtcgatctgcaggagaatgtcgccgcccttgccgaccagactggccccccgaaccgggtgggcgatcttgccgtccttgatgagatagccttcgttgaccgcaaagttgaactcgcccgtggcggggttcaccgaaccgccgcccatgctggctgcgtaaagaccgtcgcccatggtggcgatcatctccgcctcgtcgtcgcagcccggggcaatgaaggtgttccgcatccgggaggtgggcgcgtaggcgtagctctcccggcgggcgctgcccgtgggggccatgcccatccgacggccgttcagacggtcgatcatgtagttcttcaaaatgccgttctcaatcagcaccagacggttcgtgggcatgccctcgtcgtccacgttctcgctgccccattcgttgggaagggtgccgtcgtcgatggccgtgacgcagggcgcggcgatctgctggcccagcttgccgcagaactcgctcatgttgctggctacggcagtggcctccagactgtggccgcaggcctcgtggaagatcacgccgccaaagccgctgccgatgaccaccggcatcaccccggaggggcagaagggcgcgtggagcattttcaccgccgttttgcccgcccggagacccatcagagccgggtcgatggtgtcaaggaaatagtcgaagccccgggccgcgccgggcgcttcaccggcggactggttctccgtgccgttggaggctaccgcctgacagcgcagacgggaataaacgcgggtatcggcgacgtacaggccttcgctgttgcagatcagcacgttctgctcgctgtcggtgaaggcgcagagcacctgagagatttcgtcgcccgcagagcgggccgccttgtccgccgcccggagcacgtcgatcttccggcgagtgtccacctcggagggcttcatccagatgggatgacggttgacgaaatgctgctcctccatcggctgaaccgccgtgcgaccctgccgctgggcgcggatggccgaagccgcctctttggcgcacttcagcaggccgtcccggccaaaatcgttggtgtaggcgtatacggcggacgctccgtcgtatacccgcacgcccgcgccgtgcagacggcccgagttcacccgctccacgtggctgtcctgcagggccacggcctgatcccgccggtcctccgcaaagatctccgcaaagtcgccgccggtggatagggcggcgtccagcgcttccatggcaagatgcttgtctaacattcggtcgttctcctctcgcttgggatgagttatttcagaatttcgtcaaagtccgcgtccgcaaggctggcggcggtaaaggtggccttggggttggcgctggcagagcctacgcccagcacccgcatcccgccgttcagggccgcctccacgcccgcgtccgcatcctccaccaccatgcagtttttggggtcgaggttcagcagcttcgcgcccagcaggaaaacctccgggtcgggcttgctgtgggtgatctggttgccatcggccactgcgtcgaagtaaccgtccagcccgatctgccgcaggatgatgggggtgttccggctggaggaaccaatggcgatcttcacgccgcgctttttgagcatctccagcgtggccatggctccgggcagcatggcgtccgccgtcagctgctggatcagctccacatagtagccgtttttgcgggtggccatttccaccttctgctcctcggtgtaggtcttcgtcgccttttccagaatgatctccagactggccatacggctcacgccccgcagacgctcgttcaccttgcggtcaaagggaatgccttcttcgtcggccatgcgcttccaagccaaatagtgacaatcatcggtggagacgatgacgccgtccagatcgaaaataacgcccaaaatcggttcgttcatttgaggaaacctccttggtgaattgaggaaaagcggcccggatgagggaacgctctagcagaaaagattatagcatctttttcccggcgggggaaggggcggaaaagcacggaaaaagaggggctgcctcccctgcgccttggcgcggcggaagcagtccccgaaaagaaaggatggatggatcacagttccttggtcagccccacaaagcgggccacgatgtggaacccggcgcggctgtagatcttctgggcgaagttggtctcgccggtgaaaagggtgctgaacttcgcgccctcggccacgaactcccgcatgagcaggttgaacaggacggaggcgatgccgcggccgccgtagtccgggtcgcagcagatgccggtaaaccagccccggccgcttttttgcagatccacagggccggtgtaggccacgatgtgcccgccggtggtggcagtcagcagggggcgcggcccggcagggcggcggccgtccggccagagggacgggtcggcgttgggctcatttttctgccacgcttccagctcggtatccagcacgtgccgccagtactcgctgcccacgtggtcgcagagccggtcgtgctccgtgccgcagtcaggcgtccaacggcccacccggatgccatcggcatccagcgcggtgattttcgcatccagcgcgggatcccactggaatttgctcaagtccagatacatggcgatctccgtgaaggcggcctgatagccccggtgcagcaggaagggatagccttcgcagcgttcgtccacgccgggggcgttgttgtggtcatgcccgggtgtgccggggatggtccagttcatgtggacgggggtgctatcgttgcaggcggccttgtgcttgcccgcggcgcggaaagcgtcctccagcgcggccaccagcgcggaacccacgccctgccgccgcttgtccttccgaaccaccaccacggacagatagccgggggtgttttcgttgttttccttgttgaggaatgccgttttgcacgcgccgtggataaaaccgatcagttcgccgttttcttcagcggcgaaggcgtgcgcgccgggctgaaagaagcgccgttcaaagaccgcttcgtccagcggggagaagatcatttccccgtcggcgacactctggttaaacagcgccgcagcggcggaaatgtgctcccttgtcaggggtttcaacgtccaactcatgaaaaaagtcctcctgattgaaaatgtaggaagtcaggcggttcaatacagccggtactgcttagcggcctccacaaattcctttactttgggcgcgtatttgtccatcaggccctgcgccgtcagcgcgccggtgcggtattcgtccgtacccagcagcaggtcgatggaatagggggatttttcgctccagcgcacgaactggaactcctcggggtacaggctgcggatggtgtccagcagcagcaggccgtcggtgaaggaatcgtagctctgccggtccagcacatgcatctgtacgccgtggcacagaacgccctgatgcttgctgaaggtggggcagaaggacgtgcggcggaagtgaacgcccggcaggcccagcccgttcattttcttttccagcagggcgccgttgatgaagggcgcgccgatgacctcaaagggcagggtggtgccccggccctcgctcaggttggtgccctcgaacacgcaggtgccgatgtagcacagggcggcgttcagcgtggtgcagttgggagacggagccacccacggcaggtcggtgtcgtccagatacatgccccgctcccagccttccagcgggatcacggtcaggtcaagggtcagcttctgataatcccggatgtagcgggcggcctcgccgatggtcaggccgtattgcgtgggcagctcataatcgcccacgaaggacttgaaggccgggttcaggatggtgccgccggtcttcacgccgccgatggggttgagccggtccagcaccaccatggatttgcccgcccggttgcaggcctccatggcgtagcccaaagagtacaggtaggtgtagaagcgcgcgcccacgtcctgaatatcaaagaccagcacgtcaaaggcgtccagcatttcgtccgtaaagtgcgaggtttcgccgaaggcggtgaaaacggtcacgccggtttcgggatccacgcaggtctccaccttgccgcccgcctgcacatcgccccggatgccgtgctccacggcgtacatggcggtcagatgatagcgctcgttgaggatatcgatggtgcttttcagctcccggttcatgccggtggggttggtcatcaggccgacacggcggccgcggagctgctcgtccgccagctgaagacggtcaatgccgctcagaatggtagcctttttcatccagaaaacctccttgaagtgtgttggtttcgtgccgtcgttctgtatccagttatccaaaaaacgttttatcagccccttcatcatacggagatgaaagaaaaatgtcaagtagatatgttacttcctgacaaaacaattcttttcacatcgagccagaaggattgacaacgccttgctttcacgctatcatggtgacaaaacaactgaatggaggccccctctatgtatcactcccgactacacgcgaccaacggggtcgtgtcactggcgctggacgcggtcagcggcggctggctggagctggtctgtgaaggcgcgcaggacaactatatcaagaaccatctggcggcggaggaaacgcccttccggctgatattgcatacggaaaacggcccggtggaggcccgccccgcccgctcggcggagatcggcctgaacccggccctgaagcccaccctgcgcatcgatcagggggaaaaagaagccacgatcgtggcggaatatccttccgtgatggcgaagggaatgcccgtgcccgtggccgtccgctgggaagcccggcttctgcccggagacgagcggatccgcctgtccctgacggtggaaaaccacggcggctcggaggtggagcgcgccctgttcccctgcgtcaacggcctgtggctgggcgaaacgtgggaggacgacgcgctgtacatgccccgccacgcgggccagcgggtgatgaacccggtggagaccctgacggccccgccacgcgtcgcccattggaagtggcaggaatacgactacgccaccgccctcaacggcccctgcggcgtaaaggacagccggggcgcgtccgtgtgggagctgccatattccggcgaatgcaccatgctctggctggacgtgttcgacgaaaacgagcaggacggcctgtacctgacctgccgcaacgtctccggccgtatgaagaccctgcgggcggagagcttcggcctggagaaccccggcctgaacgtggccgtggggcattatctgttcctgacggaggggcagacgtggcacagcgaggaatgcatcgtcgcgccccatcggggttcgtggcactgggcggcggacgactaccgcatgtggcgggagtccacccccgtggtggaacccgacggaacctgctacgccgtgcccgtggatgcggagggccacggccccctgcacccggagtggttcgaccgcagccccggcctgatggcccattatgatttccagtaccagaccggcggcgttgtccacacctatcgggatattccccggctgtatgaagaagccagggccttcggcctgaaccacatcctgctcagcggctggaacgagagcggcttcgactacggcttcccccagtaccggcccaaccccaatctgggcacggaggaggagctgcgggacggcgtgcgcgcggtcatcgccgcaggcggccacgtggccttctatgtgaacgcccggctgtgcaacaccgtcttcccagaccgggaagccctgtggaaaaacggcggcatccagaaccgggacggctcgccctggctggagcagtacggctcccgcaatcagtatttcgcctccatgtgcagtcaggccgagctgtggcagagcgagctgctcagcgtgttccactggctgacccatgacatcggcgcggacagcctgtatctggatcagctggccatggctacctcctgcctgtgcttctccgaggcccacggcgatcatcccggcgtgcgggacggctggaacaccggcctgcgccgtctgctgacccggctggctgcggaagccccggaaaagggcgtggccctgctggtggagggcgccaacgacacctacatgcccggcatctgcggcggcctgatcaccaccatgttctacgatcacgccggggccttcccggagctgtaccgttataccttcccccggcaggggctgatcgacatgatgaacccccgccgccattccgggatgcggccggagcacatggcccgccgcgcctgcaagctgctctaccgcgcctttgcggacggcatgtacctctggcattacgatctggtggaggacaactgctatcagccggacgatccccaaacgccccgggttcgaaagaccgacgatctgcgccgggcgtggctgacccgttatggccggggcattttccgagatgcgctgggactgactgccagctgcggcacggtgatggcccgccggtacgagcagccggacggcagcgtattgatcgcctgcgcccgggaaggcgggctggaagggcatgtgaccgttaccctgcccgagggaacgtggcgcgccgtcgtcctgacggaggatgcgcctgagacggaagcccccctgcccctgagcgccgccggggaggggcacacctttgccctgcccgccacggaactggccgtggtggtgctgcgccgggaataaaaatcagacacggaatcctccgtgaacaaaatttcatcaaaacaggcttcgtgcccaaaattctgacacatgagccgccgtgacgaaaatttcatcacggcggcttttgtgtttattgttttctttttgggaaaagactatcctacaatcaccgcaagggaagcggggcgacgaaagctccctcccggcggaagatgaatatttcctgaaccaacccggtcaaaatgaggaggatttcagcatgtattattccagcggcaattacgaagcctttgcccgtccccgcaagcccgaaggcgtggatcaaaagtccgcctatatcgtgggcagcggccttgcggccctgacggcggcctgctatctggtccgcgacggccagatgaagggcgaccacatccacgttctggaaaaaggccccaccgccggcggcgcgtgcgacggctggaagtttgaaaatatcggctacgtgatgcgcggcggtcgtgaaatggacaaccatttcgaagtcatgtgggatctgttccactccattccctccattgagacggaaggcgtcagcgtgctggacgagtactactggctcaacaaggccgaccccaactattccctgtgccgggccacggtgaaccgtggcgaagatgcccataccgacggcaagttcgacatctccgacaagggcgccatggagatcatgaagctgttcttcacccccaacgaggatctgcaggacaagaagatcaccgatttcttcgatgacgaggtgctgaactccaacttctggctgtactggcgcaccatgttcgcctttgagaactggcacagcgcgctggagatgaagctgtatatccagcgctatatccaccacatcggcggcctgcccgacttcaccgccctgcgcttcaccaagtacaaccagtatgagtccatgatcctgcccatggtgaagtatctggagagccacaacgtccggttccattacggcgtgcaggtcaccaacgtggagttcgactgctccgatcccgcccacaagctggccaagcgcatcgatgtcatcgagaacaacgagcccggcgccatcgacctgacggagaacgatctggtgttcatcaccaacggcggctgcgtggagaactcctccatgggcagccagaacgagcccgcagcctacaacacggagctcaagcccggcggcggctgggatatgtggcgcaagattgccgcgcaggatccttccttcggccatccggacaagttctgcagcgaccccgagcagaccaactggatgagcgccaccgtggaaacgctggatcagcgcatcatcccctacatcaagaacatctgcaagcgcgatcccttcaccggcaaggtcgtcaccggcggcatcgtcaccgtgaaggactctggctggctcatgagctggaccatcaaccgccagcctcagttccgggagcagcccaaggatcactgtctggtgtgggtgtacagcctgttcaccgataagcccggcgactatgtcaaaaagcccatgcgggaatgcaccggtaaggagatctgcatggagtggctgtaccacatcggcgtgccggaggatgaaatcgaggacatggccgagcacagcgccaacaccgtgcccgtcatgatgccctacatcgacgcattcttcatgccccgtgcctacggcgaccgcccgaaggtggtgccggacggcgctgtgaacttcgccttcctgggccagtttgccgaaacgccccgcgacaccatcttcaccaccgagtactccatgcgcaccggtatggaagccgtctacaccctgctgaatgtggatcggggcgtgcccgaggtctggggcagcgtctacgacgtgcgcgacctgctcaacgccaccgtgaagctccgggacggcaagaaggtcacggacatggacgcgggcctcttggaaaagctggccttcaaggctcttatgggcaagatcagcggcaccgacatcgaaaagcttctcaaggagcacaacgtcatctaagcagggcagggggtgaccccctgcaccccggactgcgcgctatgcgcgcaggggcgtagggcgacatgcagcttggccggggttttaccgccgctcggcaacggtcctcgcggctcgctggtctggtgtagctacgtgccagttggataggaaagaccgccattcggcgacaggcctcatggctcgaaacaaaggccagcgtggattggatttcacgctggccttttgccttgcgaaaaaatcaggccgcaccgttacatcccaccctgcaggggttgagtatgtcccccgctaactgcgccggggcagggcggcgataggcagcggagggaaaaaggcccgcccattttgacggcggaaaaaggcgagcacgagcgcgctccgcccctgtgtgatagctatccagctccattgcgcgcgacattgcgagccccgccgtcaaaatgggcaataggagcctttttcccggagtcgccgtgccgcatgctttctttggtactttctttcgcgtcgaaagaaagtacgatcccccgtcggggcggcagccccatcacccgcgccatagttggcgcgtcagaccccaccggcagaaggcctgcacctgcgggcgcaccaaagggctttccgcttgccctttggaaaccttcgggccccgaatgtgggcaaaacttccccataggataacggcggccatgctcccgcgccgccgtcggcgcggcaggccgtttctccctattcctcgtttttttcgcttctcttcttccacgccagccagtccttgtccagcacggtgacatggggccgggtcatgatcgtgtcgcatggaaaatgctggcactggccgcagaagtccagccctcgctccttcacgcaatcccgggtaaagcagtctcccgtaacatgggcttcctcgcagccggggcagccgcctttcaagtacgtgggacaggcgccgcagtaaaaaccgcatctgccgagtaaactttcatccatcctcgcattctcctccataaagacccacaaacgtttagatcacatactccggcgcagtcggccccgtcatcaggtccgccagcgtgattccgtcaaaaaacgcgttcgtccgtcgggcgtattcctgccacatgggcagcgtacggcaggaagccgcccggggacagggcgcggccccgcagctcaggcagctcaccggggccagatcgccctccgtcagacgaagcacgtcccccacacggatctcctcggcgggacggcccagacgatagccgccgcccttcccggactggccttccagcaggtgctcccgggtcagcaggggcacgatgcgctccagatatttcagggaaatttcctgccggttggcgacctccttcatgggcagataggagccgccgccgtgctcggccagatcgaccagaactctcagggcataccgcccgcgggtggaaatcatacgaaaacctcgctttgttcattgggacagaaaaaaggcggccccggctttgaagctgccgggactgtgccgctttgggaaaacttagtccgcaaacatcggcgtggaaagatagcggtcgccggtatcgggcagaaggacgacgatatttttacctgcgttctccgggcgtttggccagctggatcgccgcccagaccgccgcaccggaggaaatgcccaccagcacgccttcgctgcggccgatcatgcggccggtggcaaaagcgtcctcgttggagacagggatgatctcgtcataaaccttggtgtccagcacttccggcacgaagcccgcgccaatgccctgaatcttgtgcgcgcccgctacgccggtggacagcaccgcagaggtggcaggctccacggccacgaccttcacgttaggcagcttggatttcaggtactggcccacgccggtgatagtgccgccggtgcctacgcccgctacgaagatgtccaccttgccgtcggtgtcctcataaatttccgggccggtggtctcgaaatgcgccttggggttggccgcgttcacaaactggccgggcacaaagctgttggggatttcatgggaaagctcttccgccttggcaatggcgcccttcatgcccttggcgccctcggtgagcaccagctccgcgccgtaggcct

SEQ ID NO: 4391 - DNA, 8762 bp, Unknown
  16S sequences of unknown bacteria
gcccgaagggctgaagtgccgagcacacgaagtgcgcaggcacggaacaccgcgcaagcgaagcgcagggcggtgcgaaacagaaaaatacattcccgccccgattgctggccgtcgaagcccgcgaagcggtgcgtagacaagcaatcgggaaatctcgcccgcaaaccgcaggtttgtgggtgatcagagcgccatcgcttgcggcaacggcgctccatctcgtttgcttatctttccggcgggtttccagaagaagcattgagcctctcccccacagctccgcctggatgaatgatggcaaactgttcgttcttatagccggttttcaaaatcaacgccgcttgcagcgcatcgaacaacgtgttgagcaccgcaaagctcgtcgttccctggctgttgtacaaatcggtttcccgcgttacccgcataggcagcacgagatccgccttctgtgccataagcgaggacaggttttccgtcaccacaatggtaaaaaccgatttttggcggcatatatccataatgggcaacagttcctgcgtctttccgccccgggacgccaagagcatcacgtcgcccgcttgcaaaaatcccgtcgctccatgtacggcttccgctggcgaaatgaaacgcgctggccgctcgatgcagcacatcaaatgcgcaaagtgctggcaggcaattcccgaatgtccacagccagaagcgccgatgcgcgcggcgcgggcgagcacatccaccgcacgcaagaaatccgccgcggacagggcttcgctggcggcttccagcgcctgcgcttcaagggaaaacgcttgtttgcccgcttcccagatggcctcgttgcaggtatccatattaaatcctatccttaagttgcaaatcgaattgctgcatatactgcttttcctcatccgtatatttgcgcagcgtattgatcacttcgccattcttccacttgcggtcgcccacgtcgtccgtggttcccataacggtaacgtttagctgacgcctgcgcgcgcgcacatgatcccagtcgatcaaataaatgtgggcgaattctcccgtatccagcacgccgtccttaatggtgatggtttcgctgcggccaaagaatacgctgcgcagatgtccgtctgtattcatgctcgtataatcgcccggctcgttcacatgccgcccatattgcgcatggatggggccaggatggcgatattgatgttcctccataaaatccggaatcatcttgcgcataatgtccagcaaatcatgctgcaaatactccaaatcaaaggaatcgatgtcatgcgagcactcctgaatcatcacggaacaggtcgtatggtgggaagccacgcaagccgttccattgatcacaccagagtccttcacgatttggttgatctcccgcgtcacatcatgaaacgtgggaatccagccgcgcgattgcaattccaattccttttgatacactttgaattccatttttgtttcctccacattctctaatattttgtttgccccatcttgtcagccgcgctttgccatgcgatcctcatacgcctgccggcaggccagcaacatatccttcagcatttttcctggctgttccgccttgcaaatggcgctggaagaacccgtggcgtcggctccagcaaaaatggttctatacacgtcgtccggcgaggaaatgcccgcgccctgaagcacctgaatctccggattcaccgcttttaccgcctctgtggaggcgcgcaccaaagcttcgtcgctcgtcacgcccgtgccgatcaattccgtgggttccaccacgagaatgtccggcgccaacatcgccagcatcgccgcttctttgcacgaatccgcgcaaaccacgctcagcagcccgacttcccgcgcccgctccaccgaacgcaccagcgcgttcagcgtcatcggtctttccgcgtggttcagcatcgcgcaatccgcgccagcgtccttaagcgcttccgccaatatgctgccctgtcccttgcccggctcgatgggatccatgtgctgtgcgcacaaatatagcccatgcacattttccgcgatcaaccgcaaatccgtaagctgcggcgtatagatcacggaaacgcccgtctcctgcgaagcgcgcaaagcgtcccgcgccaaggcaagcgcttccttgccatagagatatgccttggggcccacctcaaaaaagggcggggcgatctttttttgcaaattgtgcaatctctttccctcctcgcttgcccatcctatttggcatccatttcccgagcgtttttgcggaacatctgctgcagcgcgccatacagcgcgatatagcgccggtatgtttcatccgccattgggcgcagcgagaaatccggaacgaataccgcttccttttctctatcctccgctacccaatccacgcctgcgaaaattcccgcgccaacccctgcgagaatcgccgcgcccaggcaagcgctttcccgcgcgcgcaccggctgcatttcgcgctgcgcaatatcggctttgatttgcagccataccctgctattggcgccgccgcccaggcaatatatccgccgcgcgtctatgggcaagctttccagattccggcgcaacatgcacgcgaccgcttccattatggcgcgcgcaaaatgcgcgcggccatgttccagcgtgatgccagaaaaaacgcctctggcatacgcgtcatattccgggtgcgcagcccccgtaaggtgtggcagcatcgtcagcccagcgcagcccagcggaatccgctctgcttccgcgtccatccgctggaaggcagcctccagttctggcacatccggataaaactttgcggcaaaccattttagcgtcatccccgcggattgcgaccacaacagcaccgtataccgcccagcgaccgcatggttctggcaggtaatgggcagatccggatcgtaaggaataaaaccatccatcaccgcgctaaccgccaggcaagaacccgtcgtctcgcaaacgacgcccggtcgcgtcatgccgcaaccaatggcgttgcacgtttgatccagcgcgcccattgcaacgagcaccgatggcggcaatcccgtttcacgcgccgcccgcgccgtaacgcatcccaccgccgagccgcagggcaggatttcaggcaacctttgcgcgtccaggccgagcgtttccaacatttccggccaccaacgcgcggtgtgaatgtccaacatagcggacgacgcccacaagttgggttcgccaacgtatctccccgtgaggcgatacagcaaatagtcttccagcagcaggaatttgtgcgtgcgcgcaaattcctgtgggcggtttttccgcagccaaaggatttttgccgcgggccatgtggccgtcatatccgcctggccggtcttttcatataccgcctggcggccaaaccgctctctcagttggtcagcctccaagaaggcgcggttatccaaccacacgattccattgccctgcggctgcccggcggagtccaagcaaaacaaggtttccccctgactgctgatggcgagggcggcgatctgctccgcgcatatgccggcctgggccagcaacgcttgaatcagttcgcaaaaaatgcgccaatactcctccgcgggaaattccacaatgttttcgctgggcgtcaaaagcgtataatcccgctgctcaacgcaaatcaaacgcttatcttcgttaaagagcgccgccttaaaagccgtcgttccagcgtctacccccaataggtatttcatgcgccaccttcctcactgccggtcagtataccaccgcaatgtccaataggccgcacagttctttgagcgcctgcacctcgttcccgtagcacacaattacgtgctggctggatacccgctgcgcaaactccggcaccgtgcaggaatcggggaagacttccagacttggcagttgcggcgcaggaggcgcccaaccatattcttcccacttaggcggctgcttggcttctccagtgtagatatgcatataataccggccctttttgtaatacagccgcgcgcaggtgacatagcccgttttcaccttgctgacattgagcaaagaagcgtccagcaggccaaaagccgtgggcagcaattccacatttccctcaatcgccggaatggggatataatccggaacgccgatgagcatgctctctttgaaatactcatagtattccatataatgcgccacttgcccggtcaaatagcgcaccattagctgcgttacattgcccatcacatcgttttccggcgtggtgcaaaccccgcaaaagcgctccagcagcataaatacaatcgcaggcggaaagcccaagagcttcttcataccgtcgacatcgatgagcgtaatcgcgtcatacccgcgctcccgcacccgtttcgcaagggccaaagcatagcgcgctcctttttccagcacagaatccgcacacggcttaagaatcgtccattggctgcgcatatcgctcaccacttgcgcaacttcctgggcagaaagcgcttccgcttcccgcaccatttccagcatttcaaatggctccacttccacgcccagttgcccgcgcatggaattgccctcatattgcgtgccatacagcagcatatcgcggtagcccatcgttcccacacgagcatggcgcaaccgctttgccgcaaaagccgcacgaatgtaggtgtcaatcgcctccagaggttccggctcatcgatcacgttatacacatatttaaaggtatagtccatcgcttccaacgcgggacgaagcgcagacgtaccggcctgctcggccgtggtcacaattctatcgccctcgcgccagccgcaaaggccccacagcaccatggggagcgagcggaattcgtctgccacgcggatcaccgcatgcgtaggaacccaacccgccacgcacagaatcagcgaatcaaactgctcggctttcaataaggcaatcgccttgtccgccgtctcataagcggggtcatcgatcacaatcccgccatccacaaaatttgccgcaagcgttcgcaaggatttgagcgccgcgtcgtgcttgatttgcaagcgctcaaatggcgtgttcacctctccaaaacacacaaaacctacgtttcccatttgccgcgtacccatttctgcctgtggatgcaaattgcaattttcggccattctcgtttctccatcctttcctcagtcatccacgcctcacaaaatatatttcgaaactacacgagtcgtatcatgccattactataccatattcccgcgccaatgtcaaccacgcattctccatttgaccgcacagcgcagcctcgaaaatcgcttataaatttttataaatttttattttattctattcaaatataaattttatagatattttataccaattatcgcgtcgcgatataggtttaatatcacttatctcccccgccgatctggacatttcacagcaaacgccccacaaaattctccaactttttgtgccgataatttcgaaattcagtgaaagcgcattgacatttccttcgcgtgctgctaaaattgtagctgtgatttcccgcaaacgtctttgcatcaaaaaggagaggcaatcgcaatgaacgatatttctatcgatttttcgaaaaatgtcggaaccattcgcccgttacacggtgtaaacaacgggccgcttacctatggatttgtgctaaacacatcgcagtacttcaaggaggccggtattccatattcccgcctccacgatacggaatatccctatggaagcggccattttgtggatgttccttgcattttcaaggatttcgaccgagatcctgccgatccctccagctacgatttcgcgctaaccgatctatacatccaagccatttgcgattgtggcacgcaagttttctatcgcctgggcgtatcaattgagcacgcgcccttgaaaagaaacgtctatgcgcccaaagacgcgcaaaaatgggcgcgcatctgcgagggaatcattcgccactacaacgagggctgggcgaatggcttccactataacatccaatattgggaaatttggaacgagcccgaaggcgaaggcacctggcgcaaagccatgtgggtgggcagcaacgaagaatacttcaatctatatgccaccacggccaagcacctgaaaagctgcttcccctatatcaaagtgggcggctacgccagttgcggattttatggagcattctgccaaaatcccacgccggaccaacgcaagtttctggaatttgccgacgatttttttgcttatatcacgtctccgcaaattcaagcgcccctggatttcttttcctggcacatctattccggggatttgtacctgtacgaatcgtttgcccggtacgcccgcgggctgctgcaaaaatatcatctggaaagcgcaatgagcattctggatgagtggaactacagtggggacaacatgatgtataccatggccaccgaagttggcgccgcgctcgcctccggcgcgctgtgcgtaatgcaacacaatgaagtcgacctcgcccactactatgacgcgcaacccgccatgtgctattgcggcatttttacgcacgaaaccgcgcagcccaccaaaacattttacgccctaaaagcctggaacgcgctataccaattgcgaaatgaagtgtattccgcctcgaattgcccagatgtgcgcgtatgcgccgccagcgatggaacaagtggcggcatcctgctttccagctattgcgcggaagatcccgcggtgcgcatccacgtttccggcttggccaacccacacggaatccaagccacggtctattgcatcgatcgcgaaaacacctttgaaatcgtctcggctgagacattccacggcgacgcattcaccatacaacgcaaaaaagaccgctatacaacgctatatatcgatcttaggcaaatgcaaaaataggaggagattcaatatgccggatatcaaaatcggttgggcccaaaccagcatcacgcccgatcgccccgtcttccacagcggccagatctatccccgcgtttcccaatatgtacacgacccggtaaccgccaccgccctagcgctggaatccggcgatagccaggccattcttctctccatggacatcacgagcgttccagggaagccccttatggatcgggttcgcaaacaactggcagccgaactggcgggctttgatccgcaaaatctaagcgcatttgccacgcatacgcacacttctgtgagcagagcaccctacattttcgatgaaagcgcgctcgccgtgttgggcaaggagcgcatcgctctgcccgacttgccggaaaacctacttcaaggcgaagaatttgacgattttttggtcaaccggctggtgcaagtggcggcagaagcctggaatcgccgggaacgcggcggcatcagttccgcaacggattatgcggcaatcgccttcaaccgccgccccgtttttgagcgcgatggcaagagcgaaacccgcatgtatggcgtgtgcgcccggagcgatttcaagcgctacgaagcgggatcggatcatagcgcggatatgctgtatacctggtcgccagatggccgcctgaccggcgtcgccgtgtgcattccctgcccttcgcaggtgtttgaattgcactcgtttatttctgcggattactggcactacacccggcaagcgttgcgagaaacgctgggaaatgtgttcgttttgccgctatgcggagccgctggcgatcaaaatcccctcgacctcacgcgcatcagcaaatacaacgcccgcgagttggaagcctggggcgcgcaggccggcgaagtgtggcgcaacatcgatatggcggaagaatgccaggatattgccagccgcattgccgacgctgtaaagcgcggcttgcgcaaagcgcgcaaccacatcgatacccagcccattttccggcacgacgcggacgtgctctccttgcccatccgcaaggtctctcagcaagaatacgagcaggccctagcggtggtggaacaggcaaaggcgcgtttttccgcgcagaatcccatgaaagggagcgatttggtggccatttttgagcccatgggcgtcattggccgctggcatctacagaataaaacagaaacagcgcccactcccctccacgcgttgcgcattggcggcatggcgctggtaacttgcccctttgaactgtttgtggaatactctctgcgcatcaaggcgcgcgctgtttcccggcaaacggtggtggctcaactcaccgacagcagcttaggctatcttcccacccaggctgccattgaaggcggatcgtattccagcgcgcccgcttccaccttgtgcggcgcggcgagcggcgatcttctcgtcgaagtgctgttgcaaaaaatcgctgatctgtgggcataaattcccatttcagcgtgtcaaaaaagtctttttgacacgctggtggacgggagagcaagcgccccacaattcgcaatggtcgtcctgcatcttcgcaccgtgccgtcttcggcggcccggtgtttcgcctctgcggacttcgcttcgctctgtgtcctcgaggcttcagccgcttcgcggcctccgatgaaagcagaactcccttgcttattgggcttactacggcctgcttccgccacaggcggcggccttcgtgcgcccccctccagtttccgctaaaatcct

SEQ ID NO: 4392 - DNA, 22176 bp, Unknown
  16S sequences of unknown bacteria
ccgtcccgtttcgtcagacgctatatattgtggaattttagtccaaaggcttcatcgtggggaagagcagcacatcccggatgctggcggaatcggtgagcagcatcaccagccggtccaggccgaagcccagtccgccagtgggagccagaccatattccagagcgttgatgtaatcgtagtccacctggctggtgtccttgggattggctgccttccgcagggccacctgcttttcaaagcgctccttctgatcgatgggatcgttcagctcgctgaatgcattgccgaattccatggcattgataaaatactcaaagcgttcggtgaaggccggctcgtccttcttccgcttggccagggggctgttttccacaggatagtcatagataaaggtgggctggatcagcttctcttccacaaaggcgtcgaacagctccaccagcacagcgcccttggtggcgttggcaggcaccagcacattcttctcctttgcggccttccgggcgtcctcatcggtctcccaggtgtagtagtcgcagccggaatacttcttcaccgcttccaccatggtcagccgctcccaatggctcatgtcaatggtctgacccatgtaggggatggtcaggctgccgcagacagtcttggccaggtgcttatacagatcttccaccaggtccatcatgcccttgtaatcggtgaaggcctggtacagctcgatgctggtgaattccgggttgtgctttgtgtccatgccttcgttgcggaagatacggcccacttcatacacccggtcaaacccgcccacgatgagccgcttgagggccagctcggtttcgatgcgcaggtacatatccatatccagtgtgttgtgatgggtgacgaaaggacgggcggaagcgccgatctccagaggcagcagaatgggggtatccacctccaggaagccctggccgtccaggtaagcgcggatctcccgcagaatctggctgcgcttgatgaaggtgtccttcacctcgggattgacgatgagatccacataccgctggcggtagcgcaggtcggtatccttcaggccatgccacttttccggcagaggacgcaggctcttggacagcagctggatcttctccaccttgatgctgatctcgcccattttggtgcggaaaatttcaccttccacgcctaccacatcgccgatgtcaaactttttgaaggcggcatattcttcttcgcccacattgtcccgacggacatagagctggatatctccggtggaatcccgcagatcagcaaagctggcttttcccatcagccgcttgctcatcaaacggccgcccagacggacgaccttgccggtctcctcctcattggcgatgccggcaaactcttccttgatgtgggcggcgtaatggtccacagggtacttggtgatggcaaaggggttcttgtcctcctgctgcaaagcggccagcttgtcccggcggatgcgcagcagttcccccatttcctgctgagcggcctgctctgccgccacagcgctcttttcttccttcataatcttcctccatatcaaaagacagccgcagctattgccgctgcagccgttttttcttcctttttaccgatcgatggccacgatccgataggtgatggcgccgtcgggagcttccactaccacggtatcgcctacaccgtgaccataaagagccttgcccagcggggactcatcggagatgcggccctggacagggttggcctcctgggagcccacgatggcatattcctcaggctcatcctcaaagccttcttccaccacggtgacccgggtacccatgctcacatgctgggtggtgatggagtcctcgttgatgatcaccgcgccggcgatcacattctccagctcggcgatgcgggaatacagcttgccctgttcgtttttggcctcgtcgtattcactgttctccgaaaggtcgccgaaagaacgggcttccttgatctgctcggccacttctttctcccggacggtcttcaaatattccagctcatctttgatctctttgagcctttcttcggtcagcataaattgcttttgcatagtttcctcccctttgcccctggaaatgggcatagatattcaggataatacttcacattatatggtgctcgttcccatgtgtcaagcgtggttttccccaggatgggggaaagaggcctgggtttctccctcctggctgccttctgctcccagatcttccggacggcacaggccgctttccagcagcatggcggcatacaaagtatcccccatccgaggcggtttttgttccctggcccactggggggatacaaaccgcagccccggccagccgccgggggccagcatcagcagatcctcccctgtctcccctttctctcccggctggggaaaacggatgcgcaggcaggggtattccggcggtgcactttgctggggggcaatgccgaactgttcatacagcgcctcctccagctcctgctgtcccactttgacgctcaccgacagataccgcacctttccccccagaattctggcgcagcgcaccacatcccggtcacaccgggcggcctccaggcggcagaaggcctgctccaaaggaatcccccggctgtgaagggcccacagtgccccctgtccggccccctgtcgccaggccgtcccttcttccaccgtcagcatccccatttccagcgccttgtcccgccacttctcccctgtggccaggcggtgaaccccccttttcttcatctgctccatggcccattccacccgtttttccactttccgctctcccatgccggagggcaccggcaagcgaaccgtcaggaaagaagccctccccaccggccgcagctctgtctccaggtgttttttccaaaaaaggccccgcttcttttcttcctccaccgtttcaaaatatgcaatcatatccggcaccctccccttttttcattatatttatgttccgggaaggaccgctatgtccggcgcagcaaaacgggcggccttttatagccgcccgtttttattacttcatttaattttcgctcatctgctgccgcagcacttccagagctttttgcagctggtcgtcctcttccggctggagagtatagaaccggttgagcttgtcctcgctgagggaggactccacatccggtgtgatgcccacaccggccaggctgacacccttggcggtgtaataccggctggtggacagattgagagctccgccaccggtgagggggatcatggtctgggcatagcctttgcccagggtatgctcgcccaccacagtggccgcgccatattcctgcaagctggcggcaaagaactccgcagcgctgatggaatattcattgcacagcacagccatgggcagcttgacgcactcttcatcggaagaataggtggtgctctctccggccttgtcggtgatgctgatgacagtgcccttgggcagaagctcatccagcatattcaccagcacatccacaaatccgccgggattgaaacgcacatcaaacaccagagcctgggctccgtcgtccagcagctgctggagcttctgggaaaactcctggtccacattcttggagaaggactcgatgcgtatcagaccgatgtttccttccagcatctgggctttgaccccgggggtctgcacctcttcccgctggagggtgtatttctgctgcaccccttcccgcaaaatggtgagggtgacttcgctgcccggctctcctttgacccggtcgctcagatcgtcaaaggacatttcagcagcgctctccccatccacggccaccaacagatccagaggctggataccggccttctgtgcaggggaatcctcggtgacagcagtgattacataataactgccgtcggtagcggtagaaatggtgatgcccacgccggcatacactccttcccgcttttccatcaccgctttgtattcttcttcggtgaggtaggaggaccactgatccccagtgccctggatataacccttcagggcctgatccatcatatcctgtttgtcatattctcccacaaaatatttatctaccagctgggagacctctttcagctgctggtattccccttccatctcctcaaagttgcccaagcgggcgttataatactccgaagccacataaaaggtgatattgaaggtggtcaccaccgccagcatcagcagcatcagggtggaacccagggtaaatcttttcttcatgaacagggcttctccttgcgatgatttgttgcttaatacagacccagaatccggccggcatcctggtaactgccattctgacgcacctcaaagtgcagatggttgccggtggaataaccggtggaacccaccttgccgatctgctgaccggcgctgacagtggcccccttggtggtgaggattttgctcatatgggcataaagggtggtaatgccgccaccatggttgataaccacataattgccccaggcgctgctgtatccggcgatgatgacagtgcccggctttgcagcgtaaatgggtgtgccgttgggggcggagatatccacaccggtgtgaagcttatattgcccggtcaccggatggttccggtaggcgaatttgctggtgaccctgcgatagcccgagggcaggggatgggtgtagccgcccacctgagtggtgccggaggaagtggaaccgccgccctgggccgcctgttcctggcgcttccgctcggcttccgcttccatctccttgacgatcttatcgatctgggcgttgatggaattctcttccgcttcgatttccgcaaaggaggccttcacttcttctgcagcgctctccagctccttcatggcctgggaacgattggccagctgagtatccagctcgctcttggacacttccagctctttgcgggcattttccgcctgctgacggtcctcttccagttcggccttggtctgggcgatctcctctttcagagccttcagctcttcaaagagatttttatcgtattcggcgatctggctgacaatttcatatttggacaggaaatccgaaaggtcatcggcagagagcagcacttccagatagctggtctctccctgttcatacatcacccgcacacgagtcttgaacttttcgtactgttcttcttccttcttctgagcctcggccagctcttcttctttctgagcgatcatctcttccagactgtcgatcaggtcgttttgcagttcgatctgctcttccgtgctgttgatctgggcgtccagcgcttcgatctgctctttcacggtggctttttcactgtcgatactgttcagttcgttctgcagttttttcttttccgccgcctgatccttcagcttgtctttcaacgcatccacatcgctctgggatgccgccgaagcgctgacacggaaaaacagatcggccacaaggccgaagagcatcagcccggccagaagtccggcaatggcaccggccaccacccgggtgattgtttttttcttggctcgtttcatcttcctatccttcctttctggtccgttacactttcaggaacttgcggatggtgagcacgctgcccccagaacccagcaccagccccgccgccagcatcagcagcagcaaaggcagggcaaactggggaaatgccaccatttccatcaggccggtgctgcccaccacgccttccgcgatatagtcatagatcagccattccaaaccaaaggccaccagggctgcgatctctcccagcaccagaccttccacaataaagggggagcggataaagtggttggtggcgcccaccatacgcatgatggcgatctcctcccgccgggcaaacatggccagcttgacggtgttggaaatgatgaagatggacaccgctcccagcatggcaatcagcgtatagctgatggcgttgaccacgctgcgcatctttaccagtttatcggaaaattcctttttgctggtggtgctggcgatgccgtcgatcttttccagggcatccaccgtctcctggtggagggacacatccttcatgacgatccggtaaccatcccgcaggggattgtcgttttccagaccttccaatatgtaggcgtcgtctcccatctgctccttataatcctccagggattcttccttggggataaattccaccgtctccacattgtccacttgtttgatttcctcttccagggcctgagcctggggacgggtgtaggtctcatccacccacagcatgatttcgctctgggtctccagatcggccacctggattcccaggttgtaggccaccaggctgaagctggaggtgatgagcaggcaggcggcaatgactgtgatggccgccaccgacatcagccgatgggaaaagaaattgctgatgccttctttcagataatatctcagattaaaacgcttcatcaatttaatacccgcttttctccaaatcgtcgtaataaccgccggtgtggtcccccactacctggcccctgtcaatgctgatgacccgcttgccaaactgattgaccaactctttttcgtgggtaaccaccagcacagtggtacccagggcgttgatcttgcccaggagggtcataagctccagagaacgggccgggtccaggttgcccgtgggctcgtcggcgatgataacactggggttattcaccaacgcccgggcgatggccactctctgctgctcaccgccggacagctcatcgggatggcgccgggccttgtggagcacgcccaccaggtccagcacatagggcacccgctttttgatgatccggggaggtgtgcccacggcccgcatcacaaaagccacattttcaaacactgtttttttatcgatcaggcgaaaatcctgaaaaaccacgcccaccgtccggcgcatatagggcagctgccggttcttgatggtggtcaggtcgaaatcgtttacatacaccttgccgctggtgggacggatctccccgatgagcagcttcatcatggtggatttgcccgagcccgaagggcccacaataaaggcgaattccccgtctgctatctccagattcacaccgttcagggctttggtgccgttgtcataggtcttgtaagcatccactaacttaatcatggtccggcctccgcctcccttctttcttttttgccccttttgggcagcataaggacaagggccgtctcgtccccctccccctcagaggggaagggggacaaagcggtccctgtgatttttttacgccatggtctcccgggagcggaggtactgcttgaccatcagagccactttgagcacgatggcgttgtcaaactcccgcagatccagcccggtgagcttcttgatcttttccagccggtaaaccagggtattccggtggacaaacagcttccgggaggtttcggagacattcagattgttttcaaagaacttctggatggtgaagagagtctcctcatccagagagtcgatggagccttttttaaagacttcggacaagaacatttcgcacaaggtggtggggagctggtagatcagacggccgatgcccaggttttcaaagttcatcaccgtcttgtcctcgttgaacacatggcccacatccacggcgatctgagcttccttgaaggagcgggcaatgtctttcagctggcccaccaccgagccgatgccgatcacatggggaatgcccacctcttcgtccagagccttgtccatctgttcggcaatgcgggagacctcccgggcatcgccgtttttcagctctttgatcaaagcgatttcgctttcactgatggtgatgacgaaatccttctgccggtcggggaagagcttgaccaaggcctccatgacggcggcgtcctgccggtcctccatgcgcacgctgtaagccacccgcttgcagtcgctgacgaaatgcatctcccgggatttgatatagatatccccggggaggatgttgtccaaaatgatctttttgataaaggtcaccttgtcatgcttttcatcgtactgggtcttgctgttcttgatggccaccgcagtgagggcgcacaccaaagtggcccgctctccgatgctgccggcaaaaacagcgttttcggccccggcttcatacccgccgatcatatggaaagtatagccgccggcctggccttcttccaggcccattttgaaaaattccacggcggcttcgatgctttcgccgataaatttcagttcagtgcaggcggtgatcacaccggtgttgtccaccactccgaggataaaatccacattgtccttcacttccagcaagatgctctgaaacaagcgtgctgccatcaaaaccaccctttgtctaatttcaataaattgcgagaaagcactatgtctattttaatgtatttttctatgaatttcaacaattatttgcaaaatattttatagaacttttctccagctgctttccttccgtcatttggaagggaaaagacgggcaaaaaaggggaagcgggccatggcccgctcccattttcacggattggaagagctatcctgggcgtccgataccgggcgcagcccgtgcataaaaccgtccagagcggcggaatacaccgatccgcccaccaccttctcccctttcagaagcacatcggccatggcctccggctcgccggggtagtttgtcaggcgataggtgtacaaagtgagattcttccccttatagggagaaagatcgaagccgcattccttttgcaggttgttgtattcctcatagaccgagtcaaactccttgggcagggtgatgtcctcctggcgcaccggctccttttccagctcgtaccccagggactggagatagttccccgccccctccagacttcccatactggaaacaggagctccctcctccttgtggggccacagcaaaatcaccgctcccaccaggacaaaggccccgatcaccagggcgagcagcttctttttgttcagcttggtggtgaaaatcagcataaagcacctccatgtgttcctcattgtgctttatgcctatgcccctgtccagcttcttatgcctgatccatggaaaagcgccccggcgtacttccgaggcgctcagactgtcgaaaaaccttgttatgcttgttatgtaagagggcttttcgctctgcccttcatccatccgcaaaaagccgcgacctgtgcgtggctttttgcacttctcaaggggaaagtgtgcgccaaaggcgtgcatgtagccccttgcaaaaccccctaaagtggctcaggccactttttcgacatacaaagcgccccggtatatttccgaggcgctgtgcatcaatcttcggttttcccctccggctttccttctccgttttttcgagggcggcgagggggatagcggcggggcggacggctgcggttttcccgattctctccgttttcccggccttcccggttttcacgactattgcggccctcccgcttctctctgttctctctgccctcccggttctcccggttttcacgattttcccggttctctcggttctcccggggacggcgggagggaggacgctggtttttcccccggttttctccccgttcctcctcccccttgggagcaggagcgggctccgccttctgggaaaccggttccggtttggggctggtctcctgcgccttggcggaactctcgccatggtcggccgatttgctttttgaccggcgggcccggatgcgtccggggcgcagcaccgtcagctcatccttgcgataaagccggggcgcttcgttgctgtcctccagccggactttgcagaatccccgcagcaggctgatctcggtgaccacgccctggccgttgggagtctccaccagagaatccaccggcggcgtggtgcgcagcagatcctgataggcctcgttttcatatttcaggcagcacatcagccggccgcagctgccggagatcttggaaggattgagggacaagccctgatccttggccatgttgatggacaccggggcaaaatcgtccaggaaggtggcgcagcacaaggggcagccgcacacacccaatcctcccagcatcttggcttcgtcccgcacgccgatctgccgcagctcgatgcgggtacggaacaccgacgccagatccttcaccaactcccggaaatccacccggccgtcggcggtgaaatagaagaggatcttcccccggtcaaaggtgtattccacctccaccagcttcatttccagctgatgggcccggatcttcttttcgcagatggcgaaggcctctttctccaggcgctggttttcctccaccgtttttttgtcctcttcggtggcggccctgagcacccggcgcaaaggcttgacgatctgatcgtcctccacctcgtggttgggcgtggccacctgaccatactccacccctcgggcggtttccacgatcacatagctgtccttgtccaccttcaggttcaccgggtcaaaatcatatacttttcctacttttttaaaacgaactccgataacttccgtcatatttcctcccttggggcccggcaaagagcagctggccgcaagtggcagccagtcccccgctcatggcggacaccgaagcgttccattggacgcgggccgaaaggccccgcacatattcatacagggacaaaatccagtcttccccgcccttttcccgggccagatgccacaggcccacgcaggcctcatcgcagaaaagggcaaactcttcccgattcaggctccctgcttccacacaggcggtgagcacctgccattctccctggtgcaaagccgcaagaaaacggcgggccacggcgcttcccttgccctcggctccctccagaagctgaagggcccggcccagagatccaccgcagttttccgccgcctggcgtcttgcttccggctctttctccggctggcgcttttccagctcctcttccaccacctgctggggcaaaggctccagagcatagcggacgcaccgggagcgcaccgtttccaaaagttcctcggcctggcggcacagcaggataaacaccgtctccctgggttcttccagcactttgagcaaggcgttctgggcctggggattcattttaccgctgtcgttgagcacaaaaaccttctggctgctttcactggggcggatgaaggacagacggcggatctcccgcacatcgtccaccttgatcagccctccctccggattaaacagccggtagtccggatgggaaccggcctccatgcgcacgcaggggccgcaatggccgcagggcccatcctgttcctggcacatcagggctttggccatagaaaaggcggcggtgcgcttgcccaggccctccgccccctccagaatcacagactgaggaaaatcctctttgaaaaggggagcgagcgcctctttgagacgctcgttccccaacaaatgcgacagacgcataatcgatcagactttcttgaactgttccacatccagcacgaagatggtggcgccgcccacaaccacttccacaggcatggaaggatagaagctgatgccggcttcggcgctgctgggaatgagctgcttgcggctcttggagtatttgccgatgatctccaggcagtgctccagcttgtcgtcctccacgccgatgagcaccgtcacattcccggcccggagaaagccgccggtggtggacagtttggtgatctgataaccttccttcatcaggttatgcatgacggtggaagcatcgtccgaattgaggatcgcaataatcattttcatatgtagccgcctccttggtggtttttattaaaaatattgggggaatccccctttggattgttcttattataccccatctggaaaaaagattcaatggatatttcgtgaacgagcgtcctttttcctcaccggtagacccggggaatggaggggggcacgaacatgggggatacatcgaacaaggcgatttcccccggctggcagtcgatgtcggtcacatccaccgtggtatggttgaggcccacatgccccagcacccgcacccggcgatttcccaccgtcacatagaattttttccgccgcagccatttggccatatctccaagggcatagcgcaggctgtcccggaagcggaaggcgtcccggcccttttccaccatgaatccgtcggaataacccaccggaatgacggcgattttggtgggacgctttgtgacaaaggccgggccatagcccactccatggcctgccgggagccaacggacttcggccacctggctttccagccgtccggtcttctgcagcccggtgtctcccttggcggtggtgcgtccgccgatggccgaaccgatgcgcaccccatccagggagggcaggtcacagcggaacaaggcggcgctgttggcggcgtggagcattcccgggtcaaagcccgcctgacgcaccttggccgccatttccaccaatttgtcatactgggccctggtggccttggggctggcaaaggccgaggggaaatgggtgaacataccggtgacatgaagatttcccataaagcggaacaccgaaagcacccgctccagttccgaaggctcaaagccatagcggcccatgccggtgtcgatctccacatggacatcggccaccatccccgcttcttccgccatgccgttgagcgccacagccgcatcataggagccgatggccgctgtggccgtggaggacagaatcttctcaatatcctccttgacggcggtggagcggagcatgagaatttcctcgtccagaaagcctccgtcccgcagggccacggcatcttccggctcggtgacgccgaagcgcttgactccctggcggcggagcaggtcggccatgggaagcatccccaggccataggcattggccttgagcacagcgatcagcggggccccgccggatttttccccgatgatctccagattgtgtatgatcttttcttcttcgatcacaagccgtttcatctgttatccccttccccaagggctatttgttttcctgtttttcttcctgcttctctgtctctttggctttttcctggggcttgtccttcttggttttccgcacataggcggcatggcgcagggtgcgcaccattttcattccggcgcccacggccagattgaccacaggcttatagatgtattccagctccccgcagaattccaccagctctccgctgaagccctttttgaacaggtacagaccatagagggggttttccggggtgagatctccggagacgccccggaaatcgtaaatatcgcagccttcttccacggcccactggatcatgttccactggagcagatagttgggcatcacattccggtactggttggaggaagcgccgtagagataccagaccttgttgccaaagtggatggccagggtgccggccaccggcttgtcgttatagagggccatatacagccgggcgtcctctcccatctcccgcagcagcttttcaaaatagctctgaggtcttgtgatgaagccgtcccgctggccggtctcttccatgatgtgggcaaagtggggcagcatttccttcacctgctcctcgttgcagcagatgacctccacccctttccgcccggccaggcggatattatagcgggtcttttggtggaaggcggccatcagctcatccagggtcttgcccgccacatccaggcggaacacatagttgggctgcaccccttcaaagttcttgccgctctctttgtgcttgtagcccaggtccttcatgatggagatgaactccttgtcctcgcttttgatgtccggatccatcatgagagaataggcatggtattttttcgccagctctttggccccctgggtcagttcggccaaagtctccttgtcgtggctgtcgcacaccgggccgcggccggcgtacatcagggtatagggtgcggcgggaaccttgcggatgagcaccgccagactgccccggatcttgccttctccatcccggctgacgatggcctcccacttccagctgtccttcagccgtccccatttggaggactggaggaaatggcccttgggatgccctttgataaacccttcgtattcggccagggtagccgttgtcactgtttcgatcattgtatcatccatcctttttctgaaagggcgaaaaaaaccgccccggtgatgccgaatcctacttttttcccaaagggaaaagatatatggattcagtatagcaccccttccaggcgggtgtcaaaatgattcttctttttccgggtttttaaagtgcttcacccttcccctggcgctccctcccggcaaatttcctccagggcccgcagggtctccagatggcaggcctggcatctggccacatcccccagggagatcaccccctgcaaaacaccatcctccaccaccggcagacggcgcacctgcccctgggccatgaactgggcggcctgacgggcgtcggcccccggcgggatggtgagcacatggcgggacatgatctgccccaccgccgtttcctccgggctttctcccagagccacgcagcgcaccgccacatcccggtcggtgaggatgcctttgaccctcccctccccgtcgcacaccggcagggcccccacgccgtgacgctccatcagccgggcggctctggccactgactcctccggccccaccgtcaccgcgccgggactcatcaaatgccaaacctccatggcttcctccttcccccgccctttgccgcctgacctgggcctggattctgattttgagctttggcattagtttcactcccccagggggagattattccttcttttccttcagttccaggttccgtttcaggggtttgatcccccggaaagaaaaggccttctgagcatattttttccggaaaacccggtcagaaagtccttccaaatcctgcttttctatacttttcgtaatattctctgtaaattctgcaatatagctggtttttacccctttgttttccgggcacacctgctggcagatgtcgcagccccatatccgcttgctgcgggcaatcagatcttcctgccagggggacagctctccccggctttgggtaagggcggaaagacaccggctctccatgagctttccctcttccgtcagggccccgccgggacaggaggcccggcacaggccacagccccggcaaggctccggctcctccccccctgtgagaggcaggtcacaggcgatcagacagcagaacacatagcttccccaccggggtgtaatgagcaggccgttttgtccgattttccccagcccactccgggcacaggcatagacctcaggatagggggaaatatccgcatagccccggaatgtatggccgggaaacagctcctccagctgcttgcagctttcttccagataatgccccgccacctggtgatagtcttccccccgggcatacagggacaggttcccctcttcttccccggcgtaatagggcagaacacagcacaaaagggcggaaaggccgggcacctgctccagggcctttttccggttttcctcccccatgcgccggagtaccggctgcgcctcagtgatgccccaacccccgctccagctttccagtatttccttgattttttccacgccgtccatctgcacccctccttgttcctcccctggccctatgataaaatatccctatccaaattgcaatgaaaagggggaaacaccatgatccttcagcttctgggggcctccggggcggggaaaagcaccctggccaaagccctctctcaaaaaaccggcctgccccatctgcaaagtgaccactatctgtggcccgatgagaagtttgacattccccgcccggtggaagagcggcggcggatgcttctcaccgatctccggcggtttccctcctttattctggacggggatgtgacccgctggtttcctgcccctccctttacccccgaccttctggtgctgctgcgctgcccggaaaaggaacggatggagcggctgcgccaaagggaaaccctgcgctatggccagtgggaagacctccggcaccctcaccaccagctgacccaggaatttctggaatgggccgcctgctatgacaccgccggggaggaagaacccaactccctgtgttcccatctgaaaaagatcgcccaggctccctgtcccgcccttattctatggccggaaagtaccgaaacccttcttcggcgggtgctgggagcggccaacctattgtgaaaggagaatggatatgctgtccaaatggaaagagcaaatcaaccagaaaaatctgggccggttttcctcccttgccaatgtggtgctgtttttgtgcatggccgggcttctgccctcgggagaaaaacagttcaccccactcaccatccttgtgtgcatcctcctggggctgtgggccgtctttacccttctgtattttgccctgaaaaaacggtatgccagctttgcattgtttttcctgttcttcgccgcctttttcaccgctccgttgtggttcaagtaacccattccagacaacaatcccccatctctcatggagagatgggggattgagcgtgtcgaaaaagtggcctttggccactttttcgagtttttgcaaggggctgcatgcacgcctgcagcgcacacttgtcccttgatcggtgcaaaaagccgcgcacaggtcgcagctttttgcaaattcatagggatagggcaaaatcctttttccctatgcaggtttttcaacagtctggaatatttttcattctgtccgtccggccaggcgcaaagcgcagctggcaaagatcttggcgctgaacaccagcacatcttctccaaaatcaaaccactcgttgtgggccgaaccccaacggcgggtgcccaggaacatatgcatggccttgcctccatgctcctgcacggtgcgcatcatataggtgaagtcctccgatccgcccagatcctggcgaacggtgtccggctccatccccaggctgtcccgcaccacctgctccaccacctggcgcaggctctcatcggactgggcgctggccgcaccgcccatttttgtcacttcataggtgcagccgtacatcttggctgccccctcgatgctgtccatggcatgacggtagatgtcctgggcgatctcactggtagagcctcgggtctcagccttcagagtggcctgagcggggatcacattccgcccggtgcccgccgtcagcaggcccacattgcaccggcccataccccggccgtcctgcacctgggtctgcattcccagggtggccagtgccgccgccagcaaagcgttgcggcccttttccggcgatccgccggcgtgggaagcctctcctttgaaggtcacatcgaatttgtcggtggccagataaccgccggtgttggtgcacacctgcaaggatccgtccgaggtctcggcgatgtgtccacccagcacaaagtccacatcgtccagaatgcccgacttgcacaccgaaagagctccccgcaccccttcttccgccggctggaaaatcaccttcaccttgccttgcagctgctcctggatgcggtaaagggacagggcggtgatcagtccgatgaccgcatggccgtcgtggccgcaggcgtgcatggcccctgggttgcaggaggcaaagccctctttctgaggacgatgggcatcggtgcggttttcttccacatcgttgctgtcaatgtccatgcggatggccaccaccggcccttcccggccggtgtcgatcacggcgcacaggccggtatagccctccgtgcgctgcacataagaggggtcggctccctgctccaccgcccgctccatggcggccttgatcacgctttcttccgggtagcccatggcgtattccgggcagaccacctgcttgcccatgagcacagggacccccgcttcttccagcgttttggccagaaaagcggtggtgcggaactctgtccaggccggttccgggtgccggtgcagatcccggcgccattccaccgccttctgagcatattcctcacagattccattgagtgccttgtaatccattttctttctctcctttgctcattttccccgccggttccggttgcccgggcgggtgcgcacatagatcttcttggtgtttctgtccatggggctgggcacttcccgcacctcgaaggcatccaaagccttgacaaaggtggtcagtttccgatggccgtagttgcgcacatcgaactcagggaagcgcttgatcagggtatctcccacaatgctgagaggcacccactgatcgtcgtcctcgctgctgtcgtcgatgatggtgcgcaccgcccggcggatctcccgcaaagaagtgcgggcggtgttctggccccctgcggcggagtcattttccatgacctctttccgctcggggcactccggagcttccggctcgggattttgcaggacttccaggtatttgaatttattgcaggccgcgataaaaggggacggggtcttccgctctcccatgcccaccacaatcttccccgcttcccgcaggcgggaggccagacgggtaaaatcgctgtcgctggatgccagacagaacccctccacattgccggcatagaggatgtccatggcgtcgatgatcatggcggagtcggtggcgttttttccggtggtatagctgtattgctgaatgggcgtcacggaattttccagcagcacatccttccatccctgcatattggcgctggtccagtccccgtagatccgcttgtaggtgatgaccccttcgttggaaagttcctctaaaatgcctttgatgtatttggccgacacattctccccgtcgatgagcagggcgaagcgcttgtcttctttttccatccttttctcctcttccttacagcgtctccggcaggtgatatttttcctccatcaaagcgcccacctgttcctccaggtggatcagactgccccgctcgatgagataatcaaaggggatcacccgtcccccctgctgccggtaccggtccagggcatccccggccgcctgcctgtcaaagagcagggagtcgggagaaaccacaatggctccataccggcccataaagccgatggtgctttgcaggtctgtttcaaaattcaccggatagtttttttcttcctcccggaaatagcgcagctgctcggtgatgagattggcaaacttattgctggaacaaatgatgccgatgggcgtctctctgggcagagtggtgatgctgacaatggtataccgggaaggagccatggccactttcagaagtttttttccgaaaccggccaggctctgggcgatctggtcatagtgggtctcggtggtgaccaccagatcgaaatcggccagaagcgcccggggatcgtcatccagaatgatgctgtccaccataaagagggacagggatacgcctggcagatacaaaagctgctttttgaaaatggccagactctccgggttgcagtcgatgacggccaggcgaagagtcttttcccctgggctggccttgtccagcacgatgcgcatcatattcaggctctcctccggcgaaaagccccacagatccaaccggtcggcggtctcctccagaagggccatggccagcttccgcttctccccttccgccccctggcggtgggaatggacataggtgccgctgccctggatgacttccaccaggttgttgtcggccagttcccgataggcctttttcaccgtgccccgggccacccccaactgggccgccagctcccgctcggtgggcagccggtcccccgggcgcagcttcccctctttgatgtcctgcaaaatctgctgggccacctgctgataaatgggtttgtttggatccagattgaaggtcatagctcctccttccggggaaattggttcaccctctctgttgttttaccagactgaaccgttggtacagcctgctccccggcaaattggtctagtcaaaagcataccatatctttggggaaattgctagtttttttctcgcttttcggtgagaatgtaccaattctttcgggagtcattgactttatgttttgttttttatacaatgaccctgtacctttatgatttttagtgtaccaattcgccaaagatcgtctttttacgaaaaatttttcatccctacggagagaaaggaaggaacagatatggctcttatgatcgacggcaaccatctgaccatcgaagatgtgatccaggtggcccgccatggggaaaaggtggaactgaccgaggaggccaaggccaaggtcaacaaggcccgggcttatgtggaccagaagctggaggacggcgctgtgatttacggcctgaccaccggtttcggcaaattcagcgatgtgctcatctccgctgacgaaaccaaggaactgcagcgcaatctgatcatcagccacagctgcgccatgggcgaacccctcagcgaggagatcagccgggccgtgatgctgctgcggtgcaatgcactgagcaaaggcaactccggcatccgcctgagcaccatccagaccatgatcgatatgctcaacaagggtgtccatccggtcatcccccagaagggctccctgggcgccagcggcgacctggctcccctgagccacatggtgctggtgatgctgggcgaaggcgaagcctggtaccagggcgaaagaatgcccggcgccgaagccatgaaaaaggccggcatcccggtggtggaactggccgccaaggaaggcctggccctgatcaacggcacccagatcatgacagccatcggctgctttgtggtggacggcgccgtcaagctgatgaaaaccgccgacatctgcgccgccctcaccggcgaagcgcttctggccatcaaaaaggcctatgatcccaaagtccacgccgtgcggggccaccagggccagatcgactgtgccgccaatatgctccgcctgctggaaggcagcggtcttgccgccgatgtgcagccgggcaaggtgcaggacgcctattccctccgctgcgtgcctcaggtgcacggcgcctgccgggacagcatccgctatgcttacgatgtgatctcccgtgagatcaacgccgtcaccgacaaccccctgatcttccccgatgaggacgatgtgatctccggcggcaacttccacggtgagccggtgggcctggccatggactttatcgccatcgccatttccgagctggccgacatctccgagcgccgcaccgagcgcctggtcaatccccagctgtccggcctgcccgccttcctcatcgagcacggcggcgtcaactctggcctgatgatcacccagtatgccgccgcctccatggtgtcggaaaacaaggtgctggcccatcccgcctgcgtggacagcatcccctcttcggccaaccaggaggaccatgtgtccatgggcaccaccgccgcccgcaaggctctgtccatcctggacaatagccagaaggtgctgggcatcgaactgtttgccgcatcccaggccatgaccttccgggacgaaagcaagctgggcaaggccatgagcgccgtttacaagcacatccgcaagagcgttcccgcctgggagcacgaccagatttcctatattgaaatgaacaaatttgacaagatggtcaagtccgccgagctgaatgagctggtggaagaaaccatcggcgcactgaaataaggaggaacacccatgctgagcaacaaagagatcggccaggccatgcagatcaagctggatgccaccctgccggaatatcccgcttttgtagagggcatccgccgggcccctgaccgcggctatcgcctcaccgaggcccagaccaagctggccctgatgaatgcgctgcgttatgtgcctgaagagctgcacgaaaaactggctcccgaatttctggaggagctgaagacccggggccgcatctatgcctaccgctatcgtcccgaaggccgcctgtccggcaagcccatcgacgaatacaagggca

SEQ ID NO: 4393 - DNA, 3752 bp, Unknown
  16S sequences of unknown bacteria
ccattgccgctgccgggcggcacggtgtgctgctcgtggggcctcccggctcgggaaagagcatgctcgcacggcgtctgccttcgatcttgcccccgctcgacgagcgcgagcgcagggaggcggcgctcatacactccgtcgtcggcgatgatttgagctcgattaccgccggggtgcggccgtttcgcagcccgcaccatacggtgagcgccgcggcgctcgtgggcggcgggcgcgacctgcgcccgggcgaggcgtcgcttgcgcatcatggcgtgctgttcctagacgagcttggggagtttgccaatcccgcgctgcaggcgctgcgccagccgctcgaagacggggtcgtcgtgctgtcgcgtgcgcagggcagggcggtgtttccggcaaagttccagctggtcgccgcatccaacccgtgcccgtgtggctacctgggagaccacgagcacctgtgcaagtgctccgaagcccaggtcaaccgctatcagggcaagctcggcggcccgctcaaggaccgcatcgacctcatctgcgaggtgagccgcatcgacccgtccaaggtgctcgaaagcggcaaggggacgagttcggcgacgcttgccgcgcaggtggccgacgcgcgcgagcgtgcgaggcagcgtggcgacgaggtcgcgcgctccctgtcgtccacgaagccgcacgaggtgatagaggcgtgccgtctcgacggcgagctcacgcggctcgtcgagaagatggcgcgccggcaccacctgtcgggtaggggcgtgatacgcgtcctgcgcgtcgcccgtaccatcgccgacctcgattgcagcgatgcggtcaagtcggagcacctctacgaatcgtgcatgtaccgcgtcgagaacacattggagtgagatatggagcagcaacttgcaggaagacggttcgagcttcccctcggcagcgcgggctacccggcgctgctggcggaggtcgagcaccctcccaagtgtctgtacggcatcggcgacccgacggcgctgcagcctggcgtcgcgatcatcggcgcgcgcaaggcgacgccctacggcatctcgtgcgcgcgctactttgcctcccgcgtggcagaccgcggcatcacgatcgtgtcgggtggcgccaggggctgcgaccaggaggcccaccgggcggctgtcgaggcaggggtcccgacggtggtcgtgttcggttcggcggcggatgtcccgtatcccaaaagcgggctcaagctgttccagcgggtcatcgaccaaggcggcgcgatcgtctcggagcacccctggggctcgccgccgctgcgcccctacttcgtccagcgcaaccgcatcatcgcaggcctgtccgtcctgctcatcgtcgtcgaggcggggctgccctcgggaaccttctcgacggcaacggccgccatcgagcagggcaagcacgtggcggtcgtgcccggcgccatcacttctccaaacgcacgcgggtctaataggctcatacacgattttgccgtcccgcttatcgactacgaggcgctcgacgaggcaatcgacctcgcgttcgaggatcgcggcatgcttgccctgggcgtggaggacccggagaacgcagacccgtcccagtccttcgcggacgatccattgctcgaggccctggcggcggcgccctattctgcccccgagctcaccgcgtacttcggtttttccacgtccgaactcgtccagcgcctctcgcagtacgaattgcaggggctcgtgcaacggggacgtgacggtcgctaccaagtgtgcgctcgtgtgcgaaaataaccggactatgaatacgaacaagacacttgccacgaacaagacatttccaacagtgacggtcgtcggcgcggggctcgccggcagcgaggcggcattgcagctcgcgatgcgcggcgtcgcggtgcgtctcgtcgagatgcgcccgaaacggcagaccgacgtccacaagacggcagaccctgcagagctcgtctgctcgaactccctgaagagcaaagacgcgacgagcgcggccggcagcctcaagtacgagctcgccaccatgggctcgcaggtgctttcctgcgcgttcgagacggaggtcgcggcgggcggcgccctggcggtcaaccgcgcggagttctccgcgcacgtcaagcacctgctcgagtccttcgacaacatcgagctctgcgagcaggagtgcacaaagatcccgcaggggccggcgatcatcgccaccggcccgctcacctccgacgcgctcgccgcatgcctcgagcgcgagctcggcaccaagagcctcgcattctacgatgcggcagcgcccatcgtcgaggcggactcgctggacagagacgtcgtcttcgcccagtcgcgctacgacaagggcggcagtgccgactacctcaacgcgccgctggacaaggagtcctacgaggcgttcgtgacggagctcgtgggcgccaagcgcgtcatcgagaaggacttcgagcgccgcgagctcttcgcggcatgccagcccatcgaagaggtggcgcgcacgggcatggactcgctcagccacggggcgctcaagcccgtgggcctcaccgacccgcgcacgggccacaggccgtgggcggcggtccagcttcgcgccgagaacgccgcgggaacggcctacaacctggtcgggttccagacgaacctgcgcttcggcgaacaggagcgcgtcttcaggatgatccccggtctggagcatgcggagttctcgcgctacggggtcatgcaccgcaacaccttcgtcgacacgccgcatgcgctgacaaagaccctcgcgttgccaaagcacccgcaggtgcacctcgcagggcaggtcacgggcaccgaggggtatgttgaggccatcgcgtcggggctgttcgcggcgctcgcagtctatgcggagcttgctggcgtcgccgctcccgagctgcccaaagacaccctgttcggctgtctgctcgactacgcgaccgacccgcagaccgaggactaccagcccatgcacgtcaactacggcatcatcgagccgatcgtccccaagatacgcaacaagtcgcagcgcaaggcagcctacgcgcgacgcgcgcacgaggcaatcgatgcgtacgtccggcagcgccccgaccttttctccgaggcggtgctggagccgtccgcactcgagcgggcgcgcgccctcgcgcaggcgggcctcgcgttcccggagcaggagtagggacatcatggcggaagagggcatcgacgccgcctacttcgacgaccccgccttcgacagcgaggcggcacgtcaggccgtctcgtttctgcgccatctgggcgtcgagcacggcctgtctcccaacacgaccagggcctacgccatcgatctgcgcacgtacctcgactgggcatcccgcacgggggcagacccgcttgccgtggaccaccggcagttccggcgctacctcgcagagcagaacgccgcgggctacacggcaaagaccgtggcgcggcgcctttctgcggtgcgctcgtttttcgggtatctcaacgagaggggagtcgtggattgtaacccggcggctgcggcggcctcgcccaagattcccaaggacctcccgcgaaagacctccgacgccgacatcgcgaggcttctcgacgtctgcgacctcgatgaccccgtgggcctgcgcgaccggacgtttctcgagctgctgttcgcgtccggcg

SEQ ID NO: 4394 - DNA, 32759 bp, Unknown
  16S sequences of unknown bacteria
cagcaaaatcttttggtttataattcgtgatatttgatgtgttcataataatacccccatagatacatttaaacacatttaaccatattaagcaatatgtttagttacttataagtttctcctgtattctgtctcaactatctcatctatctcatctttctctgcttttactttgtcatctgcatgatcttacagatatgttccttcgtcttcttatcgtaatttaccccaaccagcagcagattcccctgatattctttcaggctttcgcagtactcctttttcagaatctgtgaaattgcagtatccgctgtctgatcccatttcagtcccaccacaaacgccggtttatcctgaaatttctttttcggcagaaagaccagatccgcaaatccctttccgcccgccagttcccgatatatcgtgtaataattgcgcgctgtataaagtgcaagagaaatcgtgtagctcaaagcattcacatcgttatactgcaaatgagaagtctcaaagtgtgcctgccggattccctccgctacctgcagcggccgcatctgccagattgcatttaaagtgtcggcagaatttttcaatgcccgtgaaatctcgccccagtccgacaccgataccacattcacatactcagcacgcacttcactgttcggaataaagacggttttatgttcttcgtcatacgccagatatccaagatgcaccagaagcgtgagtacgtcatcttccgtacgaaacgtaatcatatcgttggaaaagcttcctgtatttaccggcacactctctccagcgatcatgctgatcacatcatcacgaaggccttcaaaattcatatcaatataaacctgcagcgcctcaaatgtctctgtctggttccagtagtttcctattttgccaaactgcatacagcttaccacggaacgtggactgtaaatggaaagctcctctgtaaatgaatagccatcataccagctttttacttcttccatatccatatgatatttcatgcacagatcacgcacctcattttctgtaaagcctgcataaggtgcaagcggaccgggcgcaatcatcgaaaattcatcaaacatatttaaggcggaatgcgttccatattttttgattggcaaaatgccggtcatataagccaggcagatatggcttttatctttcagcagatcacgcaaaaaatccagatatatctcctgtgcttccttctcccgcttgaattcccggaatacgcaatcccactcatctataataatcacaaatggtcgtttcgttctgctgtaaatatcctgcatcgttctggtcagattcgtttcatcaaaataccgaaaatccggatattcctcaaggagatcccacagaagactttttcgaagcaattccagcattccctctattccgctgctttggctgagaaattcctgcatgttaaggaaaaccgtatcgtactgattcagatactttccaaacgtctcacttttttctatctcaagcccggaaaataatttttcggaatcgcatcccctgctgtaatacgctgcaagcatatctgctgccattgattttccgaaacgtctcggacgactgacacagatattctgctgcgatgtattcataactttattcgtatattccaaaagaccggttttatctacataaatttccgaatgcaccgcccggaaaaatttttcatttcccggattcaggtaaatccccatgccgcacctctctttctgcatggtcagggcacctgctgctctgttttttcctctgcaaagcataaaaacttcgccaacactcacgccatttcatgtattgttattatagcactgttgcccggagattgtctttctctttctttggatccggcaggtgaaggttctctgtacttcatttgttgctgcgtagtttatcatttatattgacaatagcggtttgttatattaatattagaatgtttaattttagaatatttaaagataaacattctactgtgcaatcttaacagcacagaacaagcttacagaaaggagtgcttccatgaaccctatctcatttttatcgctcgcctccaaaacagcaaaggcgtacgaatccttctgccgaccggtctgcaaaaaacaccggatcaatcagacgtgcctcgatgtgattctttttctggcgaataatccggagtacaatacggctcgagatctgtgtgaactgcgcggtatccgcgccggcaatgcctctgttgcgatcgacacactcgccggacgcggactgctgacacggcaggctgacccgaacgaccgacggatcacacggctggtgcttatgccggaagccgaaccgattgtcgcagacggccgtgagattcagcagcagtttggcaatcggctcgttcaaggcatatcggcacacgaactgcagatctgtgcagacacgattctgaagcttggcgccaatatttcggatatgctttcataatagccaaagagaagcttcacaatcctcttcgctgcctgcccataaacgcaaataactctattttgatctgatttgatctgatttaatctgagctatttctctcacacgaaaggagtttttaccatgttaaccacaattctcgtatgtattctcgccggcctcggcgccggtcttggcaccggcttcgccggaatgagcgccgcagcagtcatcagcccgatgctgatcacatttcttggcatggagccgtatcaggcgatcggcatagcgcttgcaagtgatgttctcgccagcgccatctctgcctgggagtaccataaaaacaaaaatcttgatatcaaaaacgggctggtcatgatgatcaccgtcatgatttttactgccatcgcaagctttctgtcacgctttatctccggcaatacgatgggcgggttctctaccgttatgacgatgctgcttggtatcaaattcattgtgcggccggttatgacaacaaaggaaaaaatgatgtccgtcgaccagaaaaccagaatcatccagtccattctctgtggaatcataatcggactgatctgcggctttgtcggtgcaggcggcggaatgatgatgctgctgatcctcacctccgtacttggctatgagctgaagacagccgtcggcaccagcgtctttatcatgacctttactgcactgaccggcgctgccagtcatttttatctcggcggcatgccggatcttctggttcttgtgctctgcatgctcagcacactgttcttcgcccgcgttgcagctgttttcgccaacaaagcttccgcaaagacattaaaccgggcgctcggcgttgtgcttaccgtgcttggcgcggtgatcatcctggtaaagctgttttagccaaatcagacggaatcacttcagacagggcttattccgcaaggctcacttctttgtgaaacggcttcagcggaagtcctgcctgattccatatctgtacctcataataaggtgtctccgcaaaagaaatactccaggtcttcgttttttcagagacagcagacgatgtctgcgccgacttcagttttatcagcagctgttctccctttacttccactttcgacacatcggctttttctccgtctttcgtcacaacaaatggctgcttggccaacggaccacaaacaattccgccttctgtatgcgcaaacgacaacaaaatcccttcctctgcagcttcggctcctgtacactccggcggctcacaaagcagttcctctccatatatttttccccgggccagcaaagccagacgctctcccacttcccgcttgaatttcggatgaatatcatcgcggtcacctaaatcagagatgctcgtcatccatacattcgcaaccttttttgaaaccagttcctgacacgccctgacctgtgggtaccgatctccccggcaatccagccagcgttcaaacggagccagctgaacatagagaaacggaagctgctcatccatccaggcatcccggaagcattgtatcagtttttccatcagaagcgcatacaggtctgcatgaacctcgtctgactctccctgataccagagaattcccttcaccgggaacggtgctaccttcttcagcattctgtcatacagtccgcacgggcgataatgatgatacggtccgatcggcaaaacaggatccccctgatgcatcttcatccacgtctgctgctcctcccatgtctgtccatacatcatggttctccactccagctcatgtgcatacgaatcttcgaattcccagcatctccgactttcctgataaagctcttccggatccacaccttctagctcttcttcatactccgataaataaacagaaagaggcggctgctccagatatgatttttccatccatgcgcttgctgaggttcctccccagttacagccgattacgccgaccggtactccaatcttctcctgcaggctccttgcaaagcagtagccgggcgctgaaaaaacagcccaggcaggatccccctgcaaaaaccagtacccgtctcctggcaggtttctttcctgcccttcataagcgattctcggcacattgtacatcctgatctcctcacggatagattcttttttgatatcattccaatgtgcatcataccgcagaaaatactccatatttgactgaccggctgccacccagatgtctcccacgcacacatccgtcaaaataatttccggctctgattcgtcatttacataaaagcgaagtgttcctcccacatctgccggcagtgaaggaaagctgcacaaaaactgtccgtccggcaatacctccgcctcgcttctctccgaaatttctcctgtttttgatgtatattccactgaaaccttccaaaccatctcatctgcctctccgtaaaaacgaagcggtttttctctttgcagcatcatatgattctgaaaaagctgcggtaaaaaaattcttttttctttttttccttccatacttacctccacactgccaagctcatcttatatggcatattttttatgtcattttactttttttgcccttactttgcaacacatatattacgtttcccccatgcttgacagacaattcttaaaatagtatgattttatataacagttcagcatgtatgcaatgcggaatgcagaatcattttctgtgattgcatgctgaacaaaatggaaaagagaggtatattaagatggcaaatgagcacgaaaatcagattcgtatcgtgcaggagacggtagccggaaaggagatcaccttcgcgcatgtgatgggcggtcctgcaccgatcatctatcagaagctcggattgaatccgcagcttgactacggctcctccgcgatcggtattatgaacatgacacctccggaatcggcagtgattgcatctgatattgcagtaaaaagcggcaatgtctaccttggctttgcagaccgttttacgggcacgctgatcatcaccggtgaaatttccgaggttatgtcagcgcttaccgaggtcgtcaactatttccgtgacacgcttggatacgtcgtatgtaaaattacgaagcggtaaattatgaacaggagatgtaaaaatggcacagctcacagtggaaaagcttcttgaactggtcttccatgacaattatgaacatctgaagggcagacggctgcgcatgacgcgtcttcgtgtacccggcaaagaggtctgcctggctcatatcatcacaccgaccgatccggcgatctaccagaatcttgcgcttcatatcggcgtacatgccggtgaggatcacaccggcgaggcaatcggcatgatccgcctcactccgtgggaaactgtcatagctgccgcagacatcgcagtgaaggccgcagacatccagatcggatttatggaccgcttctgcggttccctgatcatcacaggcggcttatcgcaggtacagaccgcagtaaaagaagtcgtccgatatttcggggaagatctgcattttaagacgtgtgaaatccataaaagctaaaagaggtttttatttatatgaaaaaaatgtttctgaccggaagaagcgaggccggaaaaacgtccctgacccaggcactcaagggcgaggatctgcattatgtcaaaacgcagtataccaatacaaatgatgagatgatcgattccccgggtgagtacgccgagtccaagcatttcagcgttggtctggcctgcttttcctttgaggcagacgttgttgcgctcgtgcaggcggcggacgaaccgttcaatctgtttggctgcaactgccagacgtttattctccgcccactgattggtattattacaaaaatcgattctccttacgccaacatcccgatggtccgtcaatggctgatcaacgccggctgccatcgtatttttcttgtcaacaatgagacccgcgaaggtatccccgagctgcttgcgtatctctcggaggacatcccgaaaatgacgatggaagaagcgatggaaaaacaaaggcttgggctgaatgaatgggatccactgccggacgggggatctaactgaatccggcaaacacctccaatatacggttatatctgcattgtcccgcctaacttatccacagatatctattccgggcggcttcttatccacacaaacggaggattatccaaatggatagtaaagcggacattcacaaataagtgtaaaaaaagctgcggcatatcttcttttgatatgccgcagcttttttccagttacgcaaatcctctgctgtacttttcattcatttctgtttttcattcatttttacttttcattcatttctgtttttcatcatttctatttttcatttatttctatttttcatcatttcttccagccatcgtcctctgacaccagtcgttcctgcttcttcataatcatcatataatcaatcataatataagtcgtcgcagctacccacgcggtctggtcagtaaagcaggctgccagataaccgaaagcaggaattgtaagcagtgacatcgacgtccgcgccaccatctccagaagtcccgcaagcattgcagaagcgctgtgtccaagtccctgaacggcacttcgcgtcgtaattaaaaaggcaagcagccagaagaaatatcccatacagcgcagatactgcaccgcatatccgatcacttccgtctctccctcatcgacaaaaatccggatcatcggctcaccgaggaagatcagcgcaaaactcgccacaatgccgtaggcaaacgcaattccaagcatctgacgcattcctttccgtatccgatccagccgatgtgcaccaagattctgtccgcagaatgtcgcacttgtgttgccgatcgcatcaaagaaagccatcgtaaactgcttgaccttcatgcctgcggtaaaggctgccacaatcgaggagccaagtgaattgaccgcactttgcagcataacgctgccgattgccgtaatggaaaactgaagccccatcggaacgcccatcgcaagaagttttttcatcttattcccatccgggcgacgctcctccctggaggccgcaagaatccggaaacgctttttcatatagaccaggcagcagattccggagatcgcctgtgccgtgatcgtcgccaccgctgctccggccacgcccatatgaagcacgagaatgcagagcagatcgccaaatatattgatgaccgtcgatatggcaagaaaaatgaatgggcttttgctgtccccgagtgcacgcaggattccggccgccaggttgtagagcacggtaaacggaatgccaataaaaataatgacaagatactgatatgcgccgtccagaatattttccggtgtgcggatcaaaatcaggatctggcggcagaaaaccgatgtgatcaaagcaaaaccaagcgatactcccgccgcaaggatcgtgctgttcatcacgtaaccgcgcatcgctgaataatgctttgcgccgaaggtctgtgcaaccggaatcgcaaatccgctgcacaaacccatacaaaatcccagaatcaaaaagttcaaagaagagctggcgcccaccgacgccagcgcattgatgccaagtgtctttcccacgatcaccgtatctgccagattgtaaagctgctgaaacagatttccgagcagcagcggaaatgcaaaccaaatgatctgtttgaaggaatttccttctgtcaggcttttttccatatacccccacactttctctttttacatgctgtccagactttcccgattaaaatgatgcctgtttgattttggtaagtctccccagatatttacggagctccaacacatcctctgatgtatcggaactccgggctttttgcatcttttcagaaaatcatgccattttctatatttatagcaatccgctttgctgcttactcataactcgcagagtgcttcgcagcttatcagtgagctcacacgcccccgagatgcagccccagaagcagcagctctgcgaggccatagtacgtcacaaccgccaccaggtcattgaccgtcgtgatcagcgggccggaagcaaccgccggatccaccttgatcttatggaagaacataggaatcagtgtgcctaccaggctcgaaataatcattgcaaggaacagtgcaaggccaacgcacagagcaaccgagaatccatagctgtatgtcattccctttccgaaatgcaggtaaatgccaacacagacaaacgttaaagacccgagcagcagaccatttgcaccgcccactctcatttccttaagcacaaagcgaaacttttcgccaccggaaatattttcatccatcaggacacggatcgtaacagccagggactgtgtaccgacgtttccggccatatcaagaatcagcgactggaagcacatcacgatcgcgatctgcgaaaccaccgtttcaaacatgccgaccacgctcgacaccacaaggccaagtccaagcagcagcaccagccacggcatacgtttgcgcatgctttctttcagagattcctgcagatcctcctctgcagtaagacctgccagctttgcgtaatcttcactcatctcgtcatcgactgcttcgatgatatcgtccgccgtgatgacaccgatgatctcctcgtcatcattcaggaccgggatggaatcctccgcgtaatccttcaggtcttcgattacatccgagatctttgcctttgcgcgcacgctcggatagctcttgctgacgatatcatcaagcggcacataatctctcgcaatgatcagatccttcagttcaaatgcaccggcgtatttaccgtcctggtctactacataaatggtattgatattatcgctgtgatgcgcctgcctgaccacagaccgcatggcttccttgatcgtaaagcgttccgggatcgtcacatagttcgtggtcatcatgctaccaatctcgtcctcctcgaaggactggatcagcctgatatcctcggtggaatcctcatccatcatagagatcagcttctgcttctgctcctcgtcatcgagatcctccagagcatcgaccgcatcatcggcgtccatgttttcgaggacgtctgccgcctgctcaagcggcagctcttccaggtattcggatacatcatcgatatacgtaaaaatttcagatacacgctccacgccgagaatccggtacagcttctttctgccttccgtatccagctcctgcagtgcttccgctatgtcgttttcatggtaatcatccagcgcatcgcggatctcctcgtccgtctttccgctttggataatctgcagaatctcttccgcacgtgtcaatgtgttcatttcatttggttccatgggtttttacctcctttttctgttttttcagaaaaccagacgatgatatgttctgacaaatcaccaggttttcgcgcacagaaaagcattccgagcattctcgtctgctttctgtcttttcttacagcgattctttcattctcagtttcagcaaaaacagctccttataacctgcttcactgcttaacctgatttgatcgaagcgctgtccgtccagaggtatcccttgcccttttcgggcaaaaaaataccatcgcccggcatacggcgatggcagaaatttccacacaaaacacagttttttccgtcaggaaagaaagctactgccctttcggagtgtaactatgtgatacgcatcattttctgcttcgccgccaaataatcggccatgactgtctgaactgtccatagtgccactccctttcctgcaatataattatgcaattcttgatagtgccgcaaaaacggcaggatcacctgccacttcccggactccctttctatttatactactcgaaaaagtaaaagtcaaacataaaatcactgcatgtgaagtccttatgaactttatgaatcaggacattttccgccggaatgccagggggattatctaaaggattttaacagcgtctgccattcccaggacagcataaaaatataagaatcttgcaaatgtacgtccttttaaattttttttattttttgaaagtggcaccagcacaaaaaacagccgcacaacatcctctgtcatgcggctgtcctctcatttttgtaattcagtaaatcttggctgatttcttctcagcacaggtccttcagcatcagatgctcgccgattccttctgtcaacgcattcggaatcattccgacctcatagtagccgtttgctttgtagaattcaaacgctcttacattgaaatcgctgacggtcagggatgctttccgcctgccatcctcgcgacccagctgctcaaactgctgcaacagccacgcgcctacgccctggctgcggaactctttcttcacgcacagaagcgccagatagtggtactcgtttgtgaagccgttgcggctgatgaccatcagtccggccttctcgccgtgtgccgtctctgcaaaatacaggcggcctcttccatcgtccggaaaatacgcgcggatgtaatcctccgtccggtagccgtgtgcaaagtagcgctcgtacagtacggagtcccttgcgatttcctcacaggcgcggatatctttataatagccctgcttcagatgtaaattcatagtttttcctctgtctttactgctctgcccagtttgccggatataccgtgtagatataacggcacttgtcctttgtctggaagtggatgtggcttcccttcgggatgtagatgatgtctccaggacctccggaaacgattctgccgtcgatctcgatctcaagggttccctcaagaacgatatcgtactcgtcataggtcagggtccactcgaagcttgtatgatccagttccatcacaccgcagcccatacgcggagcttcttccagtgttacaacatcctttaatgccacaccatcctgctcgaacggctcgcattttacggtagatgttttgattccgatgattccgctcggatcaacgtgcttttcaaatccgcagtcacaggttttcttctcagcagttgcttcctgtactacctttgtgataatctcacgaatcagctcttcactaatattcataatgttcagcttcctttccgattttgatttcgtttttgatttttatgacttttctctgtcttttgtattacagcctgccgtttcggcgcctaagcactttcccggcagactgcatctgtttcgtaactgttcagaaccagaagaaatgcaccgctttacggctggctctggaatagctgctttttttattttgttgctgatttgatcttgctaagaagcttcggagcaagcagatttgctacgatcagagctgtgataccagctaccagcttaccgataataaccggagtaaccatctcctgatttacaccggcagtgaatccaaggtgatcgccgaatacgaatgctgcagatactgcgaatgctacgttgaggagcttacccttcggatccatctcgcccatgatattgaacatagcgatgttgtttgcaaggttagctaccataccggcagatgcctgctcgttgattccaagagctccgccgagttttttcagcacaccaccgaaggtacgtgtaatccactcaaccatcgggaatgcaccgatcagaacgataccgatctgtccgcaggtcagaagaccgctgtccagaggtgaaagtcctgttacttcgtccttaattgccattacgtcgaacagcgggaacatgattcctgtgatctgctcgaatactgcgattgctgtgaaagctgtgataacgattgttacacctgtaccaaatacgttgaagccgttgatcatctttgccggagcaaaccacagaccgataacgatcagtgctgcgatgatgataaccgggatcaggttctgaagaattgtgccgatgccgagcttatactcagtcattgtgctcatagccagaccaccaacgatacatccgatcggaacggtgataagacctgccagaacaccggctcccagataagaacggtcatccttggagatgataccgagtgctaccgggatcgtgaatacgattgtcggtcccatcatggttccgagaatcagtcctgcaaagtttccgattgccacattgtcacctgcgagctccatagccagcggataaccacccatatcgcatgcaagaagtgttgttgcgaacatggaagaatctgcgccgaagaaattgtagatcggcttaataaccggtcctaaaatggttgcaagcaccggtgctgctgctactactccggccatggagatagcaagcggtccaatcgcgttgaagccttcctcaaacttctcgccataaccctttttgtttcccataatcttgtcgattgctcctaccagcatgaagatcatcatgatcatcatgataacggagttgatcgaaatgttgtgtacccaggatgaaatactctctgtaaatacgctcatttttgctcctttccctgaaaccccacacttatgtccctcaaattgcaggattactcagttccaaatataaagtttttaaagcagcgatgtaaacagctttttcgccggacgcgggataactgaggtgcctaccagcagttcgctgctgcgggaagctgcctctacggccgccttcaccgctcccacatctcctgtcagggtcacataaccctttcctccgatggcatagccaatatgtacttccatcagcgtgacgtttgccgctttcgccgctacgtctgctgccgtgatggctgatgctacggagtaaaactccagcacacccactgcgccgtattcaggcacctgtgtggttcccgtcatggccgggatcagagacggatgaacattcggcagtgtcagggtatctaccacacattccccaccgcgaatgattccctccttcatggatgcacgtacatctccggtctctcctccgatcaggatcagaaactttccgggacatacggaagatgcgcggagtaattcaatctgcgctgccttgaccatgtaatcacaagtctcaatacctctggcgatgctgttcagctccaccataccaattgccagcctcatgtgctcactcctttctgcatcttatgcgtgcacccttgtctgtgatctcttcaatcactccgtttacgctggaatgaatattagcggaaagcgcaccttctgccgctgctgccagcagctctccttttgccaccgtatccccggcctgctttactgctgctgccggtttgccgatgtgctgagagaacgggataaacacggtatccacgctcagctcctcgcaggaggatggatgctttccatagtactcactcaggccaagtcttgccaccagacggtttgtcggggtcttccgctcctgtacgaattctcttgcgtgcgcttccggattcttcggcacctgaatgcctctctttcggaactcacctttgagatactcgttgactttgcgcggggaaagacccatgggacaggcgaacatctcgcacacaccgcagctgcagcagtttgccgcatctccgaacatgcgcagatactcttcattgtccgtaatggatggctcacgccacagccctctcatcatcagattcggcctgatctgatgtccgatcagatatctcgggcacaggtcggtacacatcttacactgaaggcaggcgctctttgtctgcttgcggacggtctccatcggaagtgccgtctttttaaacagataatggtctttcggaagcaccataatatttccggttgtctttgtaacaacggcctgttcgatctctgcctggctggtcagccgttttcccatcatcgggccgcccatgatgagtgcaaattctgagatcgtcggctttgccgcacgtacgcattcgagcaccgacgtaccgatcggtacgtgaagctgcatcgtatgcgttacctctcctactacggaaagatatttttctgtgacggcttttccttccagcgcatcagcgatattcagtaccgtacccacgttgtcaaccacacagccgacatcggacggaagtccgcgctccggtacgcaccggccagtcacctgctggatcagggtctgctcatcacccgccggataaaaatatcccatttcgaaaatttccacatcgctgtcgctgtttttgatcgcttcccgaagcgctgcgatttctttctcgtatgcgccctttaatgcgatcacttttctggaagcaccgagcgactcagcgataaccgggatcgtctttacgatccggtccgcaaatgtccggcaaagatacttatcggtctcgatcagcggctcacactcggccgcattcacgataaaatattctacttttgtattcagctttacatgggtcgggaagccggcgcctccggcgcccacaactcctgcagcttttaccatctctatcaggttcattgcaaaccctcccgtttaaagaacagagcgatcgatctccagatcatccacaatcccgactactgttgcatccaccggaatggacacatctccggccgcattccgcgcggaacttcctcctactacgattacggtctctccgacacctgcgccgatcgtatcggcagcaacaagcggggttttatccgccgtctcatccagtacatcgactggttttacgagaagaagcttcaatcctgaaagcttgtcatcttttcttgtagcccagatgtttccgatcacttttgcaacctgcatattatctctcctctgctcttactatcactcgctaattatcatgtttcgactttcgcgagtgatataagccgttttcgctgtctgttactcgcgaatcagttggatatttcttgctgacgctgcatcttttgcaagagcagtcagaatatttctctcactgatacggatcaccttcacgccctcgcggttcgcttcgatgatatcccgttctgaaattacttttttggtaaatgtgatctcctttggagcttcctccttcggtgccggctcgcatgctttttcgcatggtttttctgcttccggcttcggatcacatgatgtttctcccgcgttttcctcacatggcgctgctgccttcactactgcctctgatacggcatctgctgtgacctctgcctcttttccaagaagcacatcctccagctctgccatcgggcagatcttcagtccaaatgcaaccagcttcgtcagcttcgcctgcatcatgcactgataggagccgagtcctccggtcggatagcggtaaagctccacttcttcccgcggtacatacagctttttgcccatcagaagtgcctgagcagcgagcttcgtgtacggtgtgtctgtgataccggatgcaagcttgcacattgcatcggtcgtcagattaaacagcacaactgcctcgatgccatccatgctgacctggttttcctgaagcagcgcacagctggtattgtatttttctctgattttcggattttccagcagctcatggcatttttcgccatgctcctgcgtcagaaccagaagacccggaagcggttctttcgtccctgcgacaatactctgcacgatattctgcaggtcgtctgctcctgttacggtctctcctgcctgcgccagcttctccattacacgggaaagaatctgtattaccatctcatttctttccaatgtttctcctttcttctgaaattacctttcagaaaggatacaatttttcgcaattcccgccggtgttaccagaaacgggttcgccggtttgatcgtcctgattccggtgaccttctcaaagattccctcgattccagtcaggcacgtcgtacctccgcacagatagatcgtatcgatctctgccgggttgacgtactttttgacgatcgtcgccatcttctcgatgaccggtcttacgaccggaagaatctctttgtgtctggcataatcctgcttaattgcttctgcctctgcaaaggttacatgatagttgcctgccagtaccagcgacagatgcgtacctccggtcggctcgtcctcgatctgtacgacctttccgtcatggaagatcgcaagaccggtggtgccgccgccgatgtccacgactactccgtctgaaatctggtaaatggcatttgcagcggtcggctcatccagtatatttgtgacttcaaagcccgctgactctgccacatactgatgcgtacgcacgctggactcggttccggccggcatcgcaatcgcgcagtcgatcagctcttctccaagacgctgctccagcttttctttcagctcgcgcacgatccggcatgctccgctgtaatctacgacgactccgtcacgcagcacgctcgccgcctgcttttcacaggctaccggctggtcattctcatccagcacgacaagaacaataaacgcagtaccaaggtcgagccctgttttcagccttttcccatgaggaagtacttttttctcggactcttccacctggctcatatactcattgacacgctgcaaatccatcatatatccttaactcctttaacctttattatcggcttcttcccacaccttcggtatcgatcttccgaataatccgtccgagtgtaaatccgcttacggatgcggcatttgcttcgtcaaagtcgatgtgcatccggcatgcaaaatttttgctcacacggataataacatcgttgaagatgaccggacggtcgctgtatacctccactgcaacccggtctttatccttcaggttcattttgatcgaatcctcttccgtcacatgaatgtgattgtgggcaatgatcacgccttcctttacttccagagatccgcacggaccctgtatcgtgatcgagcctgagccggcaatgtctcccgactctctgatcggtgcgtccactccaagtgccacgcagtcgctctttgagagttccacctgtgtggcgctgcgaaccggtccaagtactgcaactctttccatgctcctcttcggtccgatcagcgtaacacgctggttggaaaggaactggcctggctgagataacggacgcttcggttccagcttcgcaccttttccaaacagtatctccacatcttcctgcgtaagatgtacatgcttggcagatacctcaatttccacaaatccggccatatggatcgcatccactacggccgctgtcagatctctcattcatttcctccgttatcagcttcactgtaccatcctgccagatgacggcacatcatgatgtgcagtgcactggaaagacgattcagctcttctatgatatccttccggatatacgtttttccgctgtggaatgcctggcatgcagccacttccgtttcgcggatcgccgtgcgcagcttattcagccatgcatactcggttcccatcgtataatccggcaaaaccatctgtttgatgttataatatttcatcgggttatgagactgcgcccgaagctcttcatgggtaagaccgatcactgtcgtctcagccatttcctcatcaagcacctcgcacttcatcatttcccgcagatcctttaagatatccgcaagatctttgatcagtgactggctgccctgtgctgcctggatcattgcctgtgccagtaccacgtctgcctgaagtgcatcaagcttgccgcggaacaggatacgcggatgatccttacacaccagcttgtttccgaacagctgggtcatatgctccggcttctcataataatatgcatttgtctcataatccacatatttgggtttcggcacagttatctgcaccgggatttccacttcctccggctgcggaacctctgttgccacaacatgcggtcggttcttcggctccgttttcttcggttccggctgtttttgtgcctctttttcttccggctcttcagtcttttgcaccggggttttcagctgatgtgtatacgtatagccgccttctttttcaatgcggatcttacgctgctgaaggtattcccgtgctgccggtgtgaggatcttcccctgcggaatcacatacacctccggctgactgcttcgaagttcatagcgaaggaaatcttccgtgattgctctcacgtgttatccctcctcccgtaggtcattgacaagtcagaacgattatttattgatagacggaaggatgaattctacctcttcatgcggtctcgggattacatgtacggagatcagctcgcctacacgctctgctgctgctgctcctgcatctgttgcagcctttactgctcctacatcgccgcgtaccataacagttaccagtccgccgcctacatgctctttaccgatcagcgttacgtttgctgcctttaccattgcatcggctgcctcgattgatgcaaccagtccctttgtctcaatcattccaagtgcctgtgtgatagccatatttaaacctctttccggcgccccgcctggcgggacgcctctctctatttcttattcttattcgtttgtgattaccgctcagagccaatcattttggaggctgaccccgaacgatatcagtttctggattactccgcttttttaatggacggaaggatgaattctacttcctcatgcggtctcgggattacgtgtacggagatcagctcgcctacgcgctctgctgctgctgctcctgcgtctgttgcagcctttactgctcctacatcgccacgtaccataacagttaccagtccgccgcctacatgctctttaccgatcagcgttacatttgctgcctttaccattgcatcggctgcctcgattgatgcaaccagtccttttgtctcaatcattccaagtgcctgtgtgatagccataatattctcccttctgattaatcctgcattcaaagccgtctgccagaatacgttttgttctgccctgccctgaatcattaatcctttattttattaattaatagttgcgaagtctcgcaattacattctttacgatctcgtctacgtcgatctcgtccagatttacagatggcttgcaaatatcctctgagcaatccggaatacttgcccggatgtcctccagctctctcttaccgtaagctacgtaacggtaattcagcagctgaagcggacctacgttttcagaagtagcacttccgccgactgcaccacagccaagagtcagtgcaggctgcaggtttgtggtagctccgattccgccaagcgcactcggagtatttaccatgatacgggatgccggtacacgctttgcaaagtagtctaccatcttgtcatccttcgtgtgcatggagaaggtatgtcctgctccctcgtagtaaaggattgtgcagactttctcgcatacgtccacgtaatcggtaccggtgtagaagcccatgatcggtccaagcttctcgttggagtatggatgaccgcggcctacgccggtctcctttgcaacgagcactcttgcatcctccggaacgcggtccagatgtgccagagatgcgatcgtcttaacgctcttacctacgatctccggattcatcgtgccgtttgcacggagaataaagcggccgagctgctctctctcctgctcgtcaaggaagtaagcgccctggcgctccatttccttctgaactgcctctgccatgtcctcatcacagatgatggactgctcagaagcacagatggttccgttgtcgaatgtctcggaatccatgatacgttttactgccagcggaagatcacatgtcttctcaagataagccggaccgtttccaggtccaacgccgattgccggtgttccggaagaatatgctgccttcaccattgcggaaccaccggttgcaaggatcagggcaatatctctgtgatgcatcagtgtgctggttgcttccatcgtcggaatgctgatgcaggatacgagattctcgtttgcgcctgcctcggcgattgcctgacggattaccttcacggtctccataatcgcacgaagtgcggtcggatgcggtgaaaatacgatcgcatttcctgatttgattgcgatctctgctttataaaatgcggtggatgtcgggttggtggatggaatcagtcctgcaatcactccaaccggaactgcaatcttgcgaagtcccttctcgtcatctctctcaatttcgccgatcgttttcatatctttgatatgctcataaacgccccggcttgcaaatacattctttacgaccttatcgcttacgacaccaaatccggtgtcttcctgagccatctgtgcaagacgctttgcgttacgcacaccagcatctgcgattgacttgacgattcgatcgacctgtgcctggtccatacgcgcaagttccctctgagcttctttggcggattccaccagctcacgaacctcctgcatggacataagatctttgtctatcaatttcataatggcctaactcctgttctgttgctgtcttacagccaacacggctcttcacaatctgcttcgccgtttctcatttcggatagccgatccatggcatccggttaaactgtcattcctgtgtctgtcactgtcgcgtctgaaaatccagaatcttctcgataagctcctgcttttttgcaaagcggatatccgcttttgtcatattgtcgatctccagcttccgtgcaagctcccgaagctttgccacggacttggaagaaagaaaaccaggtgtatatttcttcttttccaaaacgcctgtttccggctgaccgtccatttccggtccggccgcctgatccgtctcttcggattcttccgtttcagactcttccggctgtgccgtttcctgcgtttccactgtttctgattcggtctgcgctttttccggctcctccgtctgttccatttccggttctccgcttacttccggctcttcctccgtcacggatgcttccggttctttcaaatcctcttcaaccggtgctgcttccttcgggtttgtcggcggatcttcttttacagggccttcgggggctttcggagcagcgtcatccggatcaccgagaatttcttccagttcctcatgcggtcttgggatcacatgaacgctgatcagctctccaacccgttccgcagccgccgctcctgcatctgtagctgccttgacggcacctacatctccgcgaaccatgactgtcaccaggcctccgccaacccgctctttgcaggccagcgtcacatttgctgccttaaccatggcatctgccgcctcaatggcggctaccaggccacgtgtttcaatcatgcctaatgctttcattctaagcctccgttatgccttcggaattttactcgatcggacggtcagcaactgcctctactgcatatgcgaacgcatcgcaggcagccttgcatgcactctggcttccggtcagcagtgcgccgccgaagtttgtctctgaaggcggagcatacagtacacagcattttacgtctgcagccttcagtgctgcatcgacgccgaacattgcctcaagcggcggtgcgatcaggtatgcgattgcctcgccctctttgattccgcagccttcagacaggtaagaacctgttctggagatgcagtgtgcataatagcagatgctgtcatcttcatttgcggatacgaaatggcaaacattctcgatcatatctactgctgcttccagaccagcctttgcttcagccgggttcggtgcagccaggattccgatgatctcacctgcaagctttgtattcgcatttgcagctccaccgtaaaagctctttgcgtatacaacttcgcagtcagctttcttggtagcctcatcgagtgcggtataagtaacatcatcgcagtcagctgtgatcagtgccagggatttatgctccggctttaagttcagctgctttgccatatctgcagatacattcgggatcagacgagtcgcaaggacatgtgccggtaatggatctcttttcatgataaaaacctccttttaattaaagcttcagttcagttccgctgactttgcgctcaagcatgatcttgatgatttcagcgatatgtgcaccagcctctgccggaacagtaccagcgctgtggatgttggaaagtacagtacgtcttgcctctggcattccaacggttgccttgtaagcaatatatgcggacatggatgttgcagtgataaggcccggtctctcaccgatcagggtgcagactacgtctgcgcctgtgatctcgctgatctcgtcctctactgccacacggccgtattttacgaagaacggtgttccataatcaatattgtagctctcaagtccctgcaggatagccgggagaaggtctccgatatttgctgctactgctgcggaggaaagtccgtctgcaacgtagatctgtacggtcgggttcttcttgcatttttctttgattgtctcaactgcctccggagagagcttacgtccaagatccggacgggtcaggtacgtatccttgctgtcgcactgtgtctgtacgatgaaaagtccctggttctttacaaactcctcgtcaacatcgttgaaaactgcatcctgtgctgcggagtgtgctgcacggaactcaagctgcggaagtgtcttatatcttgcgcctgctttgccgataccaagacggcacggagcaaggtacttctgctctgcatatgcttctttgtttaccgggttctctaccagatactgggtacggatatcgatttctgtgatatccggaaggcagccgtcctcaataacagaaggctccagtttaacgccttttttcggaatctccagactgattccatccttgcactctgctgccggtgccggtgctgctgtagcttccggggctgctttttcatctgaggaaacgttcatttcctgtaatacctgctcaataatcgcttttaaatcctttgcttccatggaactgtcccctccttccttatctcataaatacagacgcatcgcctgcaagtttcgtcagtttaccattctctgagaagcccatcttctccagccactgatcaaattccttgatcgggcgaagtccaaatacttcacggagtgctgctgcctcatgatatccggtacactgatacatcaacatacagtcatcgccttccggtacacccatgatgtagttgcagcctgcagctaccagcagggttgccaggttctcaatatcattctggtctgccttcatgtggttcgtgtagcatgcgtcacatcccatcggaacaccggtcagcttgcccatgaagtggtcctcaagacctgcacgggtaacctgcttggaatcgtacagatactccggtccgatgaatcctactactgtatttacaaggaacggctggaaacgcttagcaaagccatagcatcttgcctccatggtaacctgatcccatccgttatgtgcttcagatgaaagctcagatccctggccggtctcgaagtacataacgttcggaccggtagcggtggaattggtcagcattgtctgacggccttcctccagcattgctgcggtaagtccgaatgcttcgttacccttctgggaacctgcgatagactggaacataaggtcaagcggagcgccgaaacgctgagctgcctcagtctgtgtggtaacatgtgccagtacacagatctgtgtcggcacttcccacttattcttgaactcgtcaaacatcttcaggatacgtgcaacgctctctacagagtcatctaccgggttcagaccgataactgcgtcgccgcagcccagggaaagaccttccataacagaagcgatgatacccttcggatcgtcagttgtgtggttcggctgcagacgggaagagaatgttcccggaagaccgatcgtggtattacaatgtgcggatacacgcatcttctttgctgcgtagatcaggtccaggttgctcatcagcttgcagacacctgcaacgatctcagatgtaatacccttggatgctctgcggatcatctccggtgttgtggagacatccagcagccactcacggaactctgctaccgtccagttcttcatggtattgaagatctgctcatttacatcatcctgaatgattctggttacctcatcctcttcatatggaaccgccggattatttctcaggtcattcagcgtcagatttgaaagaacgaattttgctgcaactctttcctctgcagtttctgcggcgatacctgccagtttgtcgccggatttttcctcgtttgctttagccataacttctcttacagatttgaattcataaacatggccaaacagctttgtctttaaaatcattcaatatcacctctttctaagtattaaacaccaacgttttgttgacgaccggaagcacctgtcctccgacaagcggctctccgatgtcgagatagtcaccgctcgatgtgtggatacggtcaatacagataatcggcttctcatgatgcagctttacattcagcgcatttccgagtacttttccgatgtcgtgctccaccacaacgatcagcggatacggactctcaatcacctccctggctccttttatgataacgtctgccagctcctggatttccttaaagctggtacgcttctttccaagaaaagcaatcgccacatgttccagctttccttcggaacggaacatcggaatctgatttctgatcgcctcttcaaatgtattaagatcttcctcgtcctcagctgagaccttaagaaccggaatattcttaatcggtaagtaagatttgtcgtagcggatcgtacttccgctgacatctgtcgcatgtgtacccgcgccgactaccgtcgcacggatcgtttcctttgacctgtaaagtgtcagtccggaaagctccttctgcgccaggattgcccgtccgagcagcactccgatgtctccgtatcggaacggatcaccgtcctttgcatcgtagatgcagtcagccacaccgccggaatacgtaacggcgagcagtttaggctcttgcgggagcatggctccgtcattcgtatacagtgctttgtgcgcatcatctgccggaagcagatgaagcgattttgcaagctcatctgccatcagtgtacagatcttatacagcttgtcctcgtcagcgcgctcaccgacagaaatgtggattccatgatcctccgcaagcttcttcgtcttgtggaaaatataggaaattttcccatctgtaaccttgatcagacgtccgccgatatccagacagcacacgccgcgaagcgttcccttctgatataccgcgatattcgtcgtgccgccgccgacatcaagattggctactacgctgcggtgctcctccgaaaggacatccgttcccgcgccccgcgctgcaagcactgactccagatccggtcctgccgttgctacgacgaagtctcctgcgaaatcagaaagtgctgcaagcacttcattggcattctgctttcttgcagtctcaccggtgatgattaccgctccggtggacagatcctccggcttcatacctgccgccttatactcctgacttacaatcttctgcaccgcttccgcatcaatttccgttgcggagcgaagcggtgtgaaataaattttgcttcgataaattacttctttttcaacaatcgatactcgcggcacattgtagctgcctgccacattttccacaacgatacggctgaataccagctgtgtcgtcgaggtaccgatgtcgataccaatacttttgatttcctgtctcattccagcctcctggttatttccgtacagcaattgctggctgttttcacacggggctgtctgcttccgcacagcaggcctgccttgcatcctccgcactgcgaagcatgcatttctctgattacaggatgtgcagatcctcgaccagcttatttactccgtctcctgtcaccgcactggtcacatagagttcgccggctccggcatccttcagatactgctttgctctttcgatctgctcttcactggccagatctgcctttgtcacaatgccgacacacggttttcccgaaaacatgctgcaaaacagcggcgggaacatcgttcctccctccgttgcatcctgcaccatcaggataatatccgcatctgcggaggtaacgaccagcgctccccgaaatccccggcgttccaggtattcccccggcgtatcaatcatattctgattgataacctgtacggtctgtgtcttgtaataacggagttcttcgttattgatccgctggcataaggtagtcttcccggcagttgaccggccgatcagaatgatcctcttttttctttcttcgtgctttgtctgagtgctcatgtctttgtcaccggagcccttgcaaatcccatccgatcacagagcactcccatcacatcccggatcgccacctctacggctgcgacatcacccgtaataacaagtgagccattgaaacgatctacaaagccgacccggatatctgcggatttgcttgcgatatctgccgcgatcatagctccctcactcggtgtgatcgtcataattcctatcgcaccctctgcatcaatcaatccgagctttccatacagattcttatccggactggcaataacatgtgccaaagtcacctgcttaccaggaacaaattcctgtataatccgctcttttccttcaaattctgacatttagttcctccgtctgcaacggcttcctgccagctcccatccaataccgatcacggaatcttgcccataaaagccttgcggtaaatttccttgatatcctccaccgtaaccggtcttggattcgtcgcggtgcagcgatccgcaagcgctgctgctgccatttcgtcaagctctgcctcgaactgctcctttgtcacacctgctgcttcgatcgtgcacggcatattcatcttcttgataaaggtacgtgccgtacggatcatgttcagtgcgctctggcgaacactgctcgtatccagacgaagcagtctggaaatctgtgcataccgctttgcggtcggtgtcagctgatcgacacagcctgcattgaagctcatgacgtacggaagcagaataccgtttgctcttccgtgcggaatatggaattttgctcccatcgcatgtgccataccgtgattcagtccaagacctgcattggaaaatgcaactcctgccaggcaggatgcgttatgcataccctgacgtgcctttgcgtcattcgggtttttataagccgccatcagataatgattgaccagtttgattgccttctccgcacatgcatcggaaaaatcatttcttcctgtggaaacgaatgcctctaccgcatgtgtgaatacatcaattcctgtatctgcagtcacagaaggcggtgcactcattacaagctgtgcatcaagcactgccacatccggaagcaggctgtcatctatgagcggatacttgattccgttcgtcttgtctgtaataaccgcgaaacggctgacctctgaaccggtaccgctcgtcgtcggaatcgcgataaactcaacgtgattttccacagcgcctgtctttcttgcaataaatacgatggcctttgctgcatcaatggcagctccgccgccgagacagatcactgtatccggcttaaactccgtaattttttctgtacctgcagtcaccataccgatatccggttcaccggcaatatcggaaaatacctgccattccacacctgccctgttcagcttgtccgtcacgtaagacacctttccgctctgtgccataaagctgtccgtaacgacaaatgcttttttcataccggcagtaagggaatccagaccatcgcccataataatcctggtctttaatccaaactgttccataagtgctcctttcctgattttttgttaccatccaaagaccggcagccttgaatcactgcgcctccctgtgaagcgtttatccgacctgccgatctgaacagttataattctgatgccaggttcacaaacagtctcctgtccttcgccccaggcatcagttgtgcagaaatgaggcaattgcaacggtgtatgccggcaggcctcttttctgccacaaaagcggcattccgagcagctcatctgagattcttccaagatcaaagccaagcccggaataggaataccgcatcttttccgggtatcggcacggttctcccttcgcccttgcacacgtccggcacaaggtacagcctcctgccatgatcgtcgttgaacccggaaactcccgttcaagtgcaagcagtgcctgcagcatttttttcttggctgcttcgtacgtctcctgtctcagctcttccgtcctctgcggtgaatgctccgcctccctgagcacctgttcatcgtattttaccttcagcccgatcacctgcacataccgataacctccggcaagcgccgccgccgttgtcattcccggcggacaggaccagttctttccgtactgcggacattccctgcataaaggaacaaatttttccggctggcaatatttttcaagccactccggaacggtcagcgtctttacctgcacctcgacctgatacatcttctcacctgcctgtaaaatcaacacagatatttataaggtctgcttacagccaaatagctgcttcgcagtctgatttagtcctgtcttcttctctttctgtctcttcaacgtcctgagcacgccatgctcattcggttctgaaaaaacagagcaaacaaaaaagcacctgacttgttcgatcaggtgctcccgagggggcgaacgcacacagattgaactggcaggtcctgcttgtgcgttccgcaaaaaagaggtgatataacggattgccgtcttgttcgcacacataatatcggagtctcttcgctgagcatctccggcaagctgcgcttcgtcgctgcttttgcacactcccggttccggggagtcttacgtgcgttatatacaggcaggtcttctgactctggcatcaaacacggctgtttctcttctcaggacacaccctaatgagatataaacagccgctactccaacacagcaacggccttgtacgggatttacacccgtttcccttttcacctgagcattctctcagacacctgtataccaattcggttttctaggggtaggataccatttctgagcacggaagtcaagtgaatatacccaataatctgtgccatttttttctttttttgcaacatattaacaatgtgctcagtcggtttttcgtgctcagcgttctgtttcttattttttcgtcagttttctgctctttttctgtgttttttgcctttggctgtctttgggaaatttacttttgtcacctgctcacggtcacccgcccgcgttcagcttttcctgccatcatctggcttcttttctttatcgaagccgatatccgcaactgaagcaggaaccttgactgacccggttaaaaaaatcttaactattctttccccattccggcgttttctttccttgcttttacgtcattcttttcctataataaatatataggtaactgttcagagccaacctccaaaatgctacgcatttcgtcggtgtggcgtatccgccaaataaaatttcaaaaacaggaatcaagcagatattcgcaatccgctttcgctacttgcattttccgcctgttttatgaaattttgcctggctctgaacagttgcatatatagtaaataaagcacagattttatgctttgacgtaaggaggataggaaatgtcaccttttcttaaagacaaaagaaaacgctgccgcacaggcgcacttctattgctcgccggttctgttctggccggcgcagtcccgaacaccggtgaacttccaaaaattccggtcggcggcctgactgtatccgcgcaggagcttgatatcgaatccatcgaggcgatgcagggcggcggcgccacaggagccggacagaacgctgaaaccgtcgatgggcagggcacttctgccaacagcgacacgctggcgggatacggtaagccatccgataacggacagagtgcggatggtacgcttgcaggtgacggacagaacccggatgatacgcttgcaggcgatgggcagaatgcagatacctccgcgcagtctgaatcttcatttacggacgaaaaactcacttccgtgctcgcgcagatccaggcttcgcttccagcttcaaacggcgactgggcagtatatgtatgcgatctcaaaaccgggtcagagggaagcatcaacgaccaccggatgcaggcagccagcctgatcaagctctatatcatgggggcggtttatgaaaattatgatgcactcattgcacagtacgggcaggatacgatcgatgccagcctctactccatgatcacggtaagcgataatgatgccgcgaacgcactgaccacgtatcttggctccggcgattcttccgccgggatgcagattgtcaacaattactgcctcgcgcacggctatacgaccagcagtatggggcggctgcttttgcacagcaatgaatttggtgacaattatacgtcagtggaaaattgcggaaagcttttgaagatggtgtactgggacggatatctgcaaaaaataccggaaaacagggacacagacgagaagaccacggaatctgacctgcaaagtgaacaggtgacagagaatatcgcttccaccgaagacgatactgacgaaatcaccaccgaaaatactactgccctgactccgcatgcctccgacatgttcgccctgctctgtgctcagacaagacggcacaaaattccggcacagctcccggatggcgtgcgcacagcaagcaagaccggcgagctggacgatgtggaaaatgacgcggcgatcctctacgacacagagaacgacctgatcatcgtctttatgtcggaacacctgagcgactgcggtgctgctcagagcacaattgcttcgctgagcaggcagatttatgatgcttatcactaagtagcgcagacctgagcacttttttatctctgcatcgctataagtaactgccaactgttaaaaaagtttccggcaaatgaccggaacgaaagggggattttacatgaaaacaaaaaaaatgacctggctggctctgcttgcgcttatcctgacgcttgcatttccatccgcagcactctccggcaaggcagccggaaccacctatcgcgtcacggtgagcagcggttatctggctctgcgcaatgatacggcttacgatgcttccaatgagatcggcaagctttacaccggtgacaccgtcgagctctgcgatatgacaacctcggcttactggtttgtctattcatcgaagcttgacaagtacggctatgtcaacaaagactatttaaccgccgtatcttccactccgatcgtttcttccggcgattacacggtaagcgtctcaagcggctacctcgcgcttcgaaatgcgaaagcctttgacgcttccaacgagatcggcaagctttacagcggcgataccgtacaggtgcaggataccagcgattccacctactggtatgtatactctccgaaactcggagcatacggctatgtgaacaaaaattatctttacgcctcaagtgctccgatccctacggcctacacctggaccgtaaacgtcagcagcggttatctggctcttcgcagtgcaaaggccttcgatgcctccaacgagatcggccggctttacagcggcgataccgtcgaggtcagcgattccagtgattcgacttactggtatgtgtactctgcgaagcttggaaaatatggctatgtcaacaaaaactacctctacaacggtaccagcggagtcaaagagacgcgcatcgtcagtgtaacctccggctacctggcgctgagaaaccagaaagcatttgatgcctccaatgagatcggcaagctctacaccggtgatacggtgcagcttcttgacaccagcgattccacctactggtacgtatactccccgaagtatgacaagaacggttacgtaaaccgcaactatcttgtcacggatacttcctctccggctccggtcgtgaccaaaacggttcgtgtaacctccggctatctggcgctgcgaaacgatacggcgtacgatgcttccaatgaaatcggaaagctttataccggagatacggtaactgtcatcgattccagcggctcc

SEQ ID NO: 4395 - DNA, 11145 bp, Unknown
  16S sequences of unknown bacteria
aaaagtgctaattcaaataccgcacttttttcggtcaattatattgtatcaggagattaaaagatgaaaaaatttatttacatgtttctgacggcaattctggttatcgtatcgctgttttccgcggtcggttgtaaggacggacaggaatcttcggaaaaccagaaatacgacgtgacgatcaaggtaaaaaacacgttgggagaggaatggatatttacaccggaaatagaagaaatggaatacgaaatggaatatacgggagaggacgtggatttttatgtagaatcataccagctgagagatcatccggaatggggagatctctggctgacgcccagccgtatagattatccgaatacctttaaggtctacccgtttctttatacggatccggagggaaatcaaagtgaaaccaattatgtaaatgagaggggaaaatatgttttttcctgtgatgcaaattcaagctcaaccttatggaattaccgatatatcaatttatatatcacggttgtttaagagaaaataaaaaaataaaaggagataaacaaaaatggtaaaaacagcaaccttgaagaaagcggcggccgcaattctttgcgccgcggccctgttgttcggtgcgatcggcgtcgggctgatgaaccgtccgttgacggcgcatgcggaaagcacttatttttccgagtcggaatatacggacagcgatagacttctgaaaagcgacggaagtttatcgacaaaaagaattcaggctttttccgatgaagtaaaagccgcagaagagggaacttctttctcggagctgacggaagtcattccccgacagcacctggaatcgacggaagaaaacgctgtattttcctacaacggagcggaatacgggtattatatggctaaggaaggagagtttttcgacctgctgctcatcgatttcgattatgaattcaatgaggaaaaagtttccgaaaacgagtattcgataacgataaaacctcttttacaggaaagttttaagcgcgtgacggacggggagggaaattacgaatggaaaaaatacggagaagggagatataagtattatgtggcgaatccccgttttatcagccagcttcaaaacgagaacgcattgaactacggagacgacggatattcgaagtatgacgacgacgggatgatcatccagcagatgcgagcgaattacggaatcatcagatatcaaacagaagaggacgccctggaagtgatggggaaatgcgttttggacaaagtcgtcggcatgggggtagatttcgtggtagacagtctgaatacaataaccggaggccttttcggaacgattgtcgacttagtaaatttagggcaagatttgtacgagcaagggaaagaagttacaatatcggcaaacaacgaaaacaatatttttacggaattgtcgaagaacgaacaactgaaagatacccaggtgcgaggtttttcgagaatagcgggatttcttccgcaacaggaaatgattctttccgctgccgacgattcctatgcccagtgcgtcgtgcttttaagcgatacgaattacaagagcaggctgacgcaggcctgtgaattcgacatcgtaaggcgggcaggcttatacgattcgatggaacacgtggcgggtaactgggaagacgaaaacgcggaatcgctgtttttctcgaaaaggcggattttgttcgaagacgaacagccgaaattcgaactggacggaaatgaagtcaacggcaaagaagtaccggtctatcttcttccggaaggaaaacaggtcattacgtttacgcccgaatattcgggattgtatacggcggaattgggagcgacggacggagatttgacggtcacaatccgggattcggccggaaataccgtgaagaacgacggcggatatgaactaaaaggaggagaggcctattccgttatcgtcggcgcaggggaagagggagcaactacttccctcggcataaattttgcggaagggaataccaaaggaactattgaaagcggggaaaagagaattttcaaaaccaagatctggcagtcggacgtctataccctgaatacgcaaaacgggaacgttttgatagaaaatattttcgccgcgtcttccgacggtttggaggaatattccgggttcagcggctatacggcaagctcgaaagtgagcgtgccgctcccgaaaggagaatattttatcgtaatacataattcgggaacgataaaaaatgaatacgagctactggcgtcggtgtgcgaatccaagccgatcggagaagaaatttccgtgaaactcgacgacgacaactttacctttttcaaattttcgggcatggaagcaaaaaaatacgtcgccactctgaacgacggggaagacgggaattatcgcgtcctcgattccgaattggagcctgtttctttcgatttaacggacagcggcgtttgctatttccaaaattatgacgaagtcatttacataggacttaaagcagagaaggcgaacggcaaatttattctcaatccgacggaatatgcctttgcatggtatatagacgggaaattagtggagagttcccaaatttctttggaaagaggggaaacttattctttgatattcgtgataaacgaagtgatccagataaacggatatagtttggagttaccggacggcaatgaatacatcagcttggaaaacaacaatcttatcatcagcgacgcatgtccgacgggagaacgctttcggatacaattccgatataactccgtcgccgtttacgacagcgacatcgaggtcacggtcaaatataccttgaattttgcgggaatcgacagcgtaaacaacggcgagagcctgacgttcagttggacgtataccgaagaagatattacggaaatcaattacagtctgatgaggggaacggagacgaaaatttataccgtctatacgagcggaaaaaccgttggaagcacatacacggaagacataacgtctgagaccaagagttttaccgaaaaattcggggaagtggaaatcaaaatttaccgcgtcggcgttgagacttcgaagggagtggagtatatagatttcgattcttccgaaagtgtggacgggacttacggagggggacagggaagcgccgaaaatccctacctcatttcctgcaacaggcatttctataatctcaaatataataaaaacaataatatatatttcaaattgaccgaacttctgaaactcagcaccaggctggatatgttttacggccatttcgacggcggacctacccgaatcgaatttgagtgcaacggttcggccgacttaggcgtgtttcagaacaattacgggacgatcgaaggggtgcatgtggaagccaatattacggggaacggaacgtattgttatgcgggcggaatcgcttgttataactacgattcgggaatcataaaagattgttcgataaattttacagggacgtttaacacgatcaaaggagtaggaggaggcattgccgccgtcaattacggaaaaatcgaggattgctggtcgtcaaacgtaaaggtaaaagtgaacggcgatttcggaggtattgccggaaggaacagaggaagtattatttcctgttattcggtgggaacaattacactgaatatagaaaaatataatggctcgtatcagaattctcatgtgggaaccattgtcggactcaacgacgggggaaccgtttcttcttgctatataagtactagtgaccacgctactactatttatattatcgtagacgatgtggacgataaaaatttagccccttacgtggggcctatttacggacaaaacgacggaggaaccgtgacaaattgctggaaggacggatatgtcaaaattgaaacggggaatctgcattctttcaaagaaggggttaccaagtacgaccagacgagaaatattaacgacaattacgacgtttaaacagacgcttcacacgatctcccgacggcggtttctgccgttcatctcccaaagcagggaagagagtccgtccgatatgatttccgccatagaatatacgagattcagacgcgtcgtattcaaaagcccgtaattcaggaccgatttctccgctacgattcccataacggaaatatctccgatactccccagcttcttattggctcccgcgccgggaaacaggggagtatcgctcacttttatcagtccgatgtctccctcgctccctaccgccgcgtctaccgcgataatccttctgccgcggtgcgtctctctcagaaaagaacgcatgtatttgatttccttcgccgtcacgggcgccgacagcgtaccgtacaaaaacgaacagagcccctgcgtcttatacttcaacatggaacctacgatcggccccagactgtccccgattgctaaatcgcttccgatacataatactaccggcaattcgtcctccttatgcgattcctttttcttgctccgagagggttcgcgcagaaatttatccaccgccatcgccgttccgtcggctgccagcttgttgaaaagattgaaacagtattccataaaagggctccttaaaacttttacaatcggaaagattattgccctttttcctcccgttatacccccttccgttgaattttttcgccgcggggctcaaagacttgaatttcatgaaaatatatgttacaataaataaaacttcgcgcggataaaaacttccgcaaaaggcaaaaaacatttcggaggaaatctgaccgtgttcaatcttttggcttttcaagccgcttacgcactcgatatcgcctgtgcgctcatattgattatctgggcctttatcggagcaaagaaagggttcgtgaaatgctttttcggactcgtctctaccttgatagccctcgtcctcgccattaccctggcttccaccgtttcgggctggctcaattccgctttcggtatgaccggatttttcagcggaaaatttgaaaatactttcctcaaaatcaacggcttcgacgccgatatttcttccgtcggcatcgcctccgctctcgaaaacgtcaatctccccggatttctcaaagacctcattttgaaaaatctcggcgaggtaaacaatcttcccgccggcactaccctcgcaagtcaggtcgctcccgtagccgctcagtttgtcggattgctcatttccggtctcgttatttttatcgtcgctcggcttctgctcctcatcgtcgagaaaattctttcctcgatcgtgcgctcctggtccgtggccgccgctttgaacggaatcctcggcttcgtcgtcggcgcgttaaaggctctcatcgtcatctgcgccgtccttgcactcctctccctcattccgtccgacgggctcgtttctttcttcgataagaccatcgttttgaaatatctctttaacgaaaaccccttgacaaaacttttgggcttattcatcaaattctgaccgattcggaaatgcaaagcggcctacttttccgcggcatagcggcatataagtattatacattgtaagcacaagcgagcttacctattttactgtttaatttgtttgttttatagtatctgaaaaataaataacgatttagcgattattggcatagacaatatggaaataaaagagttaaaaaagaaggaccataaaaaggttatacaatacgctataaaaggtatgcacttcggtttgtaccttaaagataaatttttgctgaacgcatacggcaaatatttttggtatctggaatatactaacgcaacgcaaataatagcagtttatgaaggcgataaactgttgggcgttcttcttgccgatatgaaaggcgagaaaaagccgtacaaatcgttccgtaagaaattgtatataaaatttatagactttattcaaaaattgtttttcaaaggcggcgttatgccttatgaagaagcaaataaggaaatgtttcgtgcatattcggaacgatacaccccgacggagaaatacgttttttagcggcagatcccgacgcaaaagttaaaggtgtaggaacaatgcttttgaacgagcttgcacggagagaaaacggaaaagagctttatttgttcacagacgatcaatgcacataccaattttacgagcatcgtggatttgagaaaataggagaaaaagatattgtccttgaattagataatacaataaatcttaaatgcctgctgtatcataaaaaattacaaacataaattacaatttatataaaataaaaaaggagcaaagattattggaaatctctgctccttttttatccctatgggaattgccgaaaattttatgcggaaaatgcaaatattccgatgtggaaaactgtggataacttcttctctttttgatttatccacagaaaaaacagcaaaaaatgggggataggggataaaaatatgtctgctatcccctgttttttcgacttatccacaagaaattttaagattttctccaatgatttattcgggaaattgatgagttatccacaattttgcgtaaaaagggggaaaaatccgcgtttaagctcaaaaaattatttagtttgcgcatttttttaaaaagttatccacaataatctgaaaaatcgtgtggacaacctgctttttatccacattcgacgtggataacttctgaaagcgagaagaaaatatgctttataaatttatctttgtataggttcatttcgattatacggtttcatgtgaaacgattcggggatagaaaagggaaaaaaggaacaaaatttcatacaggaaggaaaaacaagggaagcaaaaagcggtgaacgaagaaacaaggcgggaaaaagaaagccgtaaaacggggaaagggggcaaaaagaaagtttttgttttatcgtgttaaatttgtgaatgtttgctaaatgtttagaaatttataccgcaaacgcttgaaaaaagagcggccttgtggtaaaatgtaaaagagtcgtaagacggaaggagctttatcttccgcctgcccgtttcttttaagaaaacgggctcggaaacggggcttttaagcagtatcattttcaaggagtcaagacattgaacaagaaaaccaagacaattatctgggtcatcgtcgccgtcgtgctggtggcggtcctcggaatattattcgcggaaatcatttccccgagatataccgagctcacctttacggagttctatgaaaaggtggctgccggagaaatcaatcaggtttatgcggacggctataacctgaaaggcgttttgatcgatgcgtcgggcaaaggaatggcatattattccacggtcggacctaacccctatgacgcggcaaatcccatcattcaagagtggattgcgaaaggcgtcgatattatctacaaagaccccaatgcgggcagtatttggtccagcgtcattaccatgctcggcatcgtgctcgtcgcggtcatcttctggctcatcatgcgccaggcggccggcggcggaaaggtcatgaatgtcggcaagaccaaggcgcacgttcaaagcaacctcaaagtacgcttcgcggacgtcgcgggcgcggaagaggaaaaggaagaattgcaggaagtcgtcgagttcttgaaaatgcccaaaaagttttccgacctcggcgcgagaattccgcgcggcgtattgctcgtcggccctccgggtaccggtaagacgctgttcgcaaaggccgtcgcaggcgaagcgggcgttcccttcttctccgtatccggttccgacttcgtggaaatgtacgtcggcgtcggcgcggcacgagtccgcgacctcttcgacctcgcaaagaaaaatcagccctgtatcatcttcgtcgacgaaatcgacgccgtgggccgcaggcgcggcgcggggctcggcggcggacacgacgagcgcgaacagaccctcaatcaaatcctcgttcagatggacggctttgaaacgaacgagggcgtcatcgtcatggccgcaactaaccgcgcggatattctcgacccggctctgcttcgtccgggccgtttcgaccgtcagattcacgttaatctgcccgacgtcaagggacgcgaacaaattctcaaggtccatgcgcgcaacaagcccatggctcccgacgtcaacttcaagaccgtggcgcgcatcactgccggcttctccggcgcggatctcgccaatcttttgaacgaagccgcgattctcgccgccagaaacggcaaaaagctcatcggaaacatcgagctttacgacggtatcaataaagtccttatggggcctcagaaaaagagccgcgtcgtcaccgaagccgacaagcgctgcaccgcgtatcacgaggccggtcacgccattctcgcatgcctttgcaagcactgtgaccccgttcacgaggtctccattattccccgcggcaacgcggcgggatataccatgacccgtcccgaaacggacgacaacgacgtttcctacaacaagctcgtggacaatatctgcatggttctcggcggccgcgtcgcggaagagctcgtcatcaaagacgtcaccactggcgcaagcaacgatttacagaaagtttccgatctcgcccgccgcatggtcacgcaatggggtatgagcgaaaagctcggcctcgtcgcctacgattccgaccagcccgtgtttatgggcatggaatacgaatacggcggcggcagccgcaacagctactcccaaaagaccgccgcggaaatcgacgacgaaatccgccgcttggtcgcttccgctcacgagcgcgccgttcagcttctgacggaaaaccgcgcgattctcgacaatatgtcccgcgtactcgtcgaaaaggaaaccatttacaccgaagaagtcgccatgctcatgaagggcgcttcctattccgaggttatcgattttatggataaagaggaaggtaagcgaaaggataatccctttgagaatttctccaccccttcccccgaacatctgactccgaaagtattcggaaactgagtttttgacctatgccgcaatatatctgcggacatacgaaagagccgaggaaatccttcggctcttgtctttatagacaggagtgtttccatgaaacgaacaagaaaaattcccattcccgcctcttctgccgaagaaagggaaatcgccgtcgcagacatcgattgcgcggacgacggcgcgcgatatgaagaacagtctatttccgacggcggtgcggcaggtgctccgcccgaggcgctgaaaaagcgcgccgcttatctccttctcaacggcgtgcctccgctcgtcgtcaatgaagagaaggggggcaggtatcgacttttggccggaaaaaacgatctcgccgcggcaaagctcgccggtatttcctccgtccctgcccgaatttatcgattttccgaacgcgatgcggaaatttttgccctcacggaaacgctcaaaagggattccgccggcgccatggaaggagcttacctcatgaaaagactcatttccgagttcggctggacgcaggacgaaatcgccgcgggaatcggaaaatcccgccccgccgttgccaattccctgcggcttttgacgctcgcgcccgaggtcgtgggactggtcgaaagtggcagactctccgccggacatgcccgcgccctcgtctccgtgcccaaagaaaaacaattcgcttttgcagaggaggctctcaaacgcggatattccgttcgggagacggaacgcgccgtcaaggctttcctcactccgcccgaagtccttcaatcggaaaaggccgcggccgccgcagccaagagcgcggagctcaaagcgctcgtcgagcgcatgcgcgcggtgttccgaactaaggtttccctcatcggcaacgacaaaaagggcagaatttatatcgattactatacgcccgaagatttgtatcgcttcgaggaaatgatcgccgttctcgaaagcagccccattttcgactaacgcgcgcgacagttatataatataggcaaaacacgcgaaaggaatggagcgcaaagggacgggagacgtaaaagacaggaaagagcaaggggacgggagacataaaaaacgggaaagcgcaaaagagacgataatgcgggcgcgcctcggacgggaacggaaaaggcgggaaatcgaaaagtaaaaaagagccgttctcccgaaaagagaggacggctcaaatcatttccccctgccggacatccgacagggggaattaagattatttcgcaaagagcaaatgtcccgtgatgatgagatagatgaggtcgacgatgcaaagtaaccacgtccatcccacgagcaggaaaagcaggaagattacgatatgcacgagactttttgtcctcagcatgaccgacagtctgatgagacattccacaatccaaccgactacgggcagaatgaggagcagtactttcagcagtctcgattgactgttaaaccatttatcaaatgtcatgatacagcctccaaattttgtttcagtacttatattataccataatataaaaaataatgcaatacctttttgtgaaaaactttacttgtcttttttttcgtcctcttttccgttgtttccgaaatctattcccgacaaatcgtcgtgtctcgcccgcttttcttcctcctcttgcttttgcttgcaaagcagcatgagtccgaaaaagagaaaggcacccagaacgcagatccccgccattccccaagaaaccagcgcgccgagcggaatgaccagcgcgacgaataccgccgcaatcagcgtaaacaaaatccgcagtgttttcaagataaacgcctccgatagattcttcggatttattgtagcacaaaaaagaagaaaaagtcaagtgtgcgggtgtagtgcgggaggtcgagaaaacgaaaaggaagggagaaatcgcaaatacgacggttttttgcttttaattccgattttcgcactccgataaaaggtgagacgacaaaaaaatacggtccggcgaaaaaacctcgaaaaaagtaaaaaaaggtagataaaaagagttgacaagagggaaagagatatggtaatatagacaagctgt

SEQ ID NO: 4396 - DNA, 32759 bp, Unknown
  16S sequences of unknown bacteria
gttttcgcctataaggtgtgtttgcgaggcacatgtcctcgcaaacacggctcggtaacccgcctccgcttttttcgttttccgaatggcagattccccttttttgacagcctgagggcggaagcaagaagcttccgccctgtctctttgatcccccccgatgacggctccatccgtttttctaacagcagcttgtgaaaaatataacattatccgcccgccttttggggtatctgccgaaacctgtcgaatcccttgtgaagggccgcggttttatggtatactgggctgtcttctccaggcagactcgacgggtaaacgccggcctaagcgcgcctgcttttacctggaaaggcaggacgtgaatggaaaccatcaccgcgtttatccgggccgcgcagggctttctctgggatcatctgctgattgtcctgctgtgcggcaccggcttgttttttaccataaccctgaagggggtgcagttccgccggttcggcgcgggcctgcggcagatgttttccggcttttccctgcgggggaaaaaggcgggtaagcatggcatgagctcctttcaggcggtgaccaccgccatcgccgggcaggtgggcaccggcaatctggccggggccgccaccgccattgtcctgggcggcccgggggccatcctgtggatgtgggtggccgctctgctggggatggccacagtgtacgccgaggcccttctcgcccagaaattcaaaaccgttgacgccgacgggcagacggtgggcggtcccgcttactatatggagcgcggcgtgggccgccggctgggcaaatggatggcccgggttttcgccgtgctgatcatcctggccctggcctttgccggtaatatggtgcagtccaactccatctcctccgcctttgccacctccttcggcctgccctcctgggtgatcgggctgatcgtggccctgttgacggcggtcatcctgctcggcggcatcggccgcatcgcctcctttacagaaaaggtggtgccggtgatggccgtcctctatctggccggctcgatcgtggtgctgggcatgaactatacccgcattcttcccgccctgggcagcatcttcacctgtgcgttccatcccgccgccgccttcggcggcgtgggcggctatacggtgatgaaatcggtgaaatacggcgtagcccgcggcctgttctccaatgaggccggcatgggatccaccccgcatgcccacgccgtggccacggtttcccgcccggaaaagcaggggcacgtcgccattgtcagcgtctttttcgataccttcgtggtgctgaccatcaccgccctggtgatcctcacctccggcgtgctgccggaacggatcgcccccgacgcgggcatcgatgtgacccaggcggccttttccgcctccttcggggccgcggggggcccttttatcgccgtctgcctgatgtttttcgccttttccaccatcatcagctggtattattatggggaaaccaacgtccgctatctgttccggcggaaatccgccgtgacggtgtacaagctgctggtcgtcgtcttcgtgttcttaggcagcctgtttcaggcggacgcggtgtgggccctggccgacgtgtgcaacggcctgatggtcatccccaacctggcggccctgctgctgctctgccccgtggttttcgccatgcatcgggaggatcgcaaaaactgaggcgttcccgggtgcctgccatcgtccgcaggaacagctggttaaatcgttcccgctcgtcgtaaacgatgccgcggccgggtgaacagccgggtcccgcgatgccctgccccgcgggttagaattatagacggtgattttcacgccgtccatcgatcggacggcaaacaagggagccctcccatttctctgaaaatagcccccgcctgtttatcctattgaaaaggcccgcccggggttcccacgcgttcaccgttttttcacgaaaggcggttgcaatgtgccccgttatattgtaaaatggtagcaagcggagggattctccccgccgccgtcatcagcggcatacccggcacgcatgctttggacacggcgatcaggcgggcgaaaacccggccctgtcggagcgcggaccgcgtataccgggaaagcagaggaaactgtcttatgtccgtgtctttggaaacccgttatctcgaaagctttgtccgtcctcatgaattgggcgccctgcagccgcaggtcacggctgctcacgagctgctgcacgccggctccggcctgggcagcgattttctgggctggctcaccctgcccaccgattacgataaagaggagttcgcccgcattcaggccgcggccgcccgtatccggcaggataccgatatcttcatcgccatcggcatcggaggcagctatctgggtgcccgcgccgccatcgaatttctgaaatccccgctgtataacgcgaaaaagaaggacacgcccgacgtctacttcgcgggcaacagcatctcctccgccgcgctgagcgagctgctcgagctgtgcgagggccgccgggtgtccatcaacgtcatctccaagtccggcaccaccaccgagccggccatcgccttccgcgtcttccgggattatctggaaaagaccgtgggcagggaagaggctaaaaagcgcatctacgtcaccaccgacaaggcccggggcaccctcaagggcctggccgatcgggaagggtacgagacctttgtggtgcccgacgacgtgggcggccgcttctcggtgctgaccgccgtgggtctgctgcccatcgccgtggccggctgcgacatcgccgcccttatggccggcgccgccgccgcccagaaggagctgaccgatccctccatcgagaacaatgactgttataagtacgccgccgcccgccatgtgctgctgcgcaagggccgtgccgtggagctgatggtcagctacgagccctgctacgccatgatgtccgagtggtggaagcagctgtacggtgagagcgagggcaaggacggcaagggcctgttcccggcgtccgtggttttctccaccgacctgcattccctgggccagttcgtccaggacggctccaacattttgttcgaaaccgtggtgctgctggacaaggccccccgagagctgaccatcgaggaggatcccgagaatgtggacggcctcaatttcctgaccggcaaaaccatggatttcgtcaataagaaggccttcgagggcaccgttctggcccataccgacggcggcacccccagccttgtcatccatgttcccgaggcgaaggaggaggcactgggctatctgatttatttctttgagaaagcctgtgccatttccggttacatgctgggggtcaatccctttgaccagcccggcgtggaaagctacaagaagaacatgttcgccctgctgggcaagcccggcttcgagaacgaaaaggccgccctggaaaaacgcctgggccgctgaatcccgtttactccgtttaacaccgcgcacggcggttatactatatacactgggaggaattgattatggtaactctgatcctcggcaagaaaggctccggcaaaacgaaacggctcatcgacatgtgcaacgccgccatggcggcgtccaagggcaatgtggtgttcattgaaaaggacagcaccctgacctatgacctgagccacaaggcgcgtctggcggtggccgacagctacgacatccagggctttgattccttctatggcttcatcgcgggtatgtgcgcgggcaactatgacatcaccgacgtcttcgtggattccaccctgaaaatcggcggccgcgacatggaggccctgttgagcttcgtcaagaagctgcaggttctgtctgagaaagcgaataccaacctggtgctctccgtctcggcggataagagcgagatccccgccgagctggcggagctggccctgtaagaacggcaatcgaaaaccctgaggaagcggagaaccggctgccggccgattctccgctttcatcagaaacggtaaaggaatggtacggccatggcaatctggtacgagggcaatctgaacaaatcggagaaccggcatgaggaaaacggcgccgtctattacgtgcgcggcgtgcgggagtcggaaggccgccggtatgagcggtacgccgtcgccacccatttcatcgagcggggcgaggactttgtggaggtgatgcgccggtacgtgtcccctctctatcaggagggggacgtggtcaccctgagcgagaaggtcgtttccatgtgtcagaacaacaccgtggagatgaaggacgtgaaggtgggcttctgggccaaatttctctcccgcttcgccacccataaccagaacggcatcgccatggacgagccctataagcttcagctggccattgacatgaagggcctgcctttgatcctctgggcctgcttccgcaccctgatcggcaagttcaccggtcaccggggcgtgttctatgaaatcgtgggccaggatgtggcgggcatcgacgggttttacagccactccgccttcgagacctaccacaccctcgccgtcctcaatccgaaggatcccgacggggtctgccggcaggtgaaagaggcgctgggcatttcctgcatggtggtggatgccaacgacatcgatgtggagatcctgggtaaatcccccgatttggcggacaagcccgctgccctcctggccgacctcatccgggacaaccccgccggccaggatgacgagctgactcccttcgtcatcgtccgggacatcggcgaccgggaggccatgccctatgtgccggtggaggccgtggacggcccgccccccgagcactgacgggccagcgaaaacggcatagatttggcgggggcttccccgccgggaggcagctttatggcatatccatttgagatgcattttcataccgacgaggtcagcccctgcggcaacgtccccgcggccgaggccgcggcggcctaccggcgggagggctacgcgggcgtggtggtcaccgatcactacgccgcctataatttcgcccgcttccccggcgattgggatacaaaggtggacgcctacctggccggctaccgggccgcgaaggcggccggggagcccctggggctgacggttctcctggggctggagctgcggctggacggggcggaaaagaccggggagccggccctggacgccctgcgggattccatcaacgaatacctggtctacggcgtgaccgaggagcagctccggcgctaccccgcgctgtataccctggatgagaaacggctgaaggcactggcggagcagcttggctggttcgtggcccagtcccacccctgccgcagcggcatgaagccctgccccgccgcctacctggacggggtggaggtcatgaacggcaacccccgccataactcccacaacgaagacgccgcctccttctgccgggcgaacggccttgtagggctgtccggatcggattttcacgagtgggaggatctggcgatcggcggcctggatttcgccgggccggtgcccgacggcgccacgctgatcgcccggctgcgggcgggcgaattcgtgcggatttgtgcgcaaaagggcgatgcctgacgaaggaacgggcggtttcgtccggaaatattggaaagaacgcggaaaaatgcgcggaaaaccaccggaaaccaaattctctattgacaaaccccgctgaggtatatataatattttgcgtgacactttgaggtgaagtatgcttctacagctgaaaccgttgtttatgggcgagatcgagtccctgcccatcgacgcagaactggatttttccggggtggagttccaaggaatccacccttttacacagccagtccgggtgaagggcgaggccgcttgttcggccggcgtggtcactctgcgggcggcggcggaattccggttcgacggccattgcgatcgctgcaatgaggcgattcaaaggccgttccggattcccatggagcatatcctggtggcgtctctgaacaatgaggaaaccgacgatttcgtcctcatcgacaactaccagttgtccttggacgaactggcgcgggcggatattctgctggagctgccgtcgaaattcctctgccgtgaggactgccgcgggctttgtcccatgtgtggtaagaatctcaacgaagggctctgcggctgtcattccgacaggacggatccccggcttgaggtgctcaaacagctcatcaactagtggcggattttccgccggattaggactaaggaggtgctgacatggcggtacccaagaggaaacattccaaagcccggcgtgacaagcggcgcaacaacgtttggaagctggatgctccggcgctgatgaaatgcccgcagtgcggcgaatacaaacgcccgcaccggctctgtggcaattgtgggtattacaatggccggcaggttgtcaaaaccgaaggctgaacgcggccctaaaggtagaggaggagcaatccttctctatttttatgtctgcatatctctttgaacaaaggaggcgcgccgccatgccggtgaccattcaagacgtgaccccgggcagcccggcggcccgcaaacgcatccgtcccggggaaaccttgctgcgcatcaacggccacgtcattgaggacgtgctggactaccgcttttacctgatggaaaccgacctgcgggtggcggtgaccgatggaaagaaggcccgggtggtgcatatccgcaagggggagagcgaggacatcggcctgtccttcgagacctacctgatggacaagcagcattcttgtcggaaccaatgcattttctgcttcatcgaccagctgccgcccgggatgcgccaaagcctgtatttcaaggacgacgacagccgcctgtccttcctgttcggcaattatatcaccctgaccaacctgagcgatcacgagatcgagcggattctcgccatgcacatcagccccatcaacatttcggtgcacaccactaacccggcgctgcgctgccggatgatgggcaaccgctttgccggggagaagctggcggtgctgcgccggttcgctgacgcgggcttagccatcaattgccagctggtgctggtgcccggctacaacgacggggaggagctgaccaacaccctgcgggatctggcggaactggccccggcggtgaaaagcgtggccgccgtgccggtgggcctgaccaaataccgggaagggctgacgcctctgcgcctgttcaccccggaggaatcccgggacgtcatccgccgcatggaagccatgggggaggagatgctgcaaaagcatgggacgcggctgttctatccctccgatgaatttttcatcaaggcgggtctgcccatgccggacgccgcgtattatggagacatggcccagctggagaacggggtgggcatgaccgctctgctcgaggagcagttccgcgaggccctggccgccgcccgggaggagggccgccgcccggcgggcagccgtctgcttatcgccaccggcctgctggccgcgccgattctgagccgtctggttgacgaggcgcgggaaacgtggcataatttactggtggaagtcgtccccataaagaaccggttttttggggaaactattaccgtggccggtctgctgaccggccgggatttaatggaacagctgcgcggccgggaggcggacattcttctccttccccgggacatgctccggcgggagggcgactgcttcctggacgacgccacccccgacgaggtggcgcaggccctgtcgatgcgggtggagatgctgccggtggacggcgcggatctgctggaagcgctgttctggtaaccgaagtaaaatagataggtggtgatccctatggcgcggccggtagtggcggtggtagggcgtcccaatgtgggaaaatcgacattgttcaataagctcatcgggcagcggctgtccatcgtcaaggacacgcccggcgtgacccgggatcggatcttcgccgcgtgcgaatggcgcagccgcaccttcatgctggcagacaccgggggcatcgagccccattccgacgacgtgatcctctcccagatgcggcggcaggcccaactggccatcgaccaggcggacgttatcgtgctggtgaccgatctgcgcgccggggtgacggccaacgatcaggatgtggccgtgatgctcaagaaaagcggcaagccggtggtgctctgcgtcaacaagtgcgacgcgcccgggagcccgccgccggaattctacgagttttacaacctgggactgggggatcccgtcccggtatcctccgtccacggtcacggtaccggcgacctgctcgacgcggtgttcgcctatttcccgccggaggaaggggaggaggaggccccggacgtcatcaaggtggcggtcatcggcaagcccaacgcggggaagtcctccctcatcaacaccattgccggggaggaacgaagcatcgtttcctccatcgccggcaccacccgggacgcggtggacaccgccgtccacaaccagtacggggactttattttcatcgacacggcgggcctgcggcgcaagagccgggtggacgacgccatcgaaaaatacagcgtgctgcgggccgaaatggctgtggagcgggccgacgtctgtgtcatcctcatcgacggggcggagggcttcaccgagcaggacagcaaggtggcgggcatcgcgcaccagcaggggaaggcctgcatcatcgcggtcaacaaatgggacgcggtggagaaggacggccacaccatggagcggatgcgcaaggagctggccgaggatttctcctttatggcctatgcgcccttcctgttcctgtccgccaagaccggacagcgagtggataagctcttcgagatgattgtgaatgtcgcgcagcagaacgccatgcgcatttccaccggcatgctcaacgatgtgctggcccaggccacggcccgggtgcagccgcccaccgacaaggggcgccgcctgcggatttactacatgacccagccgtccacccggccgcccaccttcgtctttttcgtcaaccgggcggatttgttccatttctcctaccagcggtatctggagaatcagatccgggagaccttcgggctggtggggacgccggtgcgctttatcatccgggaaaaaggcgattccagcaccagataatccagattagacagaggggaacaagaatatgggagactttctgcaaaacagctggctggccctgctgctgacggcggccgccgcctatctgctgggcagcattaactccgccatcatcgtcaccaggttattcgccaaggaggacatccgctcctatggcagcggcaacgccggggccaccaacgtcctgcgttcccagggcaagctgcccgccattttgaccaccgtcggggatttggccaagagctttgccgcggtgctgctgggcggcttcctgctgaccaatctcagccttggccagccgtcggtctccagctatctcgcgccctttatgctggaggaaaatctccggctggtggggcagtacctggcgggcttcttctgcatcatcgggcacctgttccccctgtatttcggtttccggggcggcaagggcgtgctgaccaccctgggcatgatgctcatcctggactggaaggtggccctcctcagcctgctgatgttcatcatcgtggtgctgttcagccggatggtgtcattaggctccatttgcgcggcggcgaccatggcggtgcttacatatgtgttccgtatgttcgtctacaagcaggacgcctccaccgtgattttctgcacctgcatggccgtcctcatcgcggccatcctcatcattaagcacattccgaacatcaagcggatcgccaaggggacggaaagcaagctgtccttcggcaagaaataaagcggaaccgcccgggaaagcgcgaaagcggcgctttccgggtggttcttttcgattgcttgcgaaacgggcgcgggtggggtataataccctgcgtaaacggtgcggcagcgcggagcgctttcgtacctgtaaacatcgttggcttgtgcttgcttttgtggtataataacctcacgccgtaaacggaaatccaagatttccgacggctgagagaccattgaaccactccggaacgggcaaagccgttccggactaaggagggcggcgctccgcgcgccttgtggtataataacctcacgccgtaaacggaaatccaagatttccgacggctgagagaacattgaatcactccggaacggacaaggccgttccggactaaggagggcggcgctccgcgccgccttgtggtataaggatacaaacgccgtccggactatgggcggctcactttcatcagagaggcggttcggtttatggcaaacatcgcagtcatcggcgcggggggctggggcaccgccctggccgtcatggctcatcaatacggcaacacggtgtccctgtggtcccctttcgaggaagaggtggcggccatccggcggcacgacgagcataaaaagctgctgcccggcgtggcggtgccgccggccatccggctgaccaccaacatcgcctgcgcggcgggggcggatctcgtgattatggcggtaccctcctttgccattcggtccaccgccgcccggctggccgacgtggtcaagccggcgaccatcattgccaacgcgggcaaggggctggaggacgccaccctcaagcgctttacccaggttatcgcggaggcggcgcccgccgcgcgggtggtggccctgtccggcccctcccacgctgaggaggtggcccggggcgtccccaccacggtggtcagcgcctcggaggatctggcggcggccgaacgggtgcaggagctgctgatgaatccgtccttccgcatttatgtcaaccgggatgtgacgggcgtggagctgggcggtgcgctgaaaaacgtggtggcgctggccgccggcgtggtggacggtctggacatgggggacaacaccaaggcggcgctgatgacccggggggtggcggaaatggcccggctgggcgtggccctgggggcgcaggcggacacctttgcgggcctgtccggcatgggagacctcattgtgacctgcggcagcatgcattcccgcaatcggcgggcgggtattctcatcggccaggggcacaccccggaggcggcggtgaaaatcgtcggcacggtggaggggtatctggccgcccgggcggcctggcagctggcgcagcagaacggggtggaaatgcccatcaccgagcagtgctaccgggtctgctacgaggggcaggatcccaaggaggccctgcgggcgctcatggggcggcccaagaagcaggagagcgaaagcgcctggatttgagatacaaaaggaccggaagcgcgggcttccggtcctttttgtataggggaaggctttggttcgccgcgtgtcggtggggagggctggcttgtgcgtggatccgcgggcgagcgatgctcgctcctacagggaagccgctgaggtcggcgggtatgcgagcgatacgggggaaccgcggaaggacagggcctccggcttccccgcgtttccggcataaaggagccgcctcctgctaacgtaggaggcggctggcggtttattctttttcgaaattcttggggtcgcacatcttaatcgcccggtcgttgatttccttgggcagggtcgcggcgtactccttgatctccttgtcgaattcttcccacttggcgccgtagatgatgttctcccggctctctttaaaatagtccttgccgtcgagccggcccttttcgggatccagccgcagcaccagcgccgccgtgttggtggagccgccttttttgtactcgatgattttagcttcgtcgattttcaccgtcttcagggcgttggtgaaatcctcatcgccgtacagcttggcgtcaatgtccttccggttgggatccttgttttcttcctcttcctcgtcttccgcgtcggaggaggcggaagaggaattgccggtgccggtggtggccgtcgtagtcgtcgtggttgtcgtcgtcgtagtagtcgttgtggtggttgttgtcgtcgtggagccgctggaggaggtgctggtctcggaggaggccttctcgtccgcgttgtaggtttcaataaccttgtcgaagtccttgccggtggtatactggttcaggtacttctgcagccgttccttgacctttttgatttccgcctcggacaaatccttgccgtcgtcgtcggtcaggggaatctcaatgattttatagctgaggtagttgtcgttgaagtatttccggatttcatcctccgacatggccttggagccgttgttgtcgtaggtgccgtagaacagggcgcgctcgttgcaggaaaaggccatgagcatcttttcgtagctctccttgctgatgccgtagcgcagcagggcgtcctgcttcatgtttttgatggtggagttgacctgctcgacgtccttttccaagaagttgagcttggcctccttcaacttgttctccagcgccttctggcggatgatggtgtcctgggtggtgagcttgatgtaatcggacaccgacatctcagttttgtcgtccccatagggcagcttctgcgcccacgggtcctttccctgataggtgtaataatacagtgggtagcttccctgatagaacagggagaagtaggtgttatacagataggccaggtagacgccggtggaatactccgtaccgtccaccgtcatcgcgatttccggcgtggaacagccggacagggacacggccgacgtcagcatcaccgccgccagggcggcgcaggccagtcttttgagcttaagcatggttgatttcctccttgagacggaataaaaacttgataccagtcaggggctggaaaaacgcccgcgccggggctgcccagcgccatggccgtcccgcggccgtttatctgtaggaaacggcggccgcccgctgggcgcaccgcaacgattctactattatacatgatgcggaacggtttgtccactgtcatttcagcgggatggaaagaaaaaaatttgcgacatttacccaagcgcaggaagggaagaggggtagtaaaagcgaatgatggtggataactatgtggaaagagtttaaaactataaaaaataaatttaaaagatttggaaaaaataaacgataacgggcgaaaaagaccgaatgctcgtgttttttgccgcgaaaatcggcggggaccgggaatttattcatttttaccgactgcggaagcgttcggaggtggaaaatcggcgggcgctcctctgttcttttttctccggccatggtataataaagaaactgcggcccggggcgctcccgaaggggggaccggacgccgcgctgtcgtgggaggctcataccacaacggggttaggaaaggaaggataagatggaggcttcgtgcaaaaagcagctgtcgattgcggcggcccgcatccgcatggatgtgattgaagggacgttccacgcgaaaagcggacatcccggcggctccctgtccattgcggacacgctggcgtatctgtatttcaaggagatgaaggtggatcccgccaatcccaaatgggaggcccgggatcgttttgtgctctctaaggggcacgcggcccccgccctgtacggggcgctggcccagaagggctatttcccggaagcggaaatccagtcgctgcgccatgtgggcgccatcctgcaggggcatcccgatatgaaggggatccccggtgtggacatgtctaccggctcattggggcagggcgtgtcctgcgcggcgggcatggccctggcggccaagctggacaaggccgactggcgggtgtacaccattctgggcgacggcgaaatcgaagaaggccaggtctgggaagcggccatgttcgccgcccacaaaaagctggacaacctgtgcgtcgtggtggacaacaacgacctgcagatcgacggcagcctggaccaggtcaattccccctacccgatccccgagaaattcgcggccttcggcttccatgtcatcgtcatcgacgcccacgactgggatcagctggaagcggcgttcgacgcggcgcgggcctgcaagggcaagcccaccgccatcatccagcacagcgtcaagggcaagggcgtgtccttcatggaaaaccaggtgggctggcacggaacggcccccaatcaggagcagtatgaaaccgcaatggccgagctgaaggcggccctgcacgagttggaggtgggttgagcatggcggaacagataaaaaaagccacccgcgattcttacggcgcggccctggttgagctgggcgcggaaatgcccaatctggtggtgatggacgctgacctgtcggctgccaccaagaccggcatgttccgcaaggcgtatcccgaccggttcatcaacgccggcattgccgagggcaacatgatgagcgtggcggccggcatggccgccgccggcaaggtggtgttcgcctcctccttcgccatgttcgccgccgggcgcgcctttgagcaggtgcgcaactccatcggctatccgcatctgaacgtgaaaatcggcgccacccacgcgggcatctccgtcggggaggacggcgcgacccatcagtgctgcgaggacatcgccctgatgcgcagcatccccggcatgaccgtcatcaatccggcggacgacactgaggcacggctggccgtccgcgcggccgcggccatggacggaccggcgtacctgcgtttcggccggctggccgtgccggtggtgcttggcagcgactaccgctttgaaatcggcaagggcgtccagctgacggagggcggcgatgtgaccatcattgccaccggtctgatggtgggcgaggcgctgctggccgccgagcagctgaaaaacgagggcattgccgcccgcgtggtcaacatggccaccatcaagcccatcgatcgggacatcatcgtggccgcggcccgggaaaccggcgttatcgtcaccgcggaggagcacagcatctacgggggcctgggcagcgcggtggccgaggtggtctgcgagaccgtgccggtgccggtgatccgggtgggcgtgaacgacaccttcggcaaatccggccccgcggtggagctgctgaaggttttcggcctgtgcgctgagaacattgtcgcccgcgtacgggacgccgtggcgctgaaaaagtaagaggtaaattcccatacaggcgcagccgtccggctgcgcctgtacctccttttaaaatttatatgacctccaacaatccagccgtccggggcattgtattggatgtgaggaggggaaagagggtctttccatgttaacggatattgaaatcgcccaaagcgtcacgccgatgcccgtggaggacatcgccgccgggctgggcctttcccgtggggagctggtgatgtacggcagcgacaaggccaaggtgcggctctcggcgctgaaggatcggcaggatcggcccgacggcaagctggtattggtcacggccatcacgcccacccccgccggggagggcaagaccaccaccaccgtaggactgggcgatgcgctgcatcggctgggcaaaaagacggtgctggctctgcgggagccgtccctcgggccggtgttcggcatcaagggcggcgcggccggcggcgggtatgcccaggtcattcccatggaggacatcaacctgcatttcaccggcgatatgcacgccatcggcgcggccaataacctgctggccgccatgctggacaaccatatccatcagggcaacgcccttggcatcgatacccggcgcatcacctggaagcggtgcgtggacatgaacgaccggcagctgcggcagatcaccgacgggctgggcggccggctgaacggcgtgccgcgggaggacgggtttgacatcaccgtggcctccgaaatcatggccattctctgtttggccagggatatccccgacctcaaggaaaagctggcggccatcgtggtgggttacacccgggacgagcagccggtcaccgccgggcagctgaaggcccagggggccatggccgccctcctcaaagacgccatccagcccaatctggtgcagacgctggaggggacccccgcgtttgtccacggcgggccctttgccaacatcgcccacgggtgcaacagcgtcaccgccacccgcatggccctgaagctgggcgattatgtcatcaccgaagccggcttcggcgcggatctgggggcggagaagttcctggacatcaaatgccgcaaggcggggctgcggcccgatgcggtggtcatcgtagcgacggtgcgggcgctcaagcaccacggcggcgccgagaagggccgactgggcgaggagaacctggaggcgctggaaagaggcctgcccaacctcctcaagcacatcgagaacatcaccgtgaagttcggcctgcccgccgtggtggccgtcaatcgcttccccaccgacaccgaggcggagctggccctggtgcggtccaaatgcgccgaggcgggggccaacgtggcgctgtccgaggtgtgggccaagggcggcgagggcggcctcgagctggcgcgggaggtactgcgcctgacggaggagcccaaccgttttaccatgatgtacgaggacagccttcccctcaaggagaagatcgccgccgtggtgcgggaaatttacaacggggacggggtggatttcacccccgccgcctctcgcgagctggataagctggaggccctggggttcggccatttgccggtatgcatggccaaaacccagtattccctgtccgacaatcccgccctgctgggctggccgtccgggttccgggtgacggtgcgcggcgtacggctggcggcgggtgctgggtttgtggtggtgctgaccggcgacatcatgaccatgcccgggctgccgaaggttccggcggcggaagccattgatgtggacgagaacggaaaaatcagcggcctgttctgaccggagactgccagccggaggaagggcccgccggcatgtgtggaaaaagtgaccgcttgcaatccgcgtgcccctgtgctatgataagggcaatgcgccctcggtgcaggcacacaggagctatggaaagccgttcgaccttttcccccattttcggcaatcggcggctggcaggacaatcaacagaaaggttggctgcatatgcgcaaagaaaacaatcccgaatctcggcacgcggcgcccaagggcggcaagccggtcaagcggcatcggtataaaaagtcggtgcgggtgacggtttccattctgtcctcgctgatggtggtggtctcggttctgctgatgaccgccggcggctacgtgatgcacgcgatgaatctcatcgtcggcgacgaggagatcgacggcaactatgtcgactcgctacctccggacgacgaggatccggacgtcagcatcgacacgtccttcaaccccagcgattacgacaagagtgaagtgagcaagatcactctgcggggcaacaccaaggacgtgaccaatctgctgctgctgggcatcgacgctcgcaccatgaaggagcggggacggtcggactccatgattatcgtcaccatcaataagaaaaacaagaccatcaagctcagctccctgctgcgggacacggcggttaccatccccggccgggacaaaaacggcgacggccaggacgattatgccaagttgaacgcagcctatgcgtacggcggcttcaatcttctgtccaagaccatcgagcagaacttccgactgaaaatcgacaaatacgtgggcgtgaacttcgtcgtcttccccattgcggtggacgctatgggcggcatcgacatttatatgacggccaaggaggcctccaaggtctgcgcccccggacagaagctggaggactgggagcggggcttcaagaaaatcggcactgaatccaaggtgtaccatctcaacggctatcaggccctgcagtattcccgcattcggcatatcgacagcgatttcaaccgcaccggccgccagcgcaaggtcatcgagcagctgattgtcaaggccaagaccatgagcttcggtaccttgaataccatcctgaaccaggtgctgccccaggtggcgaccaacatgtcgggcgacgagctgatgggttatgccctcaacgcgggcagttacgccaactatgccatcgacaccagcttccacctgccggaaaacggcaagtacaagggctggacgctgccgggcggcggcgcgtccctgcggctgaccgatccggtggaatcggtcaagagcctgcacgaatggatttacagctgatacaaaccgataaaaaaccgtccggttttaggtgcgcacctttttagaagaaatagctcagcggaactcgttccgctgagctatttcttgcaaagcggcgaaacccggcttggattctccgctaatggcgcgccgcttttgccggacggttttttcaggtaaagctggtttcgaacaggcggcggacctcctcggccagcagccggttttccggcgcggccagctcggggtcctcgccggtcagctggacggcggcggcctgagcctcgcggaacaggggcatgtctccgtccagatcggcgattttcaaatccggcaggccgtgctgccggcggccgaaaaagtcccctggcccccgcagcttcaaatcctcgtccgcgatgcggaacccgtcgttggtggcgcacatgacctgcagccgacggcgggcctcctcgttctgggcgtcagaaatcaggatgcaggtggagcggtgcacaccccggcccacccggccccgcagctgatgcagctgagccaggccgaaccgctcggcgttttcgatgaccatcagcacggcgttcggcacgtccacccccacctcaatgacggtggtggacaccaaaacggcgatgtctccccgggcgaacgcactcatcacccggtctttttcggcggccttcatccgcccgtggagcagccccaggctgtagccccggaagggcccggaggccagctggtcaaaatacgccgtggcggacaccagggaggcggtttcctcctcgccgtcctccaccagtgggcagacgatataggcctgccgcccctcggcgatatgctttttgatatagttgtaggcccgttcccgcttgccggtgtccaccgcgtaggtctcgatgggctggcgtccgggcggcagctcatccaagatggagacgtccaaatctccgtacacaatcaaggccagggtgcggggaatgggggtggcggacatgaccagcatatgggggttggcccccttggccgccaaggtggcccgctgcgccacgccgaaccggtgctgctcgtcggtgatcaccagccccagccggtgaaagaccaccccttcggacagcagggcgtgggtgcccacgatgaaatcgatgtcgccggcggccaaatctgcctgcacctgcttcttgaccgccgccggctgggagccggtgagcaggcccacccgcaccccgctgcccgccagcagcttggtcagagagcgggcgtgctgttcggccagcagctcggtgggggccatcatggcggcctgccagccgccgcgcacggcggtgaaggccacccccgcggccaccgcggttttgccgctgcccacgtccccctggaccaggcggctcatggggcaatccccctgcatgtcggccacgcagtcggcaatggcccgccgctgcgccccggtgagggaaaagggcaggcattccagatactccgccgtgtaatccaccgcgattttcgcgccggtttcgcccctcgtacggcccttgaggcgcagcagccccagctgaagcagcagaagctcctcgaacaccagccgacgccgcgccacggccaacgcttccccgtccaccgggaaatggatgttctccagggcgtaccgccgggtggccagatggtggtcgctgcgcaggtcgggggggagcggatcgttttccaaatccatgtccagcaggcggagcgcctgggccatgttggtctcgatcatgcgggaggtcagtccctccgtctgccggtaaatggggcggatccgctgccccgtacccgcggtctccagctggggggcggccatttcatactgacggccgttgcgtaccacggtgccgaacaggagcagttcctcccccgggcgcaccttggccgcggcgaatttattgttgaacagggtgacatgcagcagatctttcccgtcggaaacagggaaccgatagagcaccatccccttgcggacaaaatgctccgccggggcgcgcaccggcgtgcccttgatgcagcagggcgtgtccggcagggcgtcggcgatggccgtcgtccgggaccaatcttcgtaggagcggggaaaatggcgtagcagcgcccccgcgctggtgatgcccagcttctgatacagggcggtgcgcttttcgcccacgcccttgatttggttgagggggatgccccacaggctggccatgccgccgcctccgatcgaacaaactttcgtattcagtatacccgattttgccggcatttgcaagccctacggcatggtgataggggcgaaggcggcgccgataaaggacgccaaggcggcggggtttacccgcatctgcacgccgatccgccccccgctgacgtagaaggcgggcagggcgcgggcggattcgtccaggacggtggggaagagcttcttcatccccaccgggctgcagccgccccggatatagccggtgactttgttgatgtccttgacggggatgagctccaccgccttttcgtccaccgcccgggcggcggctttcaggtcgagctcggcagccacggggatgacaaagacgaaatggccgccccgccctttggtcaccagggttttgtagacctgctccaccggctgccccagcttgcgggccaccgatacgccgtcgatgccgtcgtcgggggagtaggtttgcagctcgtaggggataccggctttgtccagtatccgcatggcgttggttttggcttccatatccgatagggcctcttttccttctatatagcgaagcgccgaaagggggacggcgcttcttcaatcctcccgggtctcgaaataccgcttgatattctccgccgccgggcggctgacccccttgacgaggcacagctcgtccactgtcgccgcccgcaccgccttgagcgagccgaaatgccgcagcagcgcccgggcccgggcttcgcctaccccgtcgatgcgggtgagggtggtgctgatggaggacgccttgcgctgctgccggtggtacccgatagcccagcggtgcacctcctcttggatggaggagatcagggtgaaggccgtccgcttggaattgatggcgatttccccgccgtccaccgcgatggcgcgggtgcggtggtgatcgtccttcaccatgccgaacaccgggatgcccagcccgtagctgtccaccaccggcttgaccgctgccacgtgtcccttgccgccgtccagcaggatgagatccggcagccggccgaatccggcgccctcctccttatgctggagatactcgtccagccgccgggtcagcacctcccgcatggagccgtagtcgtcctgcccgtccaccgtccggattttaaaccggcgataggccgacttgagggggcggccgttttcgaagaccaccatgcccgccacgttgtcgctgcccccggtgttggaaatgtcgtagctctcgatatacgccggaggcgcgtccagtcccagcagccgcatcagctcgtccagggcggcggcgtctcgcccggctatgcccgccttttgggcgatccgttccgccgcgttgccgcggcacatctccaccagagcggcctgttctccgatttggggctgcacgatatgcacccgccgccccgccttttcgctcagccatcgctccagcagctcagcgtcctcaatgtccccgtccaccgtcacctgggggggcaccgtgtcccgcatggcgtaataccggcgcaggaattccgcccgggccgccgcgggctcgtcgatgccgtccaaaaggaaatgctcccggtcgtggaggcggccgctcgtaaagcggaacacctcgaagcaggcgccgcccggcccctgggccagggccaccacgtcctgctcctccacccgggacatgaccaccttttgcttgtcgctcatcttgtggatagcgttgatgcggtcccgcagccgggccgccttttcaaactccaggttctcggccgcctcctccatctgctgctgcaaaaggctgagggtcttggcgctgcccttggtcagaaagtcgatggcctggttcagccgctcgttgtagtccgcctccttcagccggcccgagcagggggcgcagcactgcttgatgtaatagttcaggcagggccgctcccggctgccgccgtaggaaaatgtgcggttgcaggtgggcagcatgaagaccttcaccgcctcgtccaccgcctgctgcaccgcgtaggagctgacaaaggggcctaggtacttcgccccgtcatccagcttctggcggctctggctgatgcgggagtaggggggcggggagatgcggatataatgatagcccttgtcgtccttgagcaggatgttgtacttcgggttgtactgcttgataagcgaacactccagcaccagggcttcgaattcgctgcccaccacgatgtaatcgaaatgatccacccgggccaccatctgccgcaccttttccggatggttggtgtccgagccgaaatattggctgacccggtttttcagggccttggccttcccgatatagatgatgtcgttctgcgcgtccttcatgatgtacacccccggcagcagcgggagcgccatggcttttttgcgcagttcctgtattttcggcgtgcgttccataggctatatcctttccagctcctgccggagcacaaacgcgctgcggtggaaatccagcagcccctcgtcccgcagccgactcagctcgctgcacatggcgctgcggtccaccgccaggtaatcggccagctgctgccggttgaaggggatggagaaggcgctgccgccgttgcgccgcgcctcggcggacaggtaggacagcagcttgtcccgggtggtgcgctgggccatatgctccaccttccgggccagccccacgtttttctccgccatcaggcgcagcaggttccgtatcatttgggtgtgatggggacaggcggccgggcagaccgccgacagccgccccgcgtccagcagcagcacatcggtgggctcgcaggcctccacgctgaccggcagccgcaaaacgcccgcgcaggcgaaggcctctgcgaacaaatcccccggcccggcccggccaagcagcgaccggttgccccagaaatcctcctgaaggatgtgtacgctgccggccaggacaacgcccatgaccggcgcgtcccctgcccgcagcagcatcgcctgcttatcgaaatggcggggccgggcggacaggcaggccagcacctgatcgaccccctcctcgcttatccccgcgaaaagagggccgcttttccaatcggcgttcacagcggtttcctcctcatgtcgataattgttgtaaatccaacagacagttccctctcagtgtactatactgggagcagaaagtcaaccgtatccccatccatccgagaaggagagctgctatatgattcgaaaaattattaccattaacgaggacgcctgcaacggctgcggcctgtgcgccgccgcctgccacgagggagctatcggcatggtggacggcaaggcccggctcctgcgggacgattactgcgacgggctgggggactgtctgcccgcctgccccaccggggctatctcgttcgaggagcgggaggctgccgcctatgacgaggaggccgtccagcggcataaagccgccgcggcgcagcccctgccctgcggctgtcccggcagccagtccaagcggattacgcatccccggcaggaggacgccgccgccccggcgtcagtggaaagcgagctgagccagtggccggtacaaatccgcctggtgcccacggaggccccttattttcagggcgcccgcctgctggtggccgccgactgcacagcctttgcctacggcgacttccaccgccggtttatccgaggccgggtggctctcatcggctgtcctaagctggatccggtggcatacagcgaaaaactgaccgagattctaaagcacaacgacatcgagagcgtgacggtggtgcgcatggaggtgccctgctgcggcggcatcgtccaggcggtcaaaaccgccctgcaggccagcggcaaatgcatcccctggcaggtggcgacggtctccaccgacggctcgctgctggaggagtcataagagaacgccagtccgataaaaagcgggcgcgtccaatcggcgcgcccgctttcctataccagtcccagcttctccagcagcgcctgccagcgggcggccgcctgctctggcggctccttcatgccgtcctgcacccaggccgtcaccatgcccgtcaccccgtaggcgaaaaatgacgcgagaaaggccttgtccgccgtttccccagggcgatccgcctgctccagcagcccggcggccagctcccgcaccatggcggtcagcagggcctcgaagccccgctgcccctcgccccgcagggcgcggcggtaaaaggccccctcttcccgcatccgatccagcatccgggccacccgccgcggccagtcctccggggccgacccctcggccagcggcagcatcagctcggtgtagtagatccagttcagcagggcgtacttgtcctcaaaatggtagtagaaggtctgccggttgagtccgcagaaggtcgtgatgtctcccaccgtcacccggtcgagactcttatgttccagggtggccttgagtcccttggccaaggcctgcttggtagaaacggcatccgccatgcaaacggttcccccctttcctcgccggcgcgggccggttctacagcaccatcagcagggtgccggcggtgatcagcacgctgccgagaatggttttgaggctcatctcctcatgcagcacgaaaaacgccagaatcagggtgatgaccacgctgagtttgtcaatgggggccaccttggccacgctgcccagctggaccgccttgtaataacacagccaggacgccccggtggccagtcctgatagcacgaggaacagcatgctccgctgggtcaggtgtcggataccgctctgggcgccggtgaggaagaccattccccacgccatgaccagcaccacgaccgtccggatggcagtagccaggttggaattgacgttttctatcccaattttcgccagaatggaggtcagcgcggcaaacacggcagagccgatagcgaacatccaccacatggacaagcccccttttcccttatcataacaggtttttcagccggctgcaacttgaagcagtttggaaagaaacttgcatttccaccggcaaaatgctatgataaaagggtaacacggcccgtctgagaattgtcggattttaccggatgcaaaccggcgggccactgtatagggagtgaaccgtaccatgtataccattgtccataaacgcgctctcaacccctccgttacctggatggatatcgaggcgcccttcatcgcccgcaaggccaaggccgggcagttcgttatcctgcgggtgaacgagaccggcgaacgcattcccctgaccatcgccagcgctgacccggagaaaggcaccgtcaccatcatcttccagaaggtgggcaagaccaccctgctgctcgacaccctggaggagggggacgccctgctggattttgtcggccccttggggaaagccaccgagaccgagggcttcacgcacgtcgccgtggtgggcggcggcgtgggctgcgccatcgcctatcccgaggccaaggctctgcacgccgcgggcgcgaaggtggatatgatcgcgggcttccgcagcaccgacatcatcatgctggaggaggaaatggccgcggtcagcgaccgcctgtttgtcatgaccgacgacggctccaacggccataaaggctttgtcaccgtcaagctccaggagctgctcgacgcgggcgagaagtacgatttggtcattgccatcggcccgctgcccatgatgcgggcggtggcggatgtgaccaagaagtacggcgtgaaaacggtggtcagcatgaaccccatcatgatcgacggcaccggcatgtgcggtggctgccgcctgaccgtgggcggggagaccaagttcgcctgcgtggacgggccggaattcgacgcccaccagatcgactgggacgaggccatgaagcggctgggccagtaccgggagagggaggcggaatgccgcctgatgttccaggccgatcaaagccggacctcctgaaaaccgtcgagtatttgaatacagtttcagcgaaaagtgagggaatcatatgcccatcaatcaacagccagccaaaacccccatgccggaacagcccggagaggtgcgcgcccataactttgaggaggtggcccagggctataccgcggacatggccgtcaacgaggctcagcggtgcctgcactgcaagcaccggccctgcgtgtccggctgcccggtcaatgtccagatccccgatttcatcgccctcatcgccgccggcgactttgaaggcgcgtatcagaaaatcggcgaaaccaacgccctgcccgccgtctgcggccgggtctgcccccaggagaatcagtgcgagtccaaatgcgtgcgggggattaaaggggagccggtggccatcggccgcctggaacggtttgccgccgacgtacatatggcctccggacaggaaagcatcgtccgtcccgagaaaaacggccataaggtggccattgtgggttccggccccgccggtctgacctgcgcgggggatctggcccgcctgggctacgacgtgacggtgttcgaggccttccacacggcggggggggtgctgatgtacggcattcctgagttccgcctgcccaaggccattgtgcagaaggaagtggataaactgcgggccatgggggtggatatcgaaaccaacatggtcatcggcaaggtgctgtcggtggacgagctgttcggcatggggtacgaggctgtgtttgtgggcagcggcgccggcctgcccagcttcctggggattcctggggaaacgcacctgggcgtcctgtccgccaacgaattcctgacccggatcaatttgatgaagggctaccgccccggctacgataccccggtgcccaaggcggaggccgtggccgtggtgggcggcggcaacgtcgctatggatgcggcccgctgcgcccgccgcatgggcgcgaaggaggtctacatcgtctaccgccggggcgaggcggagatgcccgcccgcctggaagaaatccatcacgccaaggaggagggggtggagttccgcttcctcaccgcccccgtggaggttctcggggacgacaaggggtttgtcaccggtctgaaatgcatccgcatggagttgggagagcccgacgcctccggccgccgccgcccggtggagattccgggcagcgagtttgtcttgccggtgcagctggtgattcccgccatcggcaacacccccaatcccctgatccgcaccaccaccccgggccttgaggcgaaccggaagggctgcctggtggtggaggaagacacgctgcgcacctcccgcgagggcgtatacgccggcggcgacgtggtgaccggcgccgccaccgtcattctcgccatgggcgccggcaagcaggccgccgcctctatcgacgcgtatatccgtcaggcctgaaacgcaatatattgtgggaaaacggctcctttccggtgggaaaacgccatcggtaaggagccgtttgatcggcctaaccaggcggaaatggaaggaaatccctccccgttattgaaaaaacagaattttatccgacacattccggctttttttaacacattgaataattttatgaaaaaagtgttgacatttggctcgggatcggttacactagggaatgttcagaaaagtttgttgccggatggctccggaagtgtccgtatccgcacaatggcgttgaggtgatcgttggtgaatgccgtccaggaaggcgactgccccgataagcagagcgacgaagcgttggctcggcgggcggggaagggcgacgaggacgcgttcgcttgtctggttcaccggcatatgcccatggtgctggggctggccgcccgttatcgcgggccgtggctggaaccggaggacttggcccaggaggggctgctcggcctgctttccgccgtcgggacctatcggccggacggtacggcgtctttcgccacctatgcgtcggtctgcgtgcggcaccggattatctccgctgtcaaacgggccggatcgctcaggaatgtcccgccctccgccatggaaagctgggacgacggggacttcgagggactgccgaatggacaagccgatccagagcggatgcttctggagagggaagaggccgcccgcatgcgggagaggctgaaagcggttttgaccgaattggaatatcaggtactgatgttgtatttgagcgcatattcttatgaggagattgccgcccggcttcatgtcggggccaaaacggtggataacgccctgcagcgtgtgcgccgaaagctggacgccagcatctggcgggagttcagtcaagattattaggattatatcggcgtcgtacacgccgttgtaatacatatgcccgggtagcttaacgagagcgttggttttcaaaggtgtcggtccgaatccgtcgcagggcaaaaatttttatcttaaagcgaggtaacatccatgtacgaagacaagactctgatctgcaaagagtgcggcgccgaattcattttcaccgccggcgagcaggagttctacgctgaaaaaggctttgtgaacgagcctcagcgctgcaagagctgccgtgacgcccgcaaatccgccgcgaagccggatcgggagatgcacgtcgccatctgcgccaactgcggcaaagaggcgaaggttcccttcaagccccgcgaggatcggcctgtgtactgcagcgagtgcttcgccagcatgcgcggcgaaggctgagtgcagcttcggtgaacccaaaaagccgcccgttctttggaacgggcggctttttctgtccgggcgggcttttagccatagctcgcagattcgtgcagaaaatgcgaggtgaacggcggacgcggatggtatactgtcacttgtaaaggagaacgatatggactggctgagacgcttaaacgaggcaatcacgtatatcgaggataacctggacgggacgatcgactatgcgcaggcggcgcagaaggcctgctgctctgcctaccattttcagcggatgttttcctacatggcggaggtgccgctgtcggaatacatccgcaaccggcggctctcccgggccgcagtcgatttgcagaacggcggagacaaggtgatcaacgtggcggtcaagtatggctacgattcccctaccgcattcacccgcgccttccaggcgttccatggcgtgacccccaccgccgcccgggaaaagggcgtgacgctcaaagcctatccggcgatcgcctttcaagtacaaatcaaaggagcgagcgttatggattacaaactcgtggacaaagaagccttccgcattgtggggtataagctgcccaccagcatggagaacgggaactgctacgcccagatcccgcagttctggaacgaaacggccagcagcggcggcatcgcccgcctcggccccctgatcgacggggaaccccatggcatgctgggggtcagcgtctgctgcgagccgatgacggagaccagccggttcgactattatattgccgccccgacctcccagcccgtaccggaggggatggaggcgttcacggttcccgccgccacctgggcggtgttcacctgcgtcggccccatgccgggcgctatacaggagatgcagaagcgtattgccaccgaatggctgcccacttcgggctacgagttcggcaacgcgccggacattgaggcctatttcgatgaggacggcaccaaaccggacgtccgcagcgagatttgggttccggttgtgaagaaagcctgacgggcgtccccacacaaaaccccggcgtccatcggacaccggggtttttttacggatttttggattcgccggaagcggtcttttcggacgatttccgccgctttctcactatgatccaccggataaaaaagacgagaaacccggcggcggcataccccacggcgtctaacaccaaatcccggccgtcgaactcccgcccgggaataaacagcttgtgcgtctgatccgccagcgaacaaaccaggcagatggccatcgccgccaaggcctgtaccgtcggggagaaccgcgcacagcccagcatggccagggaagcgcagagccccagcgcgaagaactgataaatatgcgccatttgtctggcggtcagcagcacgctgccgtcgggccatttcggctcgataagaaagcgcggaagatgctccgtagcccaatgagaggcgctgatggtggcctccggtgtttgcgtggtcagataaaaaatagcgccggccaccagggcgaacccgatccaagcggcgatccgcagctttttcatgccaactcctcactgcggtctaaccgcaaaagcaaaggcgcagatttgactctgcgcctttgcgagctatcatctgtatgtcttatgatacgcgttttcggccgtctgtcaatacccggggactatttcacccggattcgctgcctcgtcaatgctttggcggcgggacggctcttttaacggaaaacccatatagcagggccagaatcagcacggcggcgagcaggatacccacggcgacaaacagcagcatgaccgtctgcgtggcgtagccggtcaccaaatagtatagcgccttgccggtcagcccaattttttcgattttgccggacagcagaaccaccagcgccagcaccgtcagcgttaccgcggccccgcagcacgcataaatcgcgtggcggaaaaagccgttctttttctgcagggcgaacagaaagcccaaaacaaacagcgaaagaaccgccatggccgcgatgccgatgagcagcggcgttttggccgccgccagggcgctggcggcataggacgcaaagggaaggccaaccccctcccggtacgtttcggcgcacatctgcgccaaataatgcagggcctgatcgacgctctcggtgatttccaggttccgctctttgacgttggccgtcagcttgtcatacagctggctttcgaaggcgtcgtagtccgcgccggccgtgtcggccgcgtacaaccggtcgatttcggcatagatgtcagcccgcacttcctcctccgtcagcaccgaggtgaaaaaggcttcgtcgaaatcgctgctgatgccataggagacgaaaatatcctccatgtcctcgatgacatgcgcggtataggcgcttttatccacctgctttttcagaaagccggggctgagcagcgtgcattccagcaggctaagcagcgacagcaccgtcaaaaacaggcatagcaaaaaggacagtatccaggccatcccgccgcgaagccgtgcttgctttgaaacagacgcattggtctccatagggcatctcctcacgacacgattttggggccggacacgtatttgccgtagacaaacgtgcggttgggggtggcgccgattttcgattcattgtagcaggtgtacaggatcaggttttcttccgccctggtcaggtcgtaggcgctggtatcgtcaaagcgggcgatccgggacccggtcacctcgtagatataggtgccgtaatttgtctggagctccaccttatcccccgtcttcacgtttttcagagtgcggaaatgggtgttgttgtgtccgccgataagtatcgttcggtcttcgccgggcagataggtgccggaatacacttcgacgcccttgcgcatattttttatattgtccccataaatcagggaagcctcaatccccacggaagcgatacggattttcccgaaagtttccccctcggagggaaaaacgacctcgtcttttttcagcgttccgcccttgtcctgtatggctccctggtagatgttggcggcttctttgttaaacgtcggcgcctgctggagaaacactagatccgccatatcgagatacggccggagaaccggacccagcgcggccacgacgagtaaggcgctcaaaaggaaaaaaacaatgggataaaatacaaattttatcccactgtttatcctgagcttcttacgaaactcttgtcccatattcagcagtctccagtaagcttgtt

SEQ ID NO: 4397 - DNA, 1739 bp, Unknown
  16S sequences of unknown bacteria
tcctgcatttttcccgacatggtgatgagcttggtggaggctcccgcaccgagatgaccctcggcgtttatgtcgaaagtgccgtcctcggtggtatagctgaagtcgattacatcaagaagatcggtgtcgccgacggctcccgaaacaacaaccttgtatttaagggcaagggttccgttgtttacgattttgaagggcgtcaggttataggtgcagcccggctcccaaaggatggcctcgtccttaccgccttccgctttgatgaaattaagagtgtcgatgtgcatgttgttcgcgtccacaatatccacgtcgaggctgcccgactgaattttgttgaccgaggtgcttgccgtgtcggtgaaccatgcaaaggtggtgccgaccagcattgctacgcaaacgagcatagcgagagcgcttgacacaagtgctcttttggtgtttttgctgttcataactttttcctccttaaattttgtaaccctttcgggttcatcttttgcatttatattctactactctcggcacttttgtcaagacgtcatattgccgaaaatgccttttatttgccgtattttttcatgaaaaagagtcccgaaaaccgaactcaaatcacaaaacctcaagggaattaaaacgacaacttaagcacgggaaaaggaaaactcctcggataatgccaaagcatatccgagaagtctagcgaaccgttatgaaaatgttgatttgagtcggcaacgaattttaacactcggccaaagcccaaattatttctttatccatgtggacggagcaagagttattattatggggaaaagctcgagacgtccgagcagcatggcaaaggacagcacaattttggaaaaacccgaataggccgcaaagcttgaggcgggacacacaagaccgaagccggggccgatgttgttaaagcaggaaacggccgccgaaaagttactctcgatgtcaaaagcgctgtcaaagcacagcagaataaacacggcaatgaggcaggcaacataaagcgcaaggtaacagcccacgccgtttacggttgcgtcgtctatggttttgccctcaagggtgaccgccgtcctcgaacggggatgtataaggcggttaagctcccgttttaccgattttgcaagcagcatgaccctcgacaccttaaagccgcctccggttgagccggcacaggcgccgcagaacatgagagtgagcaatatgcccttggaaagaatgggccatgtgttgaaatcggcggtggcatagcccgttgtggtgacgattgaagccacctggaatgccgaaagacgaatactgtcggaaaggctttgatatatcggataaatatttaccgttatcatgatgacggccgcggcgacaataccgaaatatgtccaaagctcgctgcttttaaaggcggttttgaaacggcgtatgagcataaggtaaaacaaattgaaatttatgccgaaaagcagcataaacaccgttatgacccattggcaatagtttgaatagccgccgatactgtctccctttatgccgaagcctcccgttcctgccgttccgagggaatgaaccacgctgtcgaaaagaggcattccgccgaacagcagaaatacaatttcaataagggtcagcgccatataaataagatagagtatcttggccgtttcacggattttgggcacaagcttgcccaccaccgggcccggcacctcggctct

SEQ ID NO: 4398 - DNA, 7921 bp, Unknown
  16S sequences of unknown bacteria
gctgatagaagatttttcctgcaaacagtttggaggaaatgcatctaccatcagttgtgaattatcttccagatcacattgtgtttgtacccaaattgtcaaacgatatccgcttttttttcggacatgccggattgtttttttcagcattgatgtgttgcaacgcagaaaaaagtctgcttccaatacatggtaaggagagatggaaactgtataggtcaattcatatgtaccgcttttttttaactgcagtatacaaggctgaaaggagggaaatccgttttttcccatggccaagcactccgatctccgcgccgttttcgagagtcattcctgcgcggcagggtagaaaagttgatctcttttcatcttatgccggaaaaaaacagttgctacccaattattttttttgataagaacgatgggctaggtctccaagcaaagccgcaataaagccggcagaaaaacaagagggagctgcctccatagcggttcgatgaatcagcatttgttgatgatagtccagggagaacgccattcgataagaaatcaaagcgatggcgaataaaataattgaacaccaaaaactaaaaacaataatttgcttggagtaaatacagatactgtcaagatcttttttaatcgtttttacaaactgcatgacactgccacctccagacgaaagatttaatcctattttacgagattataccagtgaaaacaagaaaaaaactttgccagaaagagaggggaattctgacaaagtttttatttagacattccgttccatccaggcatccaacagcgccaaggcaactgcggcttcgacacagggaacggctcgcggcaccacacaaggatcgtgtcgtcctgaaatggttagctgtgttggctccattgttttgaaatcaactgtactttgcggctgagagatagaaggggtaggtttaaaggcaacacgaagaatcataggcattccggaagaaataccgccaagaataccgccatggtgattggtagtagtgcggattttgccgttttcaatgcagaaaggatcattcatttgagaaccaaaatgctttgcagcatcaaatccggcgccaaattccaatccttttacagcaggaataccaaaaattaaggaggctattcgattttccagtccatcgaatatgggggatccaattcccgcaggaaaaccgataacaccgcattctaccacgccaccgacagaatcctgtgccattcggcagctttcaatcaatttttgcatcttttcaccggctatgtcgtccaacactggaaaaactttttttccgggagagaaaagagcctcagcatgtagcctaaccgggtcaaaaagaagatcgtgctgctctcctaccgaggcgatatgcgcgccgatattaatcccgtttggctgaagaatttgccgggcgatcccgccggctgcaaccaatggagcagtaagccgtccggaaaaatggccgccgccccgcgggtcttgtgctccgcgatatcgcaagtgtccggtaaagtcagcatgggcgggtctggcaatatgctccatttctttgtaatcagtgctatgggtatccgcgttttgtatgacaatagccagtggggtaccggtggtttgtccatgataatagccggaaagaatgtgaggcgtgtccgattctttgcgagacgtggcaaaaagcgctttacctggacggcgccgatccataaaggagagcaaatcctccatatcaattggtatcccagcaggaagaccatctaatacaacaccgatagcggcaccatgggattccccaaaaattgaaattttgattgtatttccccaactagatgacatgcacaatgccccccaatgctttgaaatcttcgaaaaaatgaggataggatttttccaccgcctgtgcgccttcaatgacaattggagaatcgacaagacaagcggcgattgccatggacatgacgatacggtgatcgccatatgaagagacagtagcaccatgcaaaggatgtcctccgtcgacaataagcgtatccgtttcttctcggatttgccctcccaatctcgagagacagtcgaccatggcggcggcacggtcactttctttgattttcagtcttttggtaccgcgaatgacagttcttccgggaacggctgccgctgctacacataatatcggcagcaaatcaggaacgtcccgcccatctatttcagttggacggctgacagattgtcttaccgttataaattctttctcctggaccggcattgctcccaaagcagaaagaatattcaaaattttgcgatctccttgcagggaattttgagacaagccaaaaacctttacgctatttcccaaggcagcggctgtcaagaagaacgcggcattggaaaaatcgccttccacttgaaactttcgtgcaagatatttttggttgccgggaattgtgaatttatctttttcccagcaaatatgaaccccaaattctcttaaaacatggatggtcaaatcgacataaggagcggattcaagcggagtggaaagagtaatggtactgtctttggagagaagaggaagcgcgaataaaagcccggtgataaattgagaactgatattaccgggcaggataaatgcaccgggttgcagctgtccggataaatgtgaagggacaaactttccgacaaggtgtgcgccttttcgctcgaatgcatcaacataaggggccaagggacgttccggcaagcgaccggagccgataaactgacaggaaatcccttttgctgcagcaattggaattaaaaaacgaagggtagatcctgattctatacaatccacttttgcttgtttgggtgcttttccgatacctgtgatcgttactccgttatcattacgaacgatggaagcacctaacatttttaaggcgccaatagttgcctccatgtcttttgacccatcaacaggaaaaacagtgctgctttcgttagccagcgccgcacaaattaaagcacgatgggcaacacttttagacgggggcgcaaagacctcaccctttaagttggcaggaagaatccgaacattcattttctgtcaccgccttggataaaagtttcaaatttttcgaaagagaaatcctgaatataactgtctccaatgtcatgaagcaaaatggcatggattcccttggttgtactctttttatcctggcggcatatttcgaacaaatctttccaacgggcagggcaggaaataggcaaatggtattttttgcatatctgcaaaaggctttccaatacggatgaagacagcatgccagcggcaacctgagcgcggatgatcatcaccattcctactgctacacattggccatgccgctgttggtattgcatccggttttctacagcgtgccccatggtgtggccaaaatttaaaagcatccgttctccggtatcgtgttcatctttttctaccacgtcccgtttaatagaaatacaacgactgatgatttcctccagataatcctgaggatcttgatgagctaacaaatcaaaaagcacagaatccctgatcataccgcacttgattgcttcggcgattccatcagcgaacacgtcctgcggcagggtagacaaagtatctgggtcacacaagacaagggatggctgccaaaaagttcccacaaggtttttgccggttgacagatttacagctgttttcccgccgacagaagaatctacctgtgccagaagggtggtaggaatttggatgtaaggaataccacgcaggtaggttgaagcgacaaacccggttaaatccccgataacaccgccgcctaaagcaatcaggcaacagtcacgggaaatttttgcttgggacaaaagctgatacaaaagtccggcatttcccaaagattttgtatcttcgcccgctgccattgtaaaagatagaatatttttgtatccggcccgctccaaagaatctaaaagatttcttaagtataaaggggagacattagaatcggtcacaacagctaaccgcgcatagggttttacctttttcacttcttctcctgcgtcctgcagaataccgcgccggatcagtacttgataaggagtaccagtattgacttgaatacagttcattgcgattcctccatctgtttttatgcacacttctccctgtttagcaaggatagaagaaaaccgaattttatgaggcccaaataaggctcttattttctacacagtcatctgcatgtaatggcatttatggacacgcgcaagacagcttttggtgccggtgaggagcagtagatgcatatcggcacttaactgcccactaatttttcatgaggcaaaattctattgcaatctgctgagttctatcgaaaaaagccgatactgataggtaccggctaccaccattttgctcctttaaagtaagaataatcatgagaaatatgtttgtcaatatctgttgctgaaaaaaagcggatatgataaaatgaaaacaacgtctggataaaaggatataatgttatggtactttcaatcgagcaagtgaataaaagttttggcgccaatgtggtgctgcaagatattaccgcaaaaatcgaagacaacgaccgtataggtttaatcggtgtaaatggggctggtaaatctactttgttaaacctgattgtgggagatttacatccggatacgggtgtcatttctattgctaacggtgcaacgattgggtttttacgccaaaacagcggtttgtccagcgagaatacaatttgggaagaaatgcgcagtgtctttcagccgattttggagatggaacagcggttgcggcggctagagcaagagatggctggcttaaatatagatcatgagggcaatacttatcgcgcattagcagaagaatatgcggtgctggatgagcgatttagcaaagcagaaggatatttggtagacgtaaaaattcgtaccattctcaacggaatgggtttttccgataaaccggtggaaacgattatccataccctttccggaggggaaaagacccgtttggctttggccaagcttttactggaacagccgacactgctgattttggatgagccgaccaatcatttggattttaaaacgctgacctggctggaggattatctttccggctatcgtggcgcgcttttgctggtatcgcatgatcggtatttcctggataaactggtttccgggatttgggaagtggaacggcataaattaggaacctataaaggaaattattctaaatatattgttttaaaaagagaaaggcgggaccggcagcagaaagaatacgacctgcagcagcaagaaattgcagcaatggaggactttgtagcacgcaatttggttcgagcttcaacaaccaagcgggcgcaaagccgtattgctgcgttggaaaggatggaacgggtagaaaagccgcagggagatctaaaaacagcccgcctttctttttcgtatgacagggagccggtcaaggatgtgctgctggtagaaaatctgtccctttccgtgggggaagagccgaatcgaaagcggttggctagcggcattaaccttcatgtggagcgtggaagtaaaatcgcaatcattggcgccaatggtgtgggaaagtccagctttctcaaagcgattttaaagcagattcccatcgattcaggagccttttattgggggaaaaatgtaaaaatcgcttattacgaacaggaattaaaagagctgaacccaaatcatacggctctggaagagatgtggtccaggtatccccagatgacagaacacgatattcgcagtattttaggaagtgttcttctaacaggcgaagcggtatataaaagagtgtcggtgctttccggtggcgaaaaggcaaaactcgcttttgccatattaatgctgcaacatggcaatgttcttttgttggatgaaccgaccaaccatctggatcttccgtcaaaagaagtgctggaagaagcgctgcaggaatatgagggtacgctgctgatggtatcccacgaccgttatatgctcaataaaataccggatttcattatagaatttaccggtatcggcgtagaaacctataaaggtggatatgatgattattttgcggagaaagaccgtcggcgggcaaaagcggcagttcaacagcaggtacaagcatctgtttcagcaaaagctgtttcatcaggggggtatcgaacccgtcagcaaaaaaatgaagaggtcaaacggcggcagcgtttaaaagatctggaaacaaggattgcggaaaaagaaagccagattcaacagctggagcaggagataactctgcctgaaatatatgagaactatattttgatgggtgaaaaatgcaaagaattggaggaaaagagacagaatctttcccttattatggaggaatgggtacaattaagcgaatagtatagtctgaagtggatgctttggagagatagaatattgtttttatccatgactggttaatacaatcgaaagaaaagaggcggtatcatttgaaaattgactggaatcgaaaatacactacaatagcggtttatgcagtcctggtcgttattgcatcgctggtatgctataatgtgttgcataattttacttcttacaaggcggcgttccggcagttaatcggcatattgctgcctgttatttacggcttctccattgcttttgtgttaaatccggtggagcgattttttgaaaaaaaaatatgggggcgtatcagccgggaaaagctttcgccgaaatggaataaagggctttctgttttttcaacttatatagtggcatttttggtcattggcatttttctttcggtggttattccgcaggttactgccagtattgcaggaattgtatcgaacctttccgactatttggggagagtaacaggatggttaaatagtctgtttgagatgcttccaaaagaagaactcttccaaaaaacgctgaaaaaaatcaatgaatcggcccaggcgattctggaggctttttatagctggttatccgcttcgctgccgatggtattaaatgcaaccaaaaatttgactaccgggcttaccaatttgattcttggcgtgattatttcgatttattttctctttggcaaagagcgctttttggctcagattaaaaaagcgctttatgcattgttcccggaagattttgtaaagcgtttggttgatgtgacccatacaagtaatcgaattttcagcggctttatttccggaaagttgctggactctcttatcatcggcattttatgctttgttggaatgtctttgttccgaatgcctatggcaatgttggttagtgtaattgtaggtgtaaccaacgtcattccgtattttggaccaatcatcggggcggtgccttccgcgttgattgttttcttgattgatccgataaaagcgttgtggtttgtgttttttgtcatctgtctgcagcaattcgatgggaatattctcggtccccgcatcttgggggactccattggtatgccagccttttgggttattttttccattttactgttcggcgggtatttcggcgtttttggaatgtttgtaggggtacctacttttgccgttatttattccatctttaaaatttggatggaagggcggttggagcgaaaaaatatgcccacggatacaaagagctatgcatctgaagaacatcctcttttataagagacaatcggcttttggaaagtctcctttttcgttgacgatttcccagcgataaggtataatattttttatgctgcaaataaaaatcagggcttttaacgctgaaaaaaataatgaagaaacttcagctgtaaaatcgaaatgatatttttataga

SEQ ID NO: 4399 - DNA, 4800 bp, Unknown
  16S sequences of unknown bacteria
aaacaatttctttagttttccacttgacaggttttggctgactgtgaatagtaacaatccggcttataagaattttatgagtactggtggtgattgtacaaattttgcttcacagatcgcttatgccggcggcctgcgttatgcgccggtgtggcagccatataccaaaccgtggatcaatgccaactctttcggtatcgtatggggcaaaaaagaaaaatcaaccaagtggagcatatttgtcaaaaagttgaagccaggaatgttcatcgctgctgattttggcggagatggagcattggatcatgttgcatatgtagcggcaaatggatcatcatcttcgaataagtatattgcacagcatagtgccaaagctgaaggattttattatgcacgttctgattcaactacatcaaattgggataaagactctaagagccgtgtcctctggatcatcggcaataatggaagctaggaggatctgtaatgaggaataagttcatttttgccttgttcatgagcatatttgtattgatcgcaggcggctgctcgcctgcggacaatacccatgccatgcggatgaactatcaatctgaatggtatacagatgaggattttgaaaccgcgacagaaatgatgatcgaaaaattaaaagaactgtatccggatcgtcaggtcatccggtttgtgtatgctggtgaccaggcatctcaatattacacgaacatcggtctggatgaagaagagaaaaagaacaatcaggaacaaagcatgtatttctttattcattttgaaaaggtcggtcaagatgaatatgactgtgttttccgcagaaatggtcctgatcaggaatggcagatgtccggaataggatcaagcggagcaaacccgccgattcccgatgagctgcttccgcaggaagtcatcaatgcccgggaagaggtgcaggagcgcttcgtcaatgaatgaatcatcgcatcagtgatatcgccaggctcaggctgagtttggcgtttttttgtgtgccgggcatggggcacaactaggtggtgaaagaccactgtgggggcgttcatcgcaaccgccaaccactagccagagccaagggtgtccatcgtgaggtggaatctgaaggaaggtcgaggcaaacctctgtaccgaggaacacgaaccaaatcaggcttgcgatgatgataagtgtgcaaaacaacacgaagtcagatagagttgcggatgagcatcgtaagtaaatttggcgggtccgggctaccacacggtccaggacgaagatagaggaaaagtggtgtcaccttaccccgggaggtcttgtcagcggcgatagccgtagtaacaacgaatggcaagaagtcagccgaggtcgtagtagcgaagaagtctctgtaatggggatggagcaaaggaccgaacaaatctatcagttattaaagtggcatttgattctgacatgcgaaaacaaggacaacgagtaaactagggccacgagtaaacaggaacggaggaaagtggaagtcagcatgttggatagcgaagaaatggagatgacggacatgaaaactgagaaaagtttgctggatgatatgctcagcgaagaaaatctgagccgggcatatcagcaggtcgtgagaaacaagggggccgagggagtggatggtatgaaatataccgaactcaaggactaactgaaggaacacggcgatgagatcaaagaacagatccggagccggaagtacaagccaagcccggtgcgaagggtagaaataccaaaagaaagcggtgggacaaggtgtctggggatcccgacggtggtggatagatttatccagcaggccatcgcgcaggtgctgacaccgatctatgagccgctgtttagtgagaacagctatggctttcggccaaacagatgttgtgagatggcgatacaaaaagtattggaatacatgaacgacggctttcaatgggtagtagatatcgatatagagaagttctttgatcacgtcaaccatgacaaactgatcacgctcgtgatgaagcatgtaaaagacggagagatcgtgtcactgatacgaaaatatctgaagagcggaatcatgatggacgatgagtataaggagtcggtcatcggatttgcgcagggaggaaatttgtctccgctgctcagcaacatcatgttaaatgagctggataaggaactggaagccagaggattgaactacgccaggtatgcagatgattgtctcatcctggtgggaagccagaaggcggcggacagggtcatggcgaatgtttccaaatttatagagaagaagcttgggctaaaggtcaacatgacgaagagcaaggtgacgaagccgaatgacatcaagtatctgggatttggatttttccgggacagcaggagcaagctgtggaaggccaaaccacatcagaaatcagtggagaagctgaagaagaagctgaagcagctgacgaaccgaagctggggcgtagacatggaccatcggctaaggcgaatcgagcaggtgctgagaggatgggtcaattattttaggattggcaaattcaagggagtctgtgaaagaatcgacaagaatttgagataccggctaaggatgtgcatttggaaacagtggaagacggtaggaagaaggtacaaagcgctcaggcagttagggatggagaaagaaacagcatggaaatgggcgaacagccgaaaaggatatgcacgtgtggcatcttcaccgatactgacgtacacggtcacaaacgagagactagcaaaaagaggtctggcatcaatgacagacctctatcagaaaatcaataaaacatgtttagcatagatttgaaccgccgtatacggtcccgtatgtacggtggtgtgagaggacggagatatagctatctcctcctactcgattctttttgattgaaaaaaatcaacaaatacgattgtttagcgctttctttaaaaatatgattttctgttgatgaaaaattgatattgattttatattcaaagtatttacaacgatccttgaaaggtgtatacttccctcgtaatctttgatactcaaagttttaaggaggacatgaaacatgattgaacagatcaaaaaagtgctggttgacgcgctgaacatcgacgaggaaacgattacgccggaagcaaacctgaaggatgacctgggcatcgattctcttgcggccgtagagctggcgcttgagctggagacggaattcgacatccgcattgaagatgatgagctggctaagctggagacggtacaggacatcatcaacatcattgaggaaaaacagaaataaaagatccatgagctaagacttcttagctcattttaaaaaggagtgaggaaaaatggacaccgccaaaatcaaggaaatcatttcaatcttcgaatgctcatcactgagcagcatgcatctggaggcagatgacatgaagatcacgctgaagaaggaaggatctgccgcagtgtctgcgccgctttccatttctgttccggcgccggaagccgctgcacctgtgcaggagcagcctgctgcgcctgctgtacagggagaggcggttcgttctccgctggtgggcacgttctatgccgcaccgggagccggggccaagccgtatgtggaagtcggcagcacggtgaaggaaggggacatcctgtgcatcatcgaagcgatgaaggtgatgaacgagatccacgcgccgcgtgccggcgtgatcaaggaaatcagggcgaaagatggcgacatggttcagttcgatgaagaactgatggtcatcggtgattaaatgatctccaagatcctgatcgctaaccgcggagagatcgcggtgcgcatcatccgcacatgcaaggagatgggcatccgcaccgtggcggtctattccacggctgaccgtgatgctctgcatgtgcagctggcgcatgaatcggtgtgcatcggcggcccgcggccggcggaaagctatctgaacatgaatgccctgatccaggcagcctgcagcaccggatgtgacgccattcatccgggcttcggcttcctgagcgaaaatccgcagtttgcccgtctggtggagcagtgcgggctgaccttcatcggccccaaggcagatgtcatcgagaagctgggcaataagtccatggctcgtcagatgatgcaggaagccggtgtgccggtcgtgcccggcagcaagcagatcatctccacggtggaagaaggacggcagctggctgagcagatcacttatcctctcatcatcaaggcggccaacggcggcgggggacgcggcatgcgcatcgttcgcagcgcggatgagcttgagcatgcgttttacagcgccaagagcgaggccaaggcctgcttcggcgatgatgatgtctatatggaaaagtatatcgagcatcccaagcatgtggaggtgcaggtgctggctgatgagttcggcaatgtcgtgcatctgtatgagcgtgactgcagcttccagcgccgcaatcagaagatgatcgaggaagcaccgtgtcatgtgctcgatgaagagacgagacagcggatgttcgccgacgcgatccgcgcctgccagtatgtaggctatacttctgtaggaacgatcgagtttttgctggcggcggatggcagctattatttcatggaaatgaacacgcgcatccaggtcgagcatccgatcacggaacagatctgcggcatcgacatcgtgaagtatcagatccgtgtggcggatcatcagcggctttg

SEQ ID NO: 4400 - DNA, 6283 bp, Unknown
  16S sequences of unknown bacteria
aacagcgcgtttgccgtctgggcggccaggcggccgatccgatagtgctctgccggggagcagacgcccagctccagcatatcccccagcacggcaatgcgccgcccttgggtcggcgtgtcggccaggacctgcagcgccgcttccatggactccggccccgcgttatagcaatcggcgataacggtatagccgtcccgctttatgatctcctgccgcatcccggcgttgcggaacatggccagcgcctgctgcatcttcgccggttttacccccatcagatagccaacgctgatggccgccagggcattgtagaccatatgcatccccggtgcggggataaagacctccatctcatcgccaaaggcgtggacccggaagttcatcccgccgtcgacggtctccacatccttggccaggacatcgcaggcgtcgttttcaatgccgaagtacagcggcgtcacccggttgtactccttgaggttccacaaaagcggctcgtcgccgttgaagaccgtacggccgtcgggccgcagaccctctaggatctccagctttgcctgcaggatcccctcccggctgcccaggtgttcaatgtgcatcgtgccaatgtttgtgataacggcaatatccggctgggcgatggacgtgaggtaggacatctcattaaaatggttcatccccagttccaggacggccgcttggtaatcctccgggatctccaggaccgtctggggcaggccgatgttgttattgtaattgccctcggtccgggcagtgcggaaggcggtctccaggatcccggcgatcatctccttcgtcgtcgtcttgccgacgctgccggtgatgccgatcaccttaatctccagtgactgccggtagaaccttgccaggtcacccaaagcccgcagcgtatccggcacaacaacgaccggcagacccggcatttcccgcgccgagatcgcacccgctgccccggctttgatggcctcggggatgtaatcatgcccgtcaaaccgcgcgcccttcagggcgatgaatagctgcccctggcggagcttccggctatcggagcagacgccgttcactgcgaccgcagcaaactccggcgcgacctggccgccgcacgcgtcggccacctgctgcaacgtaaattttgccatccgtctcaagcctccctctgcgccagatgcgccgcgacttcctcccgctcatccaaatggcggtgctccgtcccgatgatttgatacgtctcgtggcctttcccggccaggacgatgatatcatccttctgtgcatgatccatggcccagcggatggcagcccgccggtccgggatgacgacatacgacgtctgcgttccctcgacgccccggagaatatcggcgatgatggcctccgggtcttccgtcctgggattgtccgacgtgatcacggcaaggtccgcgttttctacgccgatcctgcccataatgggccgcttgatgggatcacggtccccgccgcagccaaagacagcgatgacccggcccttgcaatagccctgcacggaacgcaaaacgttttccagcgcgtccggcgtatgggcatagtcgatcagaacagtataatccgtcccgggtgtcgggacaacctcgacccggcccttgaccaaatgcgtctgccgcagtgccgccgtgattttctccagcggcagccccagctgcagggcgatggcaatgaccgtcatcgcattgtagacggtaaagccgccggggataggcagcgtcaccgccgcccgctgcccgtccaggaccgcgtcaaacgtgacatggtcagcgtgcagactgacattctgcgcctgcagcgtcgccgggctgtgtactgccgtcgtgcagaccgggcaggccgcgtgggcctgcatccgcggcgcgtaagggtcatcggcattgataaccgccgcgtcgcagcgttcaaacagccgggccttcgtctcggcgtaatcatccattgttttgtggaaatccagatggtcctctgtcaggttcgtgaacgcgccgacggcaaaatgcagtcccgcgacccggtccagtgcaatggcatgggaggagacctccatgatgacatactgacacccggcgtcggccatccggcgcagcagctgctgcagctcaaagctctccggcgtcgtccgctcggtggggatgatctggtcgccgatctcgttgtggatcgtcccgatcaggccgaccttcgcgccgagcgtccgctccaagacctctttcaggaccgttgtcaccgtcgtcttgccgtttgtcccggtgacgccgatgagcttcatgccgctggccggatcgccaaaccagttggcagagacctgcgccagcgccgtccgcgtcgacggtgtctggatataggcgccttctgccggggccttctcgcacagtacggcagccgcgccattttccagcgccatggggataaaccggtgcccatcggcggcaaagccgggcacagcgacaaagaggtcgcccggccgcacctgccgcgaatcgtagcacacgccggtgatctccagctcccgcgccgctgtgcaggtggtcacgggtacgttccggagcagcttttctaatttcattcgtaaatcctcccgttaatcctgggcgctggaatccgtaaattcgacggtgaccagcgtgccgcgctcgacctgcgtcccagcctcgatatcctggctcgtgacggtgaccgttccgctgccggtgttcgcgcccttggactgcagatacaggcccgtcccggcaatcgcctggttggcctgggcaacgctcatgccgacaaaattggggactgttaccagatccgtcggcttttcctcgcccatatagagaatgacctgggcgccgcccggcacctggccgcccgccgccgggatctgatccgtgacccgcgagccgtcgccgacgacgatataagtcaggttattgtccttcagttccgctgccgcttcctcctccgtcatatccgtgacagaaggcatcgtcatattgacactggcagcgttttcatccgtatattccacgccgacgccgaggtacggcaaaatatccgccatcacatcgcgcaccgtgggggctgccataacgccgccggagacatagtaccccgagctgttggacggcgtatccagcgcaacaaggacgacatactgcggatcgttgatgggcgcgaccccaatgaaggagacaatcttatcgtcgacccggttgccgttttcatcaaaaacgtcgatcttttccgatgtgccggtcttgccgccgatggcgtagcccgccacctgcgcgttgcccgccgtaccctctgtcacgacgctctccatcagctctcgcatcgtcttggacgtttcggcgctaatgacctggcgcagcaccttgcgctcattgcgctggacgacattgccgtcgccgtcgagcacttcgctgacgatatacggctcaagcacataaccgccgttgacgactgcggcgatcgcccgcaccagctgcacgggcgtgatcttaaaggtctggccaaaggccgccgacgtcagcgacgcgttgctgttcgggtccgccagagcgtccttgctgaagaagtagccggacgcctcgccgggcaggtcaatgcccgtcttttccagcaggccaaaggcctcgacataattgtaaagcgcctcgccgcctagcttgatgccgatctcggcaaaggcaatgttgcaggagttttgcagcgcctgggccgtatcctccgcgccgtggccggtgctcttccagcagtggagaacatcgtcacggcctgcgatcttggcctggccgccgcagtagaagctgtcgttcagagtcacagccccctcctccagtgccgccgccagggtcacacatttgaatgtagagcccggctcatagccgtcagaaacgcagcggttgcgccattggagcagccgcgccttgacgacctcgctatcgtattcatccagcagggtctcccgggcggtgctgccctctttttccttctgggcctcgtcgtagagctcctgcagatcttcctgggtggaggtatcgtagatctccaggtaattattggggtcatacgtccccatcgtcgccatggccagaatctggccggagttgacgtccatcacgatgccgaacgcgccgttctgcacatcgtacttcgtaatggcggcctccatgttcttctcaagataatactgcaccgtcgagtcgatcgtcgtaaccaggctgctgccgtcggacgcctcgtagtatttttcgtaggagtagagcatttccgtctcgtggttgccctttgtcgtgacgacagccccggcattaccctcgagggtatcgtcgtagtaggcttccaggccctcggagccgacgttttctgcattggtaaagcccaagacctgcgccgccagcgaggcgttcgggtaggtacgtttggagtccgcctccaggtacacgccccggagcttattgtcactcacataggcccggacctcatcggccaggtcctcagagatcttccgtttgatgaccttatagcgcatcttcgtatcggaggcctgctcgatgatataggacttttcaaggtccaggatcttccccagatcctgggccagctggttgagatccactttgtcctgactcagctccagcgggtccaggaagacgttttccaccgtggaggaggaggccaacacattcatatttcggtcgtagatcgtcccccggtcggcgctgattgtcgtgctgcgggtctggttcgcgatggcctggctctcatagacatcatgcttcgtgatcatcatgtgaaacagcgtgataatcagggggataaacagaagaatgccacacactgccataatgcaaaatgtgcggcgcaggaagagcctgttagaagccgggtcttcctttcccggtcggagattccattttcgttttccggtttttttgcctgccatcgtcgttccccatctttgcgcggtgtgccgcgccgcaaactgcagcgcggcaccgattgccagcggtcacaccacagcccggcgcattcgtccggctgcgctttgtcaaactgtatgtcccgctcagcggaagtattctatcatctttttcgccgtcccagtgatggccttccaggcagtctgcagaatgttctccttctccgtcgtcataatctccgccttatcctggccagagagattcagttcgatggactgcttgctgttcggcttatgcatccccagcttggccgcctcggattcgacggtgttgaggtctactttttcgtcataggtcgactgcaggcggtcatttttctcctgcagggtcgcgatctcgtcttgcagctggccgacttcgttcgtcgcttcatatagctgcacatagccgcagatgaccagcagcagcatcagacctgccagcagcatgcccgccaccgccaagggggcaacggtcagttttgcccggacctgcttctggggcttgggccggtgcttcggcttctgtgctgactttcgggctggagccgtattgccataggtataccgagtatagcccacgtcatacgcggctgcgccgtttgtgcggtacgccgcagtattgtgctttttccgggacgccgccatggcactcgcctatcctttctgccgccctacggcagcttttccgctacgcgcagctttgcgctgcgggcgcgggggttctcctccagctctgccgcgcccgggacgatcggttttctcgtcacaaggcgcacccgcggctttttgccgcagatacagaccgggaattccggcggacaagtgcagccccgtgcttcctccgccattgctgcttttacgattcggtcctccaacgagtggaaggtaatcacggccagacgcccgccgggattcagcaggtcgaccgccttgcccagcatatcctccaccgcgcccagctcgtcattgacggcgatccggatggcctggaaggtccgcttggccgggtgctgcttttcccgccgcgcctgcgccggcattgcgctgcggacaagctctgccagttccagcgtcgtctcgatcgggcgctcagcccggcggcgggcgatggccgcggcgatctgcggcgcgtaccgctcttcgccgtaacgccatagaatccgcttcaactcgtcctccggggtctggttgatgatctcataagcggacaggcagccatcccgatccatccgcatatccaggggtgcgtccgccatataggaaaagccccggctgctgtca

SEQ ID NO: 4401 - DNA, 3412 bp, Unknown
  16S sequences of unknown bacteria
gtccggcggcacaaggccgcaaagcagctttaccagcgtgcttttcccgctgccgttttttcccacaatgccgatgcggtcgcgcggcaatacgatataggaaaaatcctctatcagctttctgtctccataggccttggcaatgtgcctggcctctagcgtctttttacccagcctggttttcagcgactccatcgccagcgtttcttcctgggccgggccgctttcgttttgcagcgcttcgatgcgctggatgcgctcccggcttttggtgcctctggcccgtgcgccgcgctgcagccaggccagctcgcgtttgagcaggctctgccgctttcgttcactggcccgcgcgtactcttcccgttcgcttttcagctgcaaaaagccttcgtaatttgcctggtaccggtacagcttcccatgatcgatctccgcaatacagttgcagacccggtccaaaaaataccggtcgtgcgtaaccatcaccagcgagcccttatagcttttcagctgtccttccagccattccaccatttcataatccaggtggttggtcggctcatccaaaatcaatgtttcgctggggcgtaccagcgcggccgccatggccagacgtttgcgctgcccgccggaaaggtgccctaccgtttcgccaaagtccgtcacgcccagctttgtcaaaatcgccttggcccggtagctttcctcctgcacatcgcgccccgcgccgcgcagcacatgctctagcaccgtatcctccggcgcaaacaccgggttttgcggcaaataggctgccctgtgccccggctggcagaagatgctgccgccgtccggcgcttcctcgcctgccagcaagcgcagcagcgtgctcttgcccgtgccgttgacgccgatgagcccaatcttgtctccctggttgatttgcagggtcacatcgcttagcagcgcgcgctccccatagctcttggatatgttttccgcggcaagcactctcaccgttctctctcccgttcctgatgctttgtattccttatattataagcgctaatgcgtcgcaagaaaaccccaagccatgctgcgctccgccgatttttgtcccagcatggccctgtttgcatgcgctcccccgtcattatacataaaatttgaatttttccaaggatttttgcaatatttatgcaaaaaccccttgtatttttcgaaatagtatgtataattatagacactttaagcaatttcgccgcttgcggcatccatagaaagggctgtttaagacatcatgaaaaagtataacaaagtcgttctcgcctattccggcgggctggatacctccatcatcatcccgtggctcaaggaaaactatggctgcgaggtcattgccatggccgcggatgtgggccagggcgcagagctcagcgggctggaggaaaaagccctcaaaaccggcgcctccaaattgtatatcgaagatctgacggatgaatttgtcaacgaatacatcatccccaccatgcaggcgggcgcggtctacgaaggcaaatacctgttgggcacctcctttgcgcgccccatcatcggcaaacgcctggtagagattgccaaaaaggaaggcgcagacgccattgcccacggctgtaccggcaagggcaacgaccaggtgcggtttgaattggccgtcaaggcctttgcaccggaaatgcccatcatcgctccctggcgggaatgggatatcaaaagccgcgatgaggaaatcgactacgccatcgccaaaaatattccgcttgccatttcacgcgagacaaactattccaaagataaaaacctctggcatctttcccatgaggggctggatctggaagaccccgccaacgaaccgaaatacgatgaaattttggaaatgggcgtaagcccggagcaggcgccggataaacccacctacatcaccctttcgtttgaaaagggcgtgcccgtcgcgctggatgggcaaaagatgtccgccaaggaaatcatcctcaagctcaacgaattgggcggcgccaacggcatcggcttggtagatcttgtggaaaaccgcctggtcggcatgaagagccgcggcgtatacgaaacccccggcggcaccatcctgtaccacgcacacgaagcgctggaaaccctctgtctggatcgcgatacgcagcattacaagcagcaggttgccatcaagtttgcagagctggtgtactacggccagtggtacacgccgctgcgccaggcgctcaccgcctttgtcgacaccacccagcaaaccgtgaccggcgaagtcaagctcaagctgtataagggcaatatcatcaacgccggcatgaccagcccctactcgctgtattccgaagaaatcgcaacctttggcgaagacaatgtctacgaccaaaccgattcccaaggctttatcaatctgtttggcctgcccatcaaggtcaaggccctgctggatgaaaagcgcaagcactgatttccccgccaacacccggcagcagccctgcgctgctgccttcctcattccaacgatagcaaaggagcattcccgtgaataaactttgggccggacgcttttccaaacaagaggatgaacgcgtcaacgatttcaattcctccatcgcctttgatgcccgcatggcgcagcacgatatccaaggcagtatcgcccacgccaccatgctgggccgccaaggcatcatcgagccggccgaggccgagctcatcgtgcagggcttggagggcattgcccgcgatttgcaaactggcgcgctcgccatcgaccccacagccgaggacatccacatgttcatagaggcggaattgaccagccgcctgggcgataccggcaagcgcctgcatacagcccgcagccgcaacgaccaggtcgccctggatatccgcctgtatctgcgggatcaatgccaagagatccatgcgctcttgctcagctacctcgatgcgctgaccgaccaagccgctcagcatcttgagtccgtgatgccgggctacacgcatctgcagcgcgcccagcccatcacctttgcccaccatttgatggcgtatgcgcagatggcgctgcgcgatcttcagcgcctagagcaaactcaggcgcgcatgaatatcatgccgctgggcagcggcgcgctggcgggcaccacctaccccatcgaccgccagctggtcaaaacgctgctcgcctttgacaccgtctccgccaacagcctggacggcgtcagcgaccgcgatttttgcatcgaacttgccagcgatatttctctgatcatgatgcacctgtcccggctcagcgaagagatcatcctctggtgctcctgggagtttaagtttattgagctggacgatgcctttgccaccggctcctccatcatgc

SEQ ID NO: 4402 - DNA, 3929 bp, Unknown
  16S sequences of unknown bacteria
ctttcacccgcccgcgtgatataatatttaagaaaaaaagaccacggtcttaaaacaaaaggagaaaccaatatgaccactatcgctgtaatcggatgcggacgcatatctgagggagctcattttcccgcgttcgcccagatggacaacatccgcgtaaagtacgcctgcgatctcatcgagtcgaaagccgctgagaagaaggagaaatatcccttcgtcgaacaggttatcaccgactatcacgtcgcgctgaacgatcccgaggtcgacgccgtctgggttctcacccccaactacgcgcactacaccgtcaccatggacgccctcaatgccgggaagcatgtcttctgcgaaaagccgataaccgtcagctacgcgctctcggtcgagatggcgaacaaggcaaaggaggtcggcaagctcctcaacatcggagtctgcaaccgctatcagaagtcggttgagactctccgcgagtgggtcaaggaaggcaagttcggcgatctctatcatgtctactgctcgttcagatccttcagatccatcccgggactcggcggcgctttcacgactaagtctcagtctggcggcggagtgcttatcgactggggtatccacttcctcgatctcatcctttatattcttggcgacgccaaggtcagaaccgcaacctgtgactcctacagcgagatggcgaaggacatgaagtcctacaagtatcacggaatgtgggctgaggacaccaaggacaccgagcacggcacgaatgatgtcgacgacttcatcacgggctatgtccgcaccgacaaagccagcatctccttcaacggagcttgggcacaaaaccttgacaagaacgagatgttcatagacttccttggcgacaagggcggcgcgagactgacatattgcgggctcttcgagttctgcaacggcgagactcttgagaccgagcatccgcagtatgatattccgaacatgtacctctgcgaggacaaagctttcgtcgagtcgatcgagaccggcgttaagaaccgcaactatatcgacaatatccttgagagcatgaagcttcttgacgtgctctaccagtcggctgacaagagagaggagatcagcttatgaagatcgggttcatcgacttcttcattgatgagtggcacgctaacaattaccccggcatgatcgacgagtacaacaaggctcacggcaccgaccacaaggtcgcttacgcctgggctgagaccgaacccgccggacatctttcgacgactgagtggtgcgaaaagttcggcgcgaaaaagtgtgagacgattgaggaactctgcgaaaaagccgatcacgtgatcgtcctcgccccgtccgatcccgacaagcatctgggttacgccgaaaaggttttcgcgaccggtacgagtccgtatatcgacaagaccttcgcgcctgattgcccgaccgcgaagagaatattcgacctcgctgacaagcacaacgtgaaattcttctcgagctcggctctgcgatacgccgacgagctatcgtgcttcaggggcgatgccgtggcgataacaacgaccggcggcggatcgaacatcgaggagtacataatccatcagattgagatggcggtgaaatgccttggcgtcggcgcaaaacaggtcgcatatgagcggatcgccgacgaggaacgcgttgaggtgcgctatgagaacggaaagcgtgccgcgttcctctacgcgcccgcgatgcccttcacggcggttgtcgccgataaggaagggaagagctcataccgccagataaactcgaagttcttcgtgaatctgattgccgatatcatcagatttttcgagaccggggagacctcgtttgccacggaggagacgcttgaggtcatgaggatccgcgacgccgtgataaccgggaaagcaaagccgggagaaaagatcagagtctgaggaaacccgaaaaggaaaggaaaaaatcatgaaatatactgttaaacgcgccatgtcactcacgctgctcaccgctatactgatgtcagtcgtctcatgcggctccgagggcactccggcagacgataccgatcaaagtaccacgaccacgacaactgcggaaacgacccttgtaaaagaaccggattttcccgacgtcacctttgacaacgaggaaattctctttcttaccgagtcccggaacgacatatacgactgccgcgagatatacgccgaaagcgagaccggcgagcttataaacgacgcggtctataagcgcaatctcaaaatcgaggaacgcttcaaggtgaagatcgccgaggagagcatagtggacgcgacaaaacaggcgcagaaatcgattctctccggcgacgatgtctatgatgtcgtcatgccttatatgaacacctcgataaagaacgcgcttgaggggctgtatctgaacctctacgacgtgccgaatctgaatctcaacagtccgtggtgggatcagcgcgcgaacgaaagcctgacggtcgacggaaatctctacttctctacaggagacatcagcatccttgacaatgagtgcacgatggtgcttttcttcaacaagcagatcgtcgaggacaacaagcttgaaaatccgtatgatctcgtgaagaacggcggctggacgatggagaaattcttcggaatggtcgagagtgtcgcgtcggatatcaacggcgactcgcagatgaaaatcgatgatgaccgcttcggacttttctgtcaggacaacgtgccccactcgctgtggttcggttcgggtgagcggataagcacggtcgataaagacggaaatctgaaattgacgatgggaaccgagcgttcggccgagatcatcccgtatgtccttgaaaaatgctactcggacagcgtttcacagctttacagctggtctgacgaggcgttcaagaagtcggtttcggccttcaacggcgggcgcatcctctttgccggatgggcactcgcggacatcaactatatccgcgactgcaaatttgacttcggaattcttccgtatccgaaatatgacgagaatcagtctgaatactacaacctgataagcacgattctggttccgggagtgagcgttccggtcacgaacgccgagccggaaaaggccgggcttatccttgaggcaatggcgtattactcggtcgacacattgaccgcggcttactacgacaacgcgcttcacacaagatatgtccgcgacgaggagtcgggcgatatgcttgatatcatcttctcgacgcgagtctacgatctcgggttcatcagcaatgtcggcggtctcggacagcttatcggaaatatgttccgtgcgaagaagacgaatttcgcgtcggaatacgagtcgatgtcgagcgcggctgagactgcgctggaaaagctgactgagtcgttcagagaagcggctgtgtcgcaaaagtaaataaacaagaccgtccggaggcgttgcgcttttcggacggtctttttgtcagctgtttttccagtatttgagttttggcagctcggcgttcagatattcacgcactttgtcggctggaaaactctcgtttgccattgatgtcgagagaaaatctataagtgcgtcgagatcatcgtagacgaatttgccgtcggtataacaccatttgcagtagtcctcgttgaaagaaccgtcggattcacggctcagagtcgagtcgtcaagcggcataccgcagcattgacagatcagcttctgcggcgagccgaggagtgtgttgatcgagacatcaaaggcaacaccgcacaaaaccaagggtcttgaaaaatcgtgaaaaaagtggtataataaatccatgaacaaacaaatgagcctgtcgttcatacacgacgaattaaaagaagtaaaaacgcacaagcgggaat

SEQ ID NO: 4403 - DNA, 7046 bp, Unknown
  16S sequences of unknown bacteria
acaaattaggctatcacgtcaagatattgccccatacgaccaaggaaacgaattttgatttcacggcggacggaaagacgtataactacggcgcggaaggcgagcttacgcaagcgtttgaaatagagcaggcggacgagtatttcacattgaaggcaacaaagacggtcaaaggcgttttggaaacactgtatccgaataaaacgataatcgttcccgagctgaaaagcaaaacgccgtatttcgcgttggttgtgagcagcgaagattacagcgcggagatcacaatagcgtttgtgtcggtggtagccgtgacgggggtcacgcttgatcccgaccacattgttttcggcgcgtttgacggctcggaaggagggtgagatgaagaaaaacaaattcatggaaacccgaatcggaaaattggtttgtatgatagcggtaatgtttctcgcggtagtcacggtcatgagcgggcaggtacgcctgtccgctcatgcggaaaccgctaacgaatttgataaaacagacgtattagaggatttagaggctgctacgatagacgacaaggcgttttcactggaagattacgcttttaacgaaaaagaacagaccgctgtattgttgctggcggaatactgttacagtttttacgagaacaaacaaggcaattacggactgtatctgtacgtgtggaatccgcgagggctcgcgttcgacgcgacggcgtcgaggaacacggcggagctgtcgtttggggatggcgaggaataccgtaaatatccgttgcggtatttaagccgaagcgagaaacgcggctatgaagggctgttctataaatataaaatcgaattgacggcggaggaacgctcgaaattgctgaaatcgctcaacagctcgaagcgggtgtatcatgtgagcggcatagaattattgacgcaaggggaaacttccccgcacgattacgaagtgaacgcggtttacgaatacacgggctatgccaaaggctacggctcaaacgagaacgacgactcgttgacttatacgaaatacaaaggcgaggtgtttacaatcacggaaaacggtttgaagcagaccttttaccgtcccgcaggctcgaacgggaaaaacagctatacgcaggatactttgcaaaccgtatattttgccgtcccaaatagactatttgaacagtacggcgtgatctcggagcttcgcgcggaatggctgaaagcgaaaacggcgtggggcatggtaacgggtacggaggaatactataaggcatttttggagtgcgtggggtattcgacgaaaaacacttcaccgctttggggcacgaataaacttccgtttacggattacgggttatatgcgccctccacggcggacaaggaaggttttgcgttcaactgcaacgtttcaagcgcgcaaaatatcccgtatctcgcgtatgtgctgcctacggatgaatggggcaaggacaaagcggacgagtacgtggtttcctggcaacagataaacgaatggatgaaaggctatcacgatacatacgacaagccgaaatcttatatcacgccgaaacctgacggcgcgccttcgggctgggtgccgtcgagctggacgttccggccgccgtataacggggaatacctggaagcggacggcgtgatatatgcgtatagtcgggctttgttcgagcgctgggacgaaaaaaagacggtcgtggatattccgcgggataaaaaattgtccttaacgagcgaaaaaatctctcaaagctggtggcaaaaaatgttcggcggctcgggggtcgtatcctcgacgacgttcgacgatatagaagcgatacacttagtggaggcgagcgatttcaaagcgagcaagcagctcacctgcgacggactgtatatctcgttaagcgattacgacgatttcaagaaattttatgatacggctacgaaacaggacgaaacggtggtgttattacggtttgacgtaggcgagtattccgcgctggaagcgagcgaggggataccctatgacgggaacggggtattgcagggcataaagacgggggatacgaacgcgcgggctgtttcagatgaacgtgtatctcggcttcgacatcatttccctgactttcgataacggcgaagaaacgtttgtgattcccgtggtttccgatccgatcgacgcgggcggagcttccacgggcgcgctgcatacaaactcggataaagataatcggaaactgtttttctcgctgttgatcctcgtgatactattgatctttttgcagctgacggggatattgccggggatagtgcgtttgatattctggctgattgagttaccgtttcgggcgatagcttgggtattcaagagcataggacaggcggtcaaaaagaaaaaaggaggataaagaaagaatggcaacaaccctgaaacgcattctcgcggtggttgccttgatagcggttgtctttacggtcggtttcctggtctttacgggaaaccggctcggccgctatccgaacgcaagagaagactttgaaaacaagacgtatttatccgacgacgggaacagggtagcgtttaaggcggataatacggtatattataccgtaggagagaatcaggttaaactaacgataacggactataaagacggcgtgatttatttggaaaaggacgaagcaagctatatgttcgttgcaatcggcggcgatacgctctacgacgcgcaggaaaaggagttcttttataggagggacggcgcatgaacgggaaaagaaaatgcgtatatatcgcactgacggtggtattgaccgccgtgtttctcttaatcggcgtactcgtctttgaaaaatcgtatttaaggatatgggaagcgtgcaaggatttgggcaactcggcaaagtattatttttgtgaaatcttcggcatcgagcatagcacgaacgtaacggtggggaataattcaaacgtaatagagggcgggggagaatcgataatgcccgataccccgcaggagtttggcacaaaagcgtggatttatttgaaactgttgataaacggaaagaatataacggcatggacggaattaatagggcaaaaaacaacgacggcggcgcgttttttggcgttggcgattccgttttttctgctgctgggttttgcggtcaagaagctgtacggacggcgcaatacgaaacacaaccgcgatacgctgccgcttaaaatctttaagagggtttccgccgttacctatcagccgttaaaacgatttatcataggttatatagaatttttgaaaaattatgaaacaatcgtaaaggcgtggctgatcctttggacgttccatttgaatttagcgacgattgtcatagaatttattgcctattatctgtatttcgcggtgtcgtataaattaagtaccgtatatgtgcagatttgtaagttggtcgtggatttacagatagtattgaaacattttccgtggtggagcctgggcggagtcggttggattctgttttgccgctggcgggaaaaactcgctgcggggctattgcggcacaacgaagcgagaaattgcgggtttatcaaggagttgccgatcgtcatcatgatttgcgggagcatgggcaaaaagaaaacgacggcggggacggacatggcgttgtcgcaaacggtgatgctccgtcaggaagcgttcagccggctgcaaaagacggacatgaaattcccgttctttccctggatttgctttgaggatgatataaaggcgaacatggaaagcgggcgcgtttataatctggcgtcgataaagacctggatagccgaaaagcagaaagcatacgactcgcatcacagcgacaaagtaattttgtacggctatgaaagtaaaaaatacgggctgtattacgacgattgcttaaagcggcaatatattttcgaggtattggaaacgtatgcgaagctctatttcatttacgtcattgaaagcagtcttttagtggcgaattattccatacgcgaggacgatattttattgaacgcgggaaactttccgctccggagctacgatttctttccgaaaaagcctgccgcgcagtcgaggtacgcgcatatcctggatttcgacgtgttgcgtctgggtaagaaagtgataacgaacaatccgaaagcggggagtttcgagttcggtgtggtagtgattacggaagtcggaaaggaacgcaaaaacaatctggagctgaccgacgtgaagggaaaagccaaagaaacgaaccagaagaacgatttattcaacgtctggctgaaaatgtgcaggcacgcggcgacggtggataactttccgtttatcaaggtcattacggacgaacaacgtgcggagagctggggcgcggacgcaagggagttatgcgatattttaaccattgtcggttccggaaagccgaagctggctttgccgttctataccatagaggatatgatcgcgtgcatggcgttttcgaggtttatgcggttgtattatgatttccggtatcggcgcggggacaatacactgcttgtctatttattgaaaagtgtcgtgggctggatttataagaggaacgagcggctttataaccgtttcgggtacagcgtgctatccatagaaaaggaacgtggaacgcaggacggaaagatagaaaagaaacggtattatttagcagactataaaatttacagggacagattttcaacggattgtttttcggattatttcaacgatttggcattaaaaacgaaagtggggttaagggattatttaaagtacaggacgtcaaaagcaagcgtagaggaactgaaagcgcagaacagctatttcatcaacggattgtatggaaacgccgaaaatagtcgcggagagggacgctcggcgtaaaaaataaaaaaccgcggcgtgtaaccgcggttgagatatgtgatattgaagtcaaacgagatgcaattcttgcaacagacgctccacccaatcgacttgggaacccgtatgttcgagtttgccgttgatgattgtcgcaacggatatcatggatatcgtgttatcataaataatgacggtatcgcaaagcgggtaaattttaaggagattttcttttgatttgataaatcttcgttcgatagtttcgccggtaacaccgtgtccgcccaactcgatgcgttttcttacccgttctttggcgatttcgggggattccacaccgacataacgcaggtgtatagaatagccgagttctttcgcttggctaatggttcttaaaatggtgatgccgctcaacgtggtttcctgattaaaggaaagacctttttccaaacagtctttttgcaatcgcaagagttgtttccccgcgagaatctgtgcgttggaatccgcccaatcgagtccgagcgagtgcagaatttcgtccgagttcaagcgtatgccgagattgtcttccgcttccgtggaaaacagcgtgcttttgcctgcgccgtttacgccggcaaagatagtaaactttttaatacttttcatgggcgattacttcttgttgctttttaccgagaagataattatacatttgcgtataaaaatccttttcctcctgcgtttttgccgaggaaatcagggtaagatattcgtctgcgctgatggtcctgtttttgtcgttaagcaaagtattcgccgtagtttgcaataattcgatacgattcatagcgttgcacctcgttttcaatatcagtatagcaaaaaaaaatagaaatgtcaatagtgacgaatataaaaaaacgaggaggtaggtatgtggtacgaggaaacgaaaatctaccacgacgggagccattatatagcaatcccgcacaccacgaaccccagaccccgcagaccgcgcccgaaagaaacggaaatcgaggtggtggaagaaatagaaccgccgcaacaaaatatgattgtcccagagattggcagcatgcctgttgcggctgaaaatgaggcccgtggagaagttgtcgaaccgatagaaaacccaccgccacgggcgaaagaaacgcctaaaacaactcgcaaaatgacgaggaaagaactgtttaatacaatctatgacgataccaggtatgtaacgaaaaaagaacaaaaggaaaaattgattgcgggtatgcgaccgtacttccgaaacgagcaggcgacggcggactacgtggaagcgcagctacgaagaaaaaagcggaatttgatttgtcggcggataaggtttacgagaaaagcgaatttgcaggaatttaattatttcgtgacgtttacctatgacggcaaaatccacacggaagaaagttttaagcggggactaacgaagtgcctgcaaaatttgcatacccgcaagggctggaaatatatgggcgtatgggaacgctcaccaaaaaagaaacgattgcattttcacgggctgctatatatccccgacggcatgatggttggggaattatttgaaaaaaacgattataatctgaatagccatagacggcaaattacggtgcaaaatacttttttcaataaaaagttcgggagatgcgattttgaagtgatagagcataaaaacggcttgggaagtgcgatggcgtatatcatgaagtacatagaaaaatcgggcgagaaaattgtgtattctcgcggactgccgcagttttttatctcagacattatggacgacgacgtggtgacgactatcggcatggaggataaaaagttattgttattcgacgactttacgtgttttgacgaaggcgagctggtcggcaaggtgggcgcggaaacgataaagcgtctgcgcacttctaactgacggaaactccgaatgtaaaaatacggcttaaaaaacgaaacttcgcgtaacggaaaaagcggggcggacgccaagcggctcagcggcgacgccccgccgttatcgcgtcgatttttccgtatttcagtcggttcggtcagttaagaggcgtgtgcttgtcgtggcggcgcgcagcgccgc

SEQ ID NO: 4404 - DNA, 2795 bp, Unknown
  16S sequences of unknown bacteria
caggtctcgatatgtctcatgaggctttcggaagcgtcaattccccgaaatatgacaaggacgatatcgcccagctgcagaaggacaataaactcactgtcggcacactggatatcaacgtgctgtataagaatgaaaaggtaccttttgcttacgattatgcggatatggattataatgtatccggcggcgaatctcacggcacacacgtggccggcatcgtcggagcgaataacagttctgccgtgcggggtgtggcgccggatgcacagctgtttattatgaaagtattcggcgacagttccggcggagcgtatgacgacgatattctgtcggcgctggatgattctgtaaaattaggagcggatgccatcaacatgagccttggttctccggccggtttttctgaggattccaacaagtcgatgcgcgaggtatacaaccggatcgaggatgccggcatcggactgtattgcgcggcgggtaatgaatacagtgcggcatacaagaatatcgcgggaaacgatcttgcgaaagctactgaggtggacaacggcatcgtcggttctccgtccacctatgaagccgcgctttctgtagccagcatgaataatgtaaagagcacgtcgccttattttaccgtgggagagcagaagatccgctataatgatacggcggagagcaagaatctacagttaacctctctggagggaacgtatgaatacgtggactgcggtgtcggagcttccgccgatttctcaggaaaaaatctgaaaggtaagatcgcgctgattcagcgcggcggagaggaaaacggagaaccgctgagtttcatacaaaaggagactaatgctcagaaaaacggcgctgttgcagctatcatctatgataatatctatggagatctggtcagcatgcagaccgcaaatctcattccttcggtatttatcagcagagagagcggaaagcttctgacggatgcagcggagaaaaaagtcacgatcagcgaagatttcatcgatctgtttcaggattcttccagcggcagaatgagtgatttctcctcctggggcacgacatcagatctgaagctgaaaccggaaattacggctcccggcggggatatttattctacgctgccgaataatctttacggaaatatgagcgggacttctatggcttcgcctcatctggccggcgctgcggctgtcatgaatcagtatatccgggagtcggtcgagggcggcatcggcatgacagcggcggaaaagaccgaactttctaacgcgctgatgatgagcacggcttcgccattgaaagacgctaacggtatcctgtattcgccgcggaagcagggagccggtctgatccagctccaaaatgccacaaagagcggggcttatcttctgagcgataccggagaccgcccgaaggcggagctgggagcgagcgaagcaggaaactatcattttgattttcaggcggtatctctgcgcggtcaatcgatcacgtatgatgtcgatgtcaccgtgctgactgaagatactgtgacagaagacggtgtgacatatatggcgcaatatgcgagggagctgaccggcgatgaagtgaatgtcagcgttccgtcggaagtcactctttcctctggaggaaagcaaagtatttcggtggaaatacagctgacagaagagggaaaatccaatttagaggaggaatttccgaacggcatttatgtagaggggttcgttacgctgactccgagaacagacggagaagtgacgctgtcctatccgtttatgggatactacggagatcaggcggatattccggtcttcgattcggatatttatgacgaagagaatgcttcgctgtatgaaattcagctgggccagtttaataattccaacggaagcggatatattctcggacataatatttatgtgaaagaaaattatgaagcgtatgacgaggataagatcgcgatcaaaggcggcgtgaatacgaagaatgtcacggctgtcctgtccatgctgcgaaattcagacgagctggaattttctgtggaggacagcgatggggataaggtttacgaagaaacgatgggcgacgtacagaagacctattttaatacggaagctttctacacgccgatggcggacaagggctttacgccgtacgatacctggaaccagcctctgccggatggagagtatacctataaggtttcctctacgacaggagacagtacgcagtcaatttcttttcctctggtcatagatacgcaaaagccggaggtgatttccagtacagtggaaggatccaagtggaccatacaggtgagggataatcattatatccaggcgctctgtattaccgctacgggcagtacaccggtgacggaatatatcgagccggaaacttcggaagcgggcggtacggctgaggttgtcttcgacttgtccgatccggctctgcgggatctggatcaggcgaaggtcgcgatgatcgattatgcggagaatcagtttgtttccgattattattctctctccgataaagtcgtgatcgatccggagtcggtgtctctggacaaagtggagattctcatggaggaaggaagcgatacgcagctttccgccgaggtgcttccggagaacgcatcgaacagaaacgttgattggaagagttctgacagcactgtcgcagaggtggacagtaaaggcagggttcacgctgtaaaagcgggaaacgcggtgattactgcggaaacggtaaatggtctgactgcggaatgc

SEQ ID NO: 4405 - DNA, 19602 bp, Unknown
  16S sequences of unknown bacteria
tcgtgcgcgctcggagctcgcctttttccgccgtcaaaatgggcgggcctttttccctccgctgcctatcgccgctctgctcccccgcagttggcggtgggcatactgaccccttgcgggttggggtgactcccgtggcttggcggttttgcagcgtcaaggaatgagggcctctgctcccccgcagtcggcgtggggcaggcttaccccttgcgggttgggatgactcacgtagcttggcggttttgcagcgtcaaggaatgagggcctctgctcccccgcagttggcggtgggcatactgaccccttgcgggttgggatgactcccgtggcttggcggttttgcagcgtcaaggaatgagggggctgctcccctgcgttcatggtttgaacgatttggaatgcgaaaggccagcgtggtttcgaagccatgctggcctttattgcgagccatgaggcctgtcgccgaatggcggtaaaaccccggccaagctgcatgtctcacgagctgccccgcgcccaatgggcgcggtgtggggtcaaggggcactgccccttgcgcgagccgtggcacctgtcgtgccacggcggtaaaaccccggccaagccgcatgtcgcgcgagaaccctgcgcggctttgccgcgcagagacgggtcaagggctttagcccttgaggatgaggttgcagagacggccgggaacgaagatgagcttggcgatctgcttgtcgcccaccaggcgctggacttcggggtcggagggcagctccttctcggcctgctcccgggtcatgtcggtgggcaccatgatgtgggacttgaccttgcccgcgatctgcagggcgatctccacctcgtggcgcttcatggcctcctcgtcgtactggggccagggctcgaaggccagctccgtgccgaagcccatttcttcccacatttcctcgcagatgtgcggggccacggggctcaggagcaggatcagggtgcgcagctcgtcgcgggtgcagccgttccgggcgtagaactcgttgaccagactcatcatagcggcgatggccgtgttgtacttcatggcctcgtaatcgtcgcccaccttcttgatggtctcgtgcatgaggggggtaagctccttggagtagccttcgccgggcttgatcatgtccatcagccgccagacccggtcgaggaagcggcggcagccccgggcgccgttggtggaccacggaatggcctgatcgaacgcgcccatgaacatctcgtacagacggaacgcgtccgcgcccagctcgttgacgatatcgtccgggttgatgacgttgccgcggctcttggacatcttttcgttgttctcgcccaggatcatgccgtggctggtgcgcttctggtagggttcgggcgcggaaaccagccccagatcgtggaggaacaggtgccagaaccggctgtagagaaggtgcagggtggtatgctccatgccgccgttgtaccagtccacgggcatgaagtagtccagcgcttccttgctggcgaactccttgtcgttgtgggggtcgcagtagcgcaggaaataccagctggaaccggcccactggggcatggtgtcggtttcccgcttggcggggccgctgcagtgggggcaggtggtgttgacccagtcggtcatggtggacagggggctttcgccgctgtcggtaggctcgtagttttccacgtcgggcagcagcacgggcagctgatcctccgggacgggcacggtgccgcagtgggggcagtgcaccaccgggataggttcgccccagtaacgctgacggctgaaaacccagtcgcgcagcttgaagttgaccttcttctcgcccacgccgttttccgtcagccattcgatgatctttttcttagcgtcggccacccgcagaccgttcaggaagtcggagttcaccatggtgccgtccacgatgtcggtgtaggcttcgttggtgatatcgccgccggccaccacctcgaccatggggatgccgaacttcttggcgaaggcatagtcgcgggtgtcgtgggcgggcacggccatgatggcgccggtgccgtagcccatcagcacatagtcgctgacccagatgggaatctcccggccgttgacggggttgaccgccttcaggccgtcgatctgcacgccggtcttgtccttgttcagctcggtgcgctcgaagtcgctcttcttggcggcctcggcccggtaggccatgatgtcgtcaaaattgcggatgtccgccttgtacttttcgatcatggggtgctcggggctgaccaccatgtaggtcgcgccgaacagggtgtcgggacgggtggtgtagacccgcagcttctcgtccttgcccgcgatgcggaagtccacctccgcgccctcgctgcggccgatccagttgcgctgctgcaccttcacccggtcgatgaagtccacgttatccagcccgtccagcagcttctgggcgtaggcggtgatcttcagcatccactggctcttgaccttgcgcaccacctgactgccgcagcgctcgcacacgccgttgaccacttcttcgttggccaggccgcacttgcagctggtgcaccagttgatgggcatttccgccttgtaggccagcccgttttccaaaagcttgaggaagatccactgggtccacttgtaataggcgggatcggtggtgttcacctcccgggtatagtcaaagctgaagcccagccgctggagttgctcccggaagtggtcgatgttcttcttggtcacgatggcgggatgcacgtggttcttgatggcgaaattctccgtgggcaggccgaacgcgtcgtagccgatgggatacagcacgttatagccctccatgcggcgcttgcgggcgatgatgtccagcgccgtgttggagcggggatggcccacgtgcaggccgttgccgctgggataggggaactcgatcaggcagtaatacttgggcttgtccgaggggaactgggcgttgaacacgccgctgtcggcccatttcttctgccatttcgcttcaatggcttccgggttgtattggggatgctcctgcataggtcttcgactcctttacgattgggttagtacggcgcggacgcctgagaaaaacaaatgaagggggattttttcattgcacgacttcgtctgtcggaacgagcagggcagcgtaacgccatccttcccaaaccagacgggctccgtcgtgagaagcggcaaagcgatccgcctccccgtgcgggacaaataccaccagttcatccggcagattctcccgttgacaatagaacctgcttgtgcccaatggtatacctgaatttcctctggaggagcagcgtcctcatagggcaaaatggtcaggctgccattggaaagctcgatcatcacgtttgcgtgccaataaggcatcatgccgtactgatagccgttttcctgcataaacgccacgcaatcgcggcattcgtccgcacaggtcagatcctgatgggtcaggccgctccaggtgtccatgttgcggcgctccacgcgcagataccacgcgctgtaagcgccttgaaacaggaaacacagagaaaccagaaaacacagggcttttcgagcggtaagtacgggcggatgatcgtctagttccaacgccagcgtcggcagcgcgagaacaatgaccggcacataatacaattcgtaaaaacggcagccagagtcaaacacaaaaaccagcgtggtggagaacatgcttaacgcatacagtccgcccaggagacgctgttccatcgtgccgcctttgcgcaggaagcagacggagcgatacagcagccagacaaagctgaccagcgctgccgccagagacaaaccgcgaatcccgaccagtgacagcgcactgtttcgcacgccgatagccgtcagccagccgttccagatgtcggcatagcgctgagccgtctgaatcggcgcataccacgcggaggaactgttgacgatcccataatagggcagcagcacgtgctggtttacgacgaaacccgccaaaaagcaaaggcacgagccaatcatcagcagcgtcagccgaaaggcttccgtatgaagaagcacttgctgtctccaaggttttccgtacacccacggagcttttcggaacgcgcgaagcagttcgacgatgcagccaaccagcaggggaatgccgatcaacagcatatggcgtatgccgttgaggccaacaaaaatccagagcagacccagcaggacggcggggagaagggcttgtttcagcccttcttttccgcagcgcagcgtccagagcgtcaggcctatgatgaaaaacatattggccagatacagggtgtaatacaggtggtaaagaacgattcgagcgtaaggaatactgaagggcagcagggaaagcgcggcgaccgttacccgggtttttctggaaagacccgcctgacgggtcatgaacaggaaactcagcgcataaatggtctggacggtgatcgtaccaagaacgtgcaccagcgtccactgcccggtcaaaagaaagaaaaaggagaatacagaggacaggtccagcagccgcacctcggtggaatagtaataattggtcgaaaacagatccttctcccgggcaaaaatattgccgcagtacaggaaatcagacacatcgccgtccaaaacgtttcgtgccacatacacatccatgtacagtgtcagcaaaatgacaagcccaagaaggagccaatgactctgttttcgaagtgtccgcagacataacttcatttttctctcctgtgctcttaccgattttccagcttctccacgcccagcttcatgcggcgcagggtctcgtccttgcccagcaggtaggcgatctcggtagcgccgccgggggtggactgcaggccggaaatggcgatgcggacgggccacatgatctggccggtcttcatttcgttcttctgggccagctccatcagcacggctttgacgttttcctcgctgaagtcctcaagggcttccagcacgggcagggccagcttcagggccttcaggctgatctccgggtcggtcttcatcttcttgtgggtgtagatgtcaatgtcgtactccggcagctccgccagaaagcggatctggtcgggcacccggttgaagacctcggtgcgggtgtgcatcaggctggccagcatccggtagtccatgtttttgcccgccagcaccttgtcgaaccacggcgtggccagctccagatattcgtccagactcatacgggtgatgtattcgtggttgaaccagtccagcttttcagtgttgaagatggcgggggacttgctcaggccgctgagatcgaaggcctcgatcagctcctccttggtgaagaactccttgtcgccgtactttttcacgtccgggcaccagcccagcagggcgatgaagttgatgatcgcgtccctgacgtagccctgagaaagcagatcctcaaagctggggtcgccgtagcgcttgctcagcttgcggctggcgtccttcatgacggggctcaggtggatgtaggtgggcttttcccagccgaaggcctcgtaaagcaggttgtacttgggcgtggagctcaggtactcggtgccgcgcatgacgtgggtgatgcccatcagatggtcgtcgatcacgttggcgaagttgtaggtgggcaggccgtcctgcttgatgagcacgttgtcgtccagcgtgtcgcagggggcttccacgtggccgtagagcgcgtcgtcaaagctggctgtgccggtcaggggaatgttctgccggatgacgaagggctcgccggacttcatgcggcgcagggcctcctccttgggaatgtgcaggcagtgcttgtcgtacttccactgctcgcccttggcggccgccgcgtcccggcgctcctgcagttcttccttggtgcagaagcagggataggccgcgcccttttccaccagctccagcgcgtagggcatatacagttcccgccgctgggtctggatgtagggaccgtaatcgccgcccacgtccgggccttcgtcatagtccagcccggccagacgcatactcttgtagatcatgtccaccgcgcccggaacctcccgttcctggtcggtatcctcaatgcgcaggatgaacttgccgccgttctgacgggcgaacaggtaggtatacagggcggtgcgcaggccgcccagatgcaggtagccggtggggctgggagcgaaacgagtacgaacggtcatgggagagcctcctgattgctgtgataatcatggaaaatgccattctctgtgatgaaaacaaagaaatgtaagactttccgggtatcattatataccaaaatggcattttgtcgaatgttttttggttccaaagaggggaaaaacctgccataggcccgaaagcacgaaattttccttctccggcgttcatatactgatcggaaaggaggtctttgagaaatgaaagaaacgaggaaaaaccggcgctgggggacggccctgcggcgggccgcggcgttttttctgtgcgccgcctgtctgttgggaggaacggggacaagccacgcggaggaaaagcccctgcgcattctgctgatcggggtggatgcttacgaagatcaggcgcggggacgcagcgacaccatggtattggtgcaggccgacccggcggcgggagagattcgggcgctgtccttcctgcgggacttatacgtgcccattcccggctgcggaaccacccggctgaacgcggcctattccttcggcggggagaagctgctcaaaaccacgctgaaaaacaacttcggcgtggaggtcgaccgcacggtgacggtcagctttgactcgctgtgccgcatcgtggacgcgctgggcggcatcgagctggaagtgacggaggaggagcgggaacagctcaacgccattctggcggcctacaaccggggattgggactgaaccccggcgacgggcggctaagcggcagtgggactgtccatctgaccggcaaacaggcgttgagctacagccgcattcggaagatcgacagtgacttccagcgggcggggcggcagcagaaggtgctgcaggccatgctggaaagcgccaaacagatgaacttcttcacaatggcccggctggcgtggacctgcctgcgggaagttcgtaccgatctgactttgggcgatctgaacgccctgctgccgctggccgccggcggcggggagacgaatatctccatgggccgggtgccctttgatggggcctatgaggatgcgaccatcgacgggatgcaggtgctccggcccgatctggagcggaaccgcaccctcatccgccgttttttgagcaactagcgccccttttcaaccgtccggccctgtgttagaataagaggaagggtttttggacccactctttccctgaacaggaacgaacagtgaagggagtcctgaatatgagtgaaaaccgctgcccctcctgccgccgggagctgcccgtggctgacggcactttctgcccgtactgcggcgcggcccttgcaaaaggggacgagctgccggagccggtccgcgccgcgttggacgccgccgggaaggaaaacgacccggtgaaaaaatacaggctgctttgcgacgcccgggaagcgttcccgaactgcctgcccatcgaggaagaactgctctttctggggcggctgcacgagcgggacgggaagaatcccacctttgacgtgatcaaatgcttcctgctgcacccctatctgaccccgaaggaatttaccccccaaaagcgggacgctatgcggcaggagctgttccatcacgaacaactggaacggtgcaaggcgctggccccagacgcggacgttttcgtcagccactatctggaacggctcagtgaggaatttgtgcggctgtttctggaaggcagcacctattacatgcgcagctttttcgggtttacctcccgcaaaaacgcgccccgtctgctggcggagccggtggcacggatgatggagaacatggctgcggatgaagcactgaccccggacgagcgccggatgctgacccatgccctgtaccgcggcttcagccgccggatggacggccagacggaatggctgcggcaggagctggaccggcggggcgtttcgatggacggcgctttggactgaccggccagaaacgccggaaaggagcaacatggagaatcaaaacaagcggccggaagatatgccccggcaggttaaagcccagcagccgaagctgaaggaagaaaagcccggcgacgcgcttccgccccagcagccgctgaccgacgaggagacggccccgaagcagccgccccgctggcgcaagatcgtcaaaaaggtgcttctgtggctgggcgtcgtgctggcgctggtgctgtgctatctgttccttttactgggcgagccggatgaggacgagcagctggcccagcagccttcgcaggcgcagcccatcaccctgcccatgagcgccgtggaaagccccggcgataccagcccggaggggctggcggagcttttcggccagccggtattgtgcctgtacggcagcgccctgtccatgacccgttcccgggtatatgataccgccttccggggcgaatacgcccgccgggtcacgctgacctatgcctttgaggatggacaggccttgacgctggaaagtatccgtcccgtttccgccattgccctgctgcgcggcgaggattatcatctcaatggcgacagcctgtactacatcggcggcatggacgctgcgtggatggaaaacggcacggacgtgctggtcttcggccaaacggcggacgcggcctacgccgtccgctgccccatcgggcacaaggccgatctggaagtactgctgaagcagacgaccctgattgccgcgccgtccgcagaataattttttcaaccgataccaaaggagcattcagaacaggagcatcattcccatgcaaacgaaatccaccaacggcaaccaacgcaccatgaaaacctccgagctggtccggcgctttctgccctatttccgtccctatcggggcatgctggcgctggacctgttctgcgccatgctgaccacgttgtgcgacctggtgctgcccatgatcgtgcgcagcattaccggccttgccagcagcagcgccgccgccctgaccgtagcctatgtgctgaaggtgggcggcgtgtacgtgcttctgcgcctggtcgataccgtggccaactacattatggtggcccggggccatgtgatgggcacctatatcgagcgggacatgcgccacgccctgttcgagcatctgcaggagatgggcttcgcctattacagcaacgccaaggtggggcagatcatggcccgtatcaccagcgacctgttcgatgtgacggagttcgcccaccactgcccggaggaattcctcatcgccgccatcaagatcaccgtgccctttgtgatcctgctgggcatcaatccggtgctgacgctgatcatcttcctcatgctgcctatcatgctggtgctggcccggcatttcaacaagaagatgcgcgccgctttcaaggaaagccgccatcaggtgggcgagatcaacgcgcaggtggaggacagcctgctgggcatccgcgtggtgaagagcttcgccaacgagcccatggagatcgacaaattcgaccggggcaacgaggagttcgtgcgcatcggccgccgcaaataccgctacatggcgggctacaacaccaccacccgttcctttgacggcattatgtatatcgtggtggtcatcgtgggcgcgctgttcatcatcgacggcaagatcaccgcggcggactacatggcgtatcttctgtatatttccacgctgctgacctccatccgccgggtggtggactacgcggagcagttccagcggggcatgacgggcatcgagcgcttctgcgagatcatggacgtgcagcccgacgtgaacgacgcgcccggcgcgaaggaactgaccggcgtgaagggcgatgtgaccttcgaccacgtcagcttccactataacgacaacgaccggatcgtgctggccgacatcaacgaaacggtgaaggcgggcgacaagatcgcgctggtaggccccagcggtggcggcaagaccaccttctgcaacctgatcccccggttctacgacgtcagcggcggccggatcctgatcgacggtcaggacatcgcggggctgacccagcgcagcctgcgggagaacatcggcatggtgcagcaggaggtgtacatgttctccggcaccatttatgaaaatatcgcctacggcctgcccggagccacccgggagcaggtggagaccgccgcgaagcaggcgggagccgacggctttatccgggagctgcccgacgggtacgacacctatgtgggcgagcggggcgtgaagctgtccggcgggcagaagcagcgcatctccattgcccgggtgttcctgaaaaacccgcccatcctgattctggacgaagccaccagcgcactggacaacgagagcgaacggctggtgcaggattcgctggaaaagctcagcaagggccgcaccaccttcaccatcgcccaccggctgaccaccatccgcggggcgacctccatctgggtactgacccaggacggcattgtggaaaagggcacccatcaggaattgatggcgaaaaaaggcaagtattacgaactgtacagcatgtatacggaggatctttaagatgacagaaataaaggagcagaaccgtttccttcccccgatgcggatgcatccggcttaccgccacggcgatatgaccccctggggcggcgaacagctgaaaacggtcttcggcaaggacatccccgacgagcgcaccggcgaagcgctggaaatgagcgtgattcccggactggaaagcacggatgacgacggcgtgaccctgacggcgctgatcgagcgctacggttcccggctgacgggtctgccggaaggcacggaatttcccctgctgctgaagctgctggcggccaggggcagcctgagcgttcaggttcacccggacgacgcatacgccaaagcgcacgagaacaagctgggcaagaccgaagcgtgggtgatcctccatgccgaggagggcgcgtcccttctgtacggcatccgggagggcgtgaccatcgacgacctgcgccgggcgctgaccggcggcgaggacgtggagcccctgatccagcgggtgcaggtgaaggcgggagacgtgttctatatgcccgcaggcatggtgcacgccatcggcggaggcattctgctatatgaaattcagcagtccagcgacgtgacctaccgtctgtgggactttaaccgggtcaacgccaagggtgaaaagcgacccctgcacattcagcagtcgctggacgtgatccgccctgagctgaagggcctgcgggcccatatgccggagcatcccgcgcaggagatcacccggcttctggacgtgcccgcctttacgctggactgcgtggccgcggacggcgcctgcatcctacccgcggcggagaccttccgggtgctgaccgcgctggagcctctgactctgcgctggctggagggtgagatggaactgaaggcgggagacacggtgctgctgcctgccgcctgcccggaggttggactggaaggccatggccgggcgctggtctccggcgttgggagcagggcatgagcaagttctacaacggtttgatccgtctggtgcgcttcgttctgccggatatggaaacggtctgggaggaacctttcgacggcgaagcggcggtcttctgccccaatcacgccgcctccttcggccctatcgctatgtgcgcttttttctctctgcgggatcagtgccacccatggctgaacgcgggcatcatggagcgtaaggagatccccgcctatgtccggcaggactactggtgggagccgggctgctttttcgagccgctgctcaatatgacccttccctacctgatggctctgctgctgccgcccattctgggcagcgtgcccggcgtaccggtgtaccacgacaaccgggtcatccgcaccttccgtaaaagtctggaatacgtggcgcaggggcatcatctggtgatcttttccgagcagcccgccggtcacggcagcagcgaaatggagctgaaccggggctttttgcaggtagcgcccctgatctgcaaacgcacgggcaaggcgctgaagttttatcccgtccatgtggaccgggcggcgcggcgcatcaccgtctccaaacccgtgccctacgaccccgccctgcccctgaaggagcaggaggacggcatcattcaggcgctttccaagagcattctgggcaaatgattgtgcaatgataacagacgagccgctcttgatcgaacggcccgttcctgcttcatcatctcggcggagtgctgctggggtgtaggacggcgaaaaaacgccggatggatgccgaggggcgcgcccgacgcttttccctctttttttctgtgctggccgtcaagggtcaagcagctccgtcaagcctgtcatcccgttcctccgccgaactctctgcgcggcgggggatgaccggcaaagatacttccccacccaatcccatccccgaaaggagtcctttccgatggttcaagtcgtagccgcactgatctggcgcgataaccgcttcatgatctgccagcgtccggaatataaggcccgcgggcttctgtgggagtttgtgggcggaaaggtggagccgggcgagaccaaagcccaggcccttgcccgggaatgccgggaggagctggacgtgcaggtggaggtcggaacggtcttctgcgaggtcgatcacgtctacccggacctgaccatccacctgacgctgctcaacgccgccattacccagggcgaacccacactgctggagcataacgccatcgcgtggatcaccccggaggagatcgaccgatacgagttctgcccggcggatgtggatatactcaagttgctgaaagcccggcaaggggaatctccccggtcatgaccgtttccagaaagcgccggtcgtgctccaccaatagaagcgtggggtcggaggccagaagcagttcttcgatctggcggcggctcaaaacgtcgatgtagttcagcggctcatcccaaatgtatacgtgcgcaggtgttgcaaggctcaaagccagcagcaccttctttttctgcccctgactgtagtcccgcatatccagcgaaaactgctcccgggaaaaatccatgttgcgcagaatggctttcaccagcgtttcgtccgcgccccgggcggcgatggctccttccagcgggccggacaggccgctcgtgtcctgcggcacataggagaccaccagcccggaggccagacggacgccgccgtgcagcgcttcgccctcgcccaccagcgtcttgaggatgctgctcttgccgcagccgttggggccggtcagcgccagccgttcgccttgacggaggatgaactgcacgccccggcagacttcccgtccgtcgtagcagaccgcgccgttttccacggtgatcagctcctgcttgggatggtgcagtgtgcgcagcttcagatcgcccacccgttctacattgtgcaataggccgctcttttcctcggcggcacgttcccggcgctgcaccgccgccttggcccgcttcatcatggcggcgctgcgcgcgcccgcgtagccccggtccaccgctgcctggacgctttccggcacgtgaaatttgtccttctccgccttctgggcgaactgcgaagcctgccgggcgctctgattcagccggccgatctcttttttcagcccctcgttccgcttgagctcgtaggcgttctgccggccaaactgctcctcccaggtgtcataatcgccctgaatgacctgaaagccggttttgttgatgctgaggatgtgatccacgcagtcgttcaaaaaggcgcggtcatggctcaccagcagaaagccgtcctttcggcgcaggtattccgccacggcctgacgacccagcagatccagatgattggtaggctcgtcgatcaggggataagcgtcctcccgggcgaacagagcgcagagcagtgccttggtctgctcaccccggctcagggtggagaaggaacggtacagcgcgtcctccgtcacttctagcagccgcatttccttcatcagcttccactccggttcccctcccgcggcctcctgcatcacgttcagggtcatgtcctccgggtcggacacggaatagggaaaatagacaggctgaaggggcaggctgatctgcccgccgtggggcagctcgcccatcatcagccgtaaaagggtggtcttgccccggccgtttcgcccggtcagccccagccgccagccggtgtccagctccgcgctccagccggggaatacaggctcactgcttccgtcataggtaaaagtcaaattttgaatcgaacagcgcatgacaaaagcctccttcctgatagggcagggggaggtatggcggcgcgtctgaaaaacgcgcaaaaaaagcggagtcctcgggactgcgctttttcactgccacggcaaaacaagccctgcggaaacattcatccgccggggtctgtttttcctcccccattcaaatgggttcatggcagtgttatttgcgcatcccgaccctccgtttcgtttatcaaattcggggaacgccatcgtctgcgttccagcacattgtaacagaccccctgacagaatgtcaagaacgatctttttcttccccgatcaggccttttctgcggtacaggtacacctcgtcgtaccagaagccctccggggtctccgccgcggcgatcaggtcgtaggtcttcaaaatgtcctccggctgacggccccgggtaacgacgtagtcgcacacgccgtcgcgaatgtagcgtacctgctcgtccagcatctcctgcaggggaacgttggtctggtggtaatactttacgttaggcgtgatctgggcggcagtgtagaagcccgcgtccataaagccgtaattgagcagcgtggcccccggcgtttcagcgatcttggcggcaaactggtactgcatggtctcctcccggggcaggccgaaggactccttcacattggggctgaaaaccgggcacagcagcacgcacagcccgcacaaagccgccgcgatacggggataggcccgcttggacagcccggccagccgcttttccagcagagcgcccagccagccgaaaaagcagggcaggaacgccgccagcgccagcggataataggggtaggtcttgccgccgatgaacacgcccagcgctcccggcaggaagggcagaagccagccaatccgctgccagccggtcttgccccggccaaagcaggacgcaatcaccccggcgcagactggcagggcacacagggggcttcggctcagccattcccagccgcttttcagcatctgcttcgcccgccagagcagcccgccctcgccgctggagtaaaggaatagattatcatacaaataagttttcagccagtcggccaacgcgccgttcaggccgaaatagatcagccacggcagggtggacagcagaaagcccagaagcagcccgcccagagagcgaaagaatcccttcgccccgtttcgccgggcatccagaaggcagcccagcagcagagccattccctgcgtcccgcagagagtgaatttcatccagaacacgcagccgaagagaaaaccgtcccccagcagccgcccgaaggaaacgggcttttcgcttttcagcgactccagccagtgtagctgcaccagcaggattatgggcagggccagctcttccgcgctgtcccctgcctgaaagcagtaggacgtgtacacgcacagcgccgtcagcgggatggagagcagcgccgcccgtcggcccgccatggccttgaccgcccggtagccttccagcaaaaaggccgccgcaaacagaatttccagcacccacacgccggtgaaatccgccgggcagaccagcgcgcacagggcatggagagcgtagatcagcgggcctttgtggtcgtacaggtcgcggtacatcacccggcccgccagcatccccttgcccgctgaaaaataaatattcgcgtctgaccagtcgttgatgggataggccggggacgatttggagcagaaaaacagcaccgccgccgcgatgatcagcgccagcagcccgatccgcgcccgttcccgggcagaaagcttcgtcaatccaagcgcctccttataaaaagcatgaaacgcctcttcaatgtagcacaaacccgttccgtgggcaagcatttttccctaccctgccgcataccctgtggcgaacgaggggaggaatggccatgcgccgtggcgcggtgctcagcgcgctgttattgaccgcgctgcttctctatttatggcccggactgctgaaaggactgtggacggacacggacaaccgaatggccggcgagctgcgtcccgcccagcgccgcaccctgaccctgtggtggctccccggggaaatgggcgatcagcgctgtatcagccgcctgtgtacccgtctggaaaaggaaacccccggactgcgcgtctttctgcgccgggcggacgcggcggagctgacggctcccgacgcgcttctgccggacgcggtgctgttcggcacgggggacgtggtcaatcccgagcagctgtttcttccgctgacgctttcggaggacgacgggaatctttcctccgggaaaagcggcggcgagacttatgccctgcccctctggtacgaggaaaacgtgctgagcgttccgaatggctggctggaagaaaacggaacgcccgctgtcaccgcccagccccgttccttattgggacagaccgccgccaccccaaagccggaaacggacgagacaccgtctatcccgtggcggaggctattggcagaaaatgcgctgtgggtcagccccggcacggcagggccgcagctggcgttcaacgcgccgtcttctttgcgggaggaactggactcggcggcgcttcattcggcggaaaagccggtcaagggcacggcacgggtctggacgcgtcgggagcatctggccgccgctcaaaaggaagccctgacagccttttcactgcggcctgctgtcagcgaccgggtacgatatgcggccctttgccgggacacggcggagactcgcgccctgcttgcctttctccgctcggagggctgccgggaggaaacggaagccgccgggctcctgcccgccgaacaggcggattccctgcccaacgccttcgcccacacccgggaggaactgaacgccttctgcgcggacggcctgcgccggggtcttgacccggtggaaatcctgcttcggctgcgctgaccgggccgggatttccatgcatagctcccccgaaaattaccatactaagggcatgaatgaaacttcggaggcgataccatgactcagatcacgacgcatcatccccgcagcggctggaaggaagacgaagcccggcttttgttcgataccgtccgtgccgccgcggaggacgggcgttccctgcgggaggtgtttcaggaggtgggcggccaactgcagcgcaagcccaactccatccgcaactattactatgcccgggtgcgggaaacgccggatctttctccccggcccacgcccttccgcgcctttaccccggaggagctgcacaccctgctgcgggaagtgctcatgggccggggacagggggaaagtgtccgcgcctgcgtcacccggctttccgggggcgaccgttcccaaatgctgcggatgcagaacaagtatcgttctgtgctcaaaaaccgccccgagctgttgatggaggcggcggaagaactgcggcaggaggggctgccctgcccggagaaggtggtggtcttccgccggtatggccagcctgtgccgggaaacggtgaattgggcgcgctcaatcgtcatcagagcgacccggaggtgcggcggatgctggacgcgctgaatcatcttctggaacagcgggacagcgccccacctcccacccccgcttcggaggaagcccggcttcacgccaaatggctggaggcccggcaggaggccgaccggctcaaggtggaggtcgatctgctgaagatggcgctggaagacgaacgcagcgcccgttccacccctgcggagtaagctccgcgccgcttttccccgcgcattgtatatggaaaaatcgccgttgatatgctacaataggagcagtatcaacggcgattgatttcttcacggaggatgactcatggacgaaagcacgatccgcgaaaaactgtcccgcatcaagtgtttcatgctggacatggacggaaccttctatctgggcgccaatcttctggacggttcgctggactttctggaaaagctgcgggagactggccggacgaatctctttctgaccaacaattccagcaagtccgccgaggtataccggcagaagctggcccgtatgggcgtggcggagcgttaccgcaatgtgctcacctcagggcaggcggcgggcagctggtgtctgcgggaaatgcccggcaagaaggctttccttctgggcaacgatatgcttcgggccgagctggaacagatgggcgtagccatcgacaacgcccacccggactacgttcttatcgcctacgacaccacgctggactatgccaaaatgaccgccgtctgcgactttgtccgggcgggtctgccatatatcgccacccatcctgacttcaactgccccacagagacgggcttcgccccggacatcggcgcgatcatcgcctttatcgaggccagcacgggccgccgccccgatctgatcatcggcaagccctacggcggcatcgtggaggaagccctgaaggccaccggccttcagaaggacgagctggccatggtaggcgaccgcttgtacaccgacatcgccaccggccgcaatttcggcattttgagtattctggtgctcaccggcgaagccaccctgcaggacgtggagaaaagcgacgtcaagcccgacctgatcttcgaccgcctttcctccatgaacccctttttgcaggggtagtacccctgcaccccggactgcgcgcctgaggcgcgcaggggcgtagagggacatgcagcttggccggggttttaccgccgtggcacgacgggtgccacagctcgcgggtctggtgcgattccctgccagttggcctgtacagaccgccttcgggcgacaggccctccggctcgcgccaaaggctagcatggttttgaaatgcctttgaccttttgccttgcaaaatcggctatgtaacgccgaaacattccaagcgccgccatttgagtctgcccagcgccagctgcggcggagaagagcggcgataggcagcggagggaaaaaggcccgcccattttgacggcggaaaa

SEQ ID NO: 4406 - DNA, 32759 bp, Unknown
  16S sequences of unknown bacteria
cacgttgcttttttataccgtattttggactttacacataatttgaagaagagcccgatgaatctttctatggtttctgtgttatacatggttcaactttctttttacagtactttgtctcactgttccgccgtttcccgctgattacagtgccgttccttttgtcggaacgaaaaagcggctcatatcggcatgctcaagttcaagcagcctgatctttttgtcaatgccgcccgcatatccggtcaggctgccgtttgtaccgacgacccgatgacaaggaataatgacggaaattttattgtgcccgaccgcgccgcccacagcctgcgcggacatccgggcaagtccccgcttttcggcaagcttccacgctatatcgccgtaagtcacggtctgaccgtacggaatctgcaaaagtatctcccatacgtccttacggaaccgagagccaatcgggttaagcggcggcgtgaaatcgggtttcctgccgtcaaagtagatatcaagccaacgtctgacttccgcgaggatcggagtttcatttgcagcgtgtttttcgggcagattatcggcataatattttgctccgtcaaaccacagtccggtcaatccgatgtcatccgccgcaagtaaaatatcaccgaacggcgaatcgtaatgctgaataaaagtcatatcgcatacctcgaaaaagaatttgaatcgctatcgagccgagcgaagcaggatttttcaggcagggcgctttgcttgctgcccgaagccaaagcttttttctgaacatctgtgccgaattcaccgatggtttccgacttcgataaaaaaatccgaaagtcacgaccttcggatttttggtgcggatgacagggatcgaacctgcacccgtaaggaccggttcctaagaccggcgcgtctgccagttccgccacatccgcatcgtatttattttaacacagtgcgcactcattgtcaactgataaacgcactgttttcggcagcagaaaatccccgccgcaccgcaggctacgtccggagcgcacggcaaggcggggatttcggttatcaatggaaatttcggtttcagcgtgcaacgatgttcacgatcttaccgggaacatagatctctttgacgacagtctttccttcgagtgccgctgccaccttcggatcggcttttgccgctgctatcgcatctgccgtctccgccgtctttgacacggtaattgtcgagcgaagcttaccgcagatctgaaccgcaatctccacggtatcttctactgtctttgcctcatcatattccggccaaggtgcaagggaggcaaacggcttttcgccgatgctctcccacaactcctcgcaaaggtgaggcgcaaacgggcagagtatgcggataaacacgttcagttcatccgaggtcagagaaccgtgattgtaaatatcgttaagaagcgtcatcatggcggcaattgcggtattaaacttcatatcctcgatatcaagcgaaaccttcttgaccgtcttatggaacgcactctcgagttcggctgtcactccgctgcccgatacgatctccggcagtcccgcaacacgctcaagaaaacgcttgcatccgcgtattgcggaaggcgaccacggtgcggacttttcaaaatctccgatgaacatttcataaagtctgagtgtatcggcgccgtactccttgacgacatcgtcgggatttatgacatttccgcgggatttcgacatcttctgtccgtcctcaccgaggatcatgccgtgagcagttctcttgaggtaaggctcggggcatttcagtacaccgatatcgtagagaaatttcgcccagaagcgcgaataaagaagatgaagcgtaacgtgctccataccgccgttataccaatctacgggcatccaataatcaagagcttccttggatgcaagctcagtcatgttgttcggatcgcaatagcggaggaaataccacgatgagccagcccagttcggcatcgtatcggtctcacggcgtgcgggcgcaccgcacttcgggcaggtggtgtttacccagtcttcgatcttggaaagcggagattctccggtatcggtcggctcgtaatccttcacatcggggaggcggagcggaagctcgctttccgggagcggcacccatccacacttctcgcagtagaccatgggaacgggctcaccccaatagcgctgacgcgagaatacccagtcacgaagcttataatttacttttttatgtccgattcccttctcctcgagccacttgatcacggcttccttagcgtcagcaacgcggagaccgtcaagaaatccggaatttacgagaataccgtcggcaacatccgtatatgcttcgttctgaacatcgccgccttcgaccacctcgattatgggaaggtcgaatttttttgcgaaatcccagtcgcgcgtatcatgcgcgggaaccgccatgatcgctccggtgccgtaggttgcaaggacatagtcggatatgaagatcgggatttctcgtccgttcacggggttgatagcatatactccgtcgagacgaacgccggttttgtcgcggacgagttcggtacgctcaaaatcagactttttcgccgcctgagcgcgatattcctcaacctgagcgtaattcttaagcttatccttccaagccgttacaagagcatgctcgggagcgacgaccatataagtagcaccgaaaagcgtatcgggacgtgttgtataaacggtaagcttatcgcccgcgctcgtctgaaaatcaacttcggctccgtagcttctgccgatccaatttatctcctgcgttttgacacgctcaataaaatcgagatccttgaggtcgtcgataaggcggtcggcataagccgttattttaagcatccactggctctttaccttgtggacgacttcacttccgcagcgctcgcaaacgccgtttacgacctcctcgtttgcaagaacgaccttgcatgaggtgcagaagtttacgctcatttccttcttgtatgcaagtcccttctcgtaaagcttgaggaagatccactgcgtccatttgaaataatcgggatctgtcgtatttattgttctgtcccaatcgaagctgagtccaagagacttgagctgctcggtaaagcgggcgatgttccgctccgtcacaatcgcgggatgtatgtgattcttgatggcgtaattttcggtgggaagtccgaaagcatcccatccgatggggaaaagcacgctgtatccctgcatgcggcgctttcttgcgacgatatccatcgccgtatacggacgcggatgtcctatatgaagtccctgacccgaggggtacgggaactcaacaagtgcataatactttttctttgacttatcgagacgcgccgcaaaggttttttcttcgtcccaacgcttctgccactttttttcaatgtctgtgaaatcgtacttcataagcccgtctcctcaatcaattatctgtaacaatcccggaaatatcgacttcatcggtatcctgataaagcttttcgagattatatgtttttcttgcgttctcgctgaacacatggattattacggaaccgtaatcaaggagcatccatcctccgtcgggctcaccctcggtatggcgcttctgtataccgcaaagtccgaggcggtattccgtctcgtcgcacagcgcctttatctgtgtgcgagaattaccgcagcatatgataaagtaatctgctataaccgtgcgatcggtgacctgaagaagctttatatttacggcttttctggcgtcgagcaccgaaaccgcatactttgcgacagcctcgggatcgttcgggtcgatatcgggaatttttatttcatcattcatattctgaacagccgccgacctcggtcggctttttcctttcgtttatgtcaatatacaaagagcgacgtattcagcgatcaatacatcggtatatcgatcgaattgtctataatatcctttgcgtcgaattcttcgttgatcggcggaacatccgtcgaataataggaatttgtaaatatcgagcttgctgtatccgtaaagtacagctgactgtcaaatatcgacgacgggatttccttggtatccgaagtattgaaatattcgtttaccaatgtgtgaagagactgacggttaaggacataatacgaccagccgtattcgttgctaagcggctcgccgggaacggtaagcatttttatattcgaaagatcgaccttgccgagcatttccttcgcaaagtaaacaaaatcggaaaccgttatatcggtagtaagattgtcgattatctcggtagctacggtcgtaagcgtacctacgttggaaatattcagagagctctttgccttctgtataaaagcggacatgaatattttctgagcattttcgcgcccgatatccgcctgaagatatccgtgacggaaacgaacgaactgctccgcctcggctccggtaagggtctggtatccgggataaaggtctatatagaggttctgcgcaggatcggggtaatacagtctgtacggcacgttcatctcaactccgccgagagcatcgactatattgacaaagccgtcaaggttcattatagcgcacttatatatattgattccaagtgcttcctcaagtatgtcgccgaactctctgagtcccgacatacgggcctcctcttcgcttttgccttcgttcaacgcctgactgtagtaagtgctgaaggttgcgttgatcttgcttgtcggcacgccgtagctcacatacgtatcgcgcgggaactgcattatcgtaaccttggaatcggtaatatcgtaattgataagcattattacatcggtcagaagcgccgcacggtcatgaccgagaacaagaaagttataatttccttctttattttccaatgtaatgacctttctgtttcccttttcatccgtgactatatatgtgtttttgtcgttatctcccacggtgggcttatacgacaaaagataattagcacacagaactacggcaagagctgccataataaaagctgtaatacaaacgataagaagtcttttgaatatttttctcgacatattgcaccggacctttttcagttatctttgattttccgcagataatagtttctgcatctgagcgtatcctcatctataagggcgttttcttccataaggacagtcatagtataattgaaagatttgaccatggttttatacaaatgaaaaattttatcttctgctgaggacaaatgggagatcccgtcgtaaaaataacggcggagctttatgcagtcgtcgtaagtccgtgtatcctcaatataatcggcaagataaattatcgcctcaaatacggtcatattatctcttcccgtagtatgccaccgcacagccgaaacgatctccggatcagcaaactcgggaaagtctctttcgataagcaccgccgccgtctttgaatgataaagcttcggcgaaagcggatcgacaccgagtattataccaaattcgcggcagtattgcaactgtttttcgacagtttcattctttgttatatcgtgaagaagagccgccgcacgcgctttattcctttcaccttcgggaaggtaaatatcagccagggatgccgcctcgcgctcaacgccgagaatatgcgaatatgtgcgttcgttcacatagcttttcacctttatgcggagaagatcgagtatttcctcggtaatcatctgtacagcttttccctttctattattcttcttacttcggggctgaggtattcttccgtattttccccgcgttttatcattgtgcgcagcagcgttgaggagacctcgagcgcgcgctcgccgagcacatagcatttcgcgccgtatttttttcgatagcgctctgcgtactttcgcatctcctgctccgtcccgtcctcgcgcatgatcccgactaccgacgcaagggaaaatatgcgttcgggctcgcgccacgactcaaggctttcgaacatatcgccgccgcaaaggagaaaaagctcagtatcaggatcggagaaatgttcaagtgtatcgaccgtatagctcactccggatttgcgtatttcgtaatccgaaaccttaacggggatcgaaaatcccgcgttatccgagaaagcggcgcgcgtcatctcgagtcgcagatcgggtccgggatcgtcaatgctcttgtgaggcggaatacatgccggaatgacaagcagccgatcaagcttcatttccgaaacaaatgccgcagccgccctgatgtgccctcggtgaggcggcgaaaaggtgccgccgaaaattcccgtacgtgtcatttactcaagaacgatcttatcttttttcttttcggaacggcggtaaagcacaaagcggtatcctatgacagaaaccacatcagcgccgagcgcctcggcaatttccgatgccgcttcacgcgcaccgcacggcgccgtctccagaacacggagctttataagctcgcgcgcctcaagtgcggcggaaacctgtgtcagcgtctcttcggatatcccgttttttcctatctgaaatattgtatcaataccgtttgccatgcggcgaagcatggctctctgttttccgttcagcatgagattcctttcataatatcagcaaaaactccgcaaaacgctctcatcgcctttccgcggtggctgattccgtttttttctttatcggtaagttccgcaaaggttctgtttttttcttcggagagaaacagcggatcgtagccgaagcccgattctccgcgtcccgcgcgaaggatcgaaccgtatgcttcgccgcggacataaaacgagcgtatcccgtcgtcggaagaaaatccggcgtattccgcgggaatcaaaacatccgacatattttgcggcagagcgcatgtaacaacgcatacaaagtgagcgccccgttcgctgtccggaacgtattcaagctccgaaagaagcttatcgttgtttgagcggtcattcgcattttcacccgaataacgtgcggaaaatatccccggacgtcctccgagagcgtcaacgcacagtccggaatcgtcggctatgccgaaatacccgagccgtgcggcggcgcatgcctttataaaagagttctcctcaaaggagttgccgttctcttcaatctcgccgcgaagtccgatatcgtcgagcgaaaggactttcactccgcccggcgcaaactccgcgagcaattcctgcatttccgcaatctttttgcggttacgcgacgcaagtactatatccatactcaatcaaggagtgcggaaacgaacatgtccgcgtcaaacggctgcagatcgtccactccttctcccacacctataaattttaccggaattccgagggttcctttgattgagaagatcgcgccgcccttcgcagtaccgtcaagctttgtgaggacaagcccggttatatcggcgctgttcttaaattccgccgcttgcatcaccgcgttctgtcccgtagtcgaatcgagcaccagaagggtttctcggtcggcatccgggagctcacgcgaaagaacgcggtcgatctttgcaagctcgtccatgagattcttcttattgtgcagacgccccgcggtatcgacgatcagcacgtccgcacggcgctttcttgcggcggcagccgcgtcaaatacaacagctgcgggatcagagccttcgctctgttttataagctccgcgccggagcgttcgcaccacacctcaagctggtctatagccgccgcgcggaacgtatccgccgccgctataacgacctttttgccttcgtcggcaagccttgcggatatttttccgatagtcgtcgttttgcctactccgttcacgccgatcacgagaatcaccgaaggagacgttgtaagtttgagcgcctcaccgtcgccgattttttctctcagtatatcgcgaagcgcattttttacatcttctccgctcttcagcctgtcatccttagctttctctctgagctcggatattatctcctcagacgtttccactccgacgtcggcggatatgagcatatcctcaagttcttcgagaaaatcctcgtccactttgacaaacgctctgaacatactgttcagctgtccgaaaaaagcgtttttcgtcttttcaagtccgcttttcagcttatcaaaaaatcccataattctgcctttcgcgtaaataaaatcagttatttccgagatgctcttcgataaactgctgctttgataccgcgcctacatcgagcgtgaacaccttggacacaccgtggcgcggcatagttacgccgtacaacgtatcggcaatttccatcgttccgcggcggtgtgttatcatgatgatctgtatatcctttgagaaacggcttatataatttgcgacacggtttacgtttacctcgtcgagcgccgcttcaatctcgtcaaagatacagaacggagaaggatttacctttatcagcgcaaacataagcgctattgcgataaacgcctgctcaccgcccgaaaggagcgagagattttttatcatcttcccgggaggcgccgccgatatctcgattccgcagttcagtatatcgtccggatcggtaagcgtaagttccgcgtgaccgcctccgaaaagctctctgaatacttccccgaagtttttgttgatcttcgtgaaggcatcgcggaacatccgctccatctcctcttcgatcgaggatattacggaatcgagctctttcttggatgccgtcagatcattcatctgcgccgtaacgtaatcgtatctcgatttcagttcggcgtactcttcaatcgcatcgacgttgaccgaaccaagcgcgcggatcgaggatttcaactcgttcaatcggctctgaatctcggctcggttctccttcgtcacctccggatatccgagatttgcggcatcggtatgagtaagctcatattcgtcgtagattctgcccgacatcttttcaatatccgatttcagaagctggagcttattttcgctctttgaatgtgcggcaagctgaagctctttctttgaagtaaggtcgcgtattctgagacggagatcgttgatctttttctcaaaatccattccgccttcttcgaggaagagacgctcgcgctccttcgcttcgagagcctcatttccgctctcgacctcggatttcagcgtaagaatcagctttgaattttcctccgcggcaagtttgaaggctgataccttctctttatgcccgttcttctcctcttcaagcgcggaaatacgctcttcggatgcggcgataagcgcttcggtattctcgaggtcacgctgttccgacgcttccgatatgagaagtgcgtttatcttctcgctgctttcggcgatcgcggcttccgcatcgtggcgctcaatgtcatatcctgcgcgcagagtgttcatttcgcttatcttttcttcaagcgacgcgatctgcgccgtcagatcgtcgtttttgccggagccgtcgtccttttcgtttctgagcttctcaaaatcctcgcggagctgtgcgacaagccctgcggtaacgctccgcttcgcctgtatttcctcgccctcgacggattcggttcggatcatcgtctcaatgatctttatcttttcctcgagcattttacgctcggaacgaagcttttcaagctctgcggcagcttttgatcgctttaattccgcggcagatgccttttcttcaagctcttttgcctcggatttaagcttgtctatctgagtctgtcttgtgagtattccgctgtcacggcgtgccgaacctccggtaaaggagcctccggcattgatctgctgaccgtcaagcgtgaccgctcttattttccatccggtgctctttgccgccgagcttgcggcgtctatattttcaaataccgcgatcgatccgagaagggaggcgattattccggagtatttttcatcagcggaaataagttcgtttgcatatccgacgaatccggaacgtgaggaaacctcttcaagctcgcggctgcgtgctcttcccttcacggatgtgatcggatagaaggtcgcacgtcctgccgaagcatttttcagggcgcggatcgcgctttttgcgctttcctcgttttccacgacaattccctgaattgccgcgccgagcgcggtctcgaccgcaacggtataagcgtcgggaacgtgaataaggtgcgaaaccggtccgtgaatgcccgcaagatcgccgcgggatgaagcacccattacatattttacgctgttattgtatccgtcaaagtgttcaagcattctcgacagtgcggcaatgcggctgtcgagcgcgcttttatcggaatttatgcgaccgagctcaatgcggaggcgctcggtctcgtcgaattttgagtttatctcgcggtcgagcgcaaaaatctctttatctgcggcttcgaccgatgctttgtattcgccgaccgtttcggagatttcttcggctcttgcgtcatattcggaaatctctttttcgtacttttcgatatcccctactattgaagcagaccttgcctcgtgctccgtaagcatatttgcaagcacgttgaggcgtatttcggcttcggcttttgcgttttcgtaccttttcagctcttcgaacgaatcggctataagcttttctttcttttccttatccgcaacaagtgcggtatgcgcttcgcgcgaacgctcaatatccgaacggatgtcttcaagctttttcccgatatccgcaaaaagcgcattaaggcgtttgagctcttccttttcagcagaaacggattcagccgtttttcttaccgcgtcaagctcgttttctgcatttatcttcgaatgagcgatattgttctcgattatcttatagcggttttcggtttcgtgtattttttcccgcagcgctttgatatccgaataaagcgacatctgagcctgcttgttttcctgtgatgcgttgaacagcttttcgctctgggcttcaagctgcgacaccgtatcctcggcgatctcaagctcatgtgcggatatcctgcactcggactcgagcttttcggcttcctcgcgcattttgaccatatcgtaaagccaaagggatatatccgcctctttttttgcgtcgaaaagctctatgtattttcttgccttctgagcggcgcgctccatcggtccgacacgggtttcaagctcggaaagtatatccgatatccgcaccatattgttttctgtttcggcaagctttctttcggattcatgcttcctgtaccgatatttcgatatacccgcggtttcctcgaaaatgccgcggcgctcctcgctttttttcgatattatctcggctatcttgccctgacctattattgaatatccgtctcttccgataccggtattcataaaaagctcgtatatatctctcagtcggacgctcttgcggtttataaaatactcgctctctccgcttctgtaataacgtcttgtgacggtgacctcgtcgtattcgctgttcagtctcttaggctttgcggaatcgtcaaacgtgacggacacctcggcgaaattcatctgtcggtatccgtcggctccgatgaagattacatcctccatttttgagcctcgtatggtttttgaagaaagctcgccgagaacccatctcattgcatcggttatatttgattttccgcttccgttcggtccgacgattatcgttgatccgtgatcgaaccgaagtacggtcttctcgggaaaagatttgaatccgtgaagctcaagtgatttaagatacatttcagattctctcctttctgttgaaataaatcaggcaattatcattttccgaaaagcctgagagcttcctcggcggctctctgctccgcctcgcgctttgttccggcttttcctcttcctataacgttactgttgagtctcgcttcgacctcaaaaaccttatcgtgatccggtccgctctcggaaacgatcacatagcggagcttttcgccctcgacctgctgaactatctgctgaagctccgtcttatgatcgatgaaggaagcgctcttgttgatctcggatatctcccttgagacaaacggaagcacgaacttttctgcgggaccgatgctgccggaatcgagatatattgcgccgatgatagcctcaaaagcatcggaaaccgtagaagaacggctccgtccgccgcttttttcctctccgtgaccgaatctgatatactcaccgagagaaagcgttctcgcatactgcgcaagcgctttttcgcagaccacggaagcgcgtatctttgacagatacccttcatcgatcttttcaaatcgggagtagagatactgtgcgaccacaagcgaaagcacagagtcaccgagaaattcaaggcgctcattgcagtcgatatcaattccctttgcgtgcagttcgtttgccgcagaagagtgtgttagtgctttttcaagaagtccgaaatctttgaacttataatttatttttttctcgacctcggtgagatcgcgggggaatttcagaatgcttttcattttttcacttcgctctgcaaaagcgcctttctcgtaaatcgtccggtcaatccgcagcaaaacagtaaaactttccgaaagcttccgccgcaaatcttgagatgatgctccgccggtttattccttgggtacgacaaatctcgcggcagcttcttcgaattcctttatcgattcggtttcgataaatgtcaccgcctgacgaatcgcgtttcgtatggcctttgcatcggaatttccgtgagcctttatgaccggcttcgaaagtccgagaagcggcgcgccgccgtgctcgcttgcgtcaaattcctttttaagtccgcgcacgcggtccttggtcataaggtaggagagctttgtacgccaatttgccgtatagatatccttcagcttgaggaacatgaatttacccatgccctcgatcatcttcagcgttacgttgcccgtaaatccgtcggtaacaagaacgtcgcacgcattgaacgggatcgcggacgactctacgtttccggcgaagtttatgttttccgtctccgaaagaagcttgtaggtttccgcgacaacggcggttcccttatgggattccgttccgttattgagaagtccgactctcggggactcgaccttcatgacgtttttcatataaatcgagccgagctgtgcccactgctcgagatactccgacgttaccgaagtattggctccgcagtcaagcatcagaaccggaggattgaacggcagtatcataccgatcgcactgcggtgaattcccgccacggttctgataataagagacgagccggcatgaagcgctccggtatttcctgccgaaacaaatgcatctccgccctccttgagcattttaaatcctattcccatcgagctgtccttttttgagcgcacgacggagatcggatcatcctccatggttattgcgacatcggtatgaacgatatcgatcttggtgcggtccgcgtcggaggggagatacttttcgatctgcgcctgatctccgacaagcgttatgtttactccggtttcggcaattccctgtgctgcgccgataacgatctgctccggagcacggtctcctcccatggcatcaagaattatattcatattgtaaaaccgcagcttccgaaaaacgaaagcttcctttctttcagaatcgtatgacctgtgcttgttcagtcagtgcgttacatgatctcgcttcgtatacgctcgatttctccgagcgcgcgctcggcatacgcctcatagcgggggcgcttgccgccttttattttcacgccgagcggagctattataccgaaattcgcgttcatgggctgaaaatcggactcgccgccctcggaaacgtattttgccattgcgccgatcattgttttatcggtgaaatcgggaaaatgatgtccggtgagggcgcaggaggcggaaagacccgcgagaaaacccgacgccgctgattctatgtagccttcaacgcctgtcatctgccccgcaaaatatactcttgggcattcctttacgctgtaatcccgatcaagaaatccgggggaatttatatatgtattgcggtgcataacgccgtatctgaggaaaacggcgttctcaagtccgggaatcatcgagaagacccgtttctgttccggaaatgtaagatgagtctgaaagccgacgatgttgaacatcgtgccttcggcgttttcgcgtctcagctgcactaccgcatagtatttttctccggtttcgggatgtcttataccgacgggcttcagcggtccgaagcggagcgtatcctctccgcggcgcgccatctcctcgacaggcatacagccttcaaacaccttgagtccttcgccctcttcaaagtcgtgaagcttcgcggtctgtgcgccgataagctcgaggtagaaggctttatactcttcctcattcatcgggcaattgatataatcgggcgttcccttctgataacgtgaagcaaaaaacgcttttgtcatatcgacagaggaaaaatcaactatgggagctgcggcatcgaagaaatgaagctcacggtcccctatgaattttgcgatgctttcggagagtgcgtcggacgcaagaggtcccgcggcaatcaccgtaggtgcgtcgtccgggatatcggtaacctcgcgttcgatcacctcgataagctccgacgagcggatcttctccgttatatatgaggaaaactgctcgcggtccaccgcaagcgcgccgccggcgggtaccgagcagcggtctgcactctccattacgagagatccgagacggcgaagctcctctttaagaagtccgatcgcggaagataccgatgcgtttctcagagaattcgagcagacgagctctgcaaaattgtccgacttgtgagccgggctcttctttccgggcttcatctcataaaggcggacacggcagcctcgtttggcgatctgccatgatgcttcggagcccgcaagacccgctccgacgacgtttatatatgcatccgtcatttttcttctccggattctttcgcgtcggaactgtcggtaatctcgcgcttatatccgcagccttcctttttgcacacaagaagtgcgcggccttttttctgatacagcatttctccgcactgcgggcacttttcgtttgtcggaagatcccacgacgagaaatcgcactccggatatccggagcagctgtagaacacggttttgtttcttccgtatttggtcactatatctctgccgcatttcgggcagcttacgccgaggcttttgaccttctgctttgtgaatttgcattccggataacgggagcaggcgtaaaacgcgccgtatcttccctgtcttacaacgacatcggaaccgcagaactcgcatttgaagggcgcgatctcgggttctttttccgcttcggctgttccggacttattaagctgtttggtattcttgcattccggataattcgggcacgcggcaaaacgtccgtagcgtccgtttttgactatcatacggcttccgcatttttcgcagattatgtccgtctcctcggcaggagcctcataggtctccttggaaaccgtcttctccgcctcttcaagctcacggctgaagccttcatagaacttcgacagcatatcgagcatcgtcgcgtttccgttttcgatctcgtcaagctgattttccatcgacgccgtgaatttgtagtcaacgatatccgggaaggacttattcatcagtcttgttattatctcaccgagatcggtggggcggagggactttccgtcacgcttgacatatccgcgcgatattattatcgttattatgggtgtgtatgtgctggggcgtcctattcccttttcctcaaggaatttgataagcgaagcttcggtatagcgtgaaggcggctcggtgaagtgctgttcgggtatgatgtcacgggcgttcagctcggcatccttgtcgacaggcggaagaaccacctcgcgttcggtatccgccgtatcactcgtctcttcataaagcgccatatagccgcggaatttgacggtatatccgcttgacttgaagatatgtgattcgcaggcaaactctgcgttcaccgtcgaaaggactgcggaggacatctgacttgcaaggaagcggcgccatatcagtttatatagcttgtactggtccggtgtaagcattttttttatcttttccggatcaagagccactttggaggggcggatcgcctcgtgtgcatcctgcgcattcgcctttgtcctgtaaacgcgcggcttttcggggcagtaatccctgccgtaattttcggcaatatattcgagcgcggcgctctgagcctcagccgcaactcggagagagtctgtacgcatataggttataagaccctgtactccgccgttttcgtgaccgaggtttacgccctcgtaaagctcctgtgcaacgcgcatcgtgcgctgagactggaaattgagctttttggatgcctcctgctggagtgtggaagtgataaacggcggtgccggcgactttgtacggtttccttttttgatttcggtgcagacgaattttttgccgaagcagtcgtcctttatccttacggcttcgctttcggctgaaagctcgttcttatccttcgatccggcttcgccgtaatagtgagccgtaaaatcacgtccgtcggaagtgagaacggcatcgaccgtccaatactcgcggggaacgaacgcgcgtatctcatcctcgcgctcaacgattatcttcgttgcgatcgactgaacacgtcccgcggaaagaccgctcttcactgtcttccaaaggaacgggcttagcttatatccgacgattctgtcgagtatacgccttgtctgctgagcgttgacgagatcgatatcgatctttctcggcgatttgatcgattctttgatcgcgcttttcgtaatttcattaaatgtgattctttttattttatcctcgggaagtccgagtgcggcggcaagatgccacgatatcgcctctccttcccggtcaaggtccgttgcaaggtagatgcggtcggcgttcttcgcttcctttttgagttctcttataagctcgccttttccgcgtatatttatataatgcggctcaaaaccgtgctctatatctattccgagagttgacttgggcaagtcgcggacgtgccctttcgatgccatcaccttataattcgacccgagatagctttttatggtgtaggccttcgcaggcgactccacgataacgagatttgtcatatttcagaccccgcgcggggttcctccttttattatcagttattcttccttcggcggcattgtaagctcttccgtaccgagacgtgtgaaaaatccgccgggagatgcctcgacgattcctgcaagctcgagcattgtcattgcgacaagaacctcgcttatatcgaaaccgcgtgacactatttcatccggaagcgtcggaacgtccggtttcatcgcgttatacacgcgaagatattcttcggacaaaaattccgtatccgccggctttatactttcggaatgttcgggggcattatcggaagactttcgatccgcgtcttttcttcgtccggaacgcgaagtcttctcgccgtccggtcggtcaaagcgtccgtcgtcccttccgccgtaaagtccgtttccgtaatatccgttgttttctttatttttatcgagagacgaaataacatgcatacgctcggcagcttcaagatactcgtcctcacgtttacttaggtatttgcgtcttagcttgcttgtatttatacagtctgaaaaaagatcctgatattcaacaagaacgtcaaatgcttccgagaccgcaggaatgccgcgttttatcagcgcattcggaccgttactgctctcgtccgtaaccttgccgggaacggcaaagacacggcgtccctgatatatcgcatggttggcggttataagcgctccgctgttgtcatcgccctcgataacgacggtcgcctgagatattccgcttattatgcggtttcttatcggaaaattcgagcccgcaggcggtgtagccggagggtattcggtgataacggctccttttttcagaacctcgcgcataagctgacgatgcgctttcggatagcagatatcaatgccgcagccgagtaccgcaacggtcgcgccgcccgcgtcgatcgcgcccgccatcgccatgccgtcaactccgatagccatgccgctgacgacaatagcgccgcctccggcaagctcatatccgaaatcgtacgcaacgcgcttcccgtaatcggtcatttttcgcgtgccgacgacggcgcacgaaaagtccgaactccacctcggaatttttccgacggcataaagcacaagcggaagattggactggtgttttatcgccttcggatacgcttcatcgtaaaatgttattacgcgaacattgtgcagatcgcaccaattgactatatcttcggcttgctcaagagaacactttgttattattttcagggtatgcgctttatccttcgatatgcattttgcgatctcttccgctccggaatcgtatgcgcgccgcgcacttccgaaataatcgataagctttccggcgcacatgcttccctgtccgaagcacatggacagccacacccagtattttctttcatccatgatccgtaacactcctcacagaaataccgttgaaaaccttggacatttcccacatgagaatggtagatgcacatgaaacattgagagagtcggtatctccgaccatctcgataagaacgctttcggtgcatgacgatataagttcgtcggagagcccgtgcccctcgttgccgactaaaaaaacatcgtccgcgcgcaattcgaatctgccgaggcattttgaattttcgccgagcgctgccgcgaagacacgtcttccctcgctgcggagaagtctcaccgtttccgccatgtctgcggatattctcacgttgatccggaatatgccgcccattgaggctcgcacggttttcggagacagaacatccgcgcagacagaaatcacgaccgtatcaaatccggttgcagccgccgtacggattatggttccgagatttcccggatcgcgcaccccgtcgcacatgaagatcctttcatcggtgccttcggcaaaaggcttgcagaagccggaggaatcaagaacggcgattatcccctgcggagatttttccgtggagatcttcccgaacggcgaggacgaaagaatgataacctcagcccccctgcggcgcgcctcgccgcaaagctccgaaaatttctccgtctcgctctcaagcacaagcagatacctcgggcacgcaccgcatccgagcgcgtctctcgtgagtttttcgccttcgcaaagaaaaagcccctccgaacggcggaatttcgggtccgacagctttgcaaggcggactaccaactgattattacacgatgttataacattcccgccgttcatcggagactctcctttttaaatttgtatttgtagcacaaaaacccggcaaaaccgggtttttattgattaaagagcgctcttcgccttctcagcaagctctgcgaaagcttccttatcggagactgcaagctccgcaagcatctttctgttgaggtcgatgccggacttcttgagaccgtgcataaactgagaataatttattccgtttacctttgcctgtgcggaaatacgggtgatccacagagaacggaaatctctcttcttctgtttgcgtccgatgtaagcatagttgccgctcttcattacagcctgcttagccatcttgaaatgcttactttttgcgccccaatagccctttgcggctttgagaatcttatttcttctcttgcgagtcgactttgcacacttaattcttgccattttgtctcattcctttctgataaatcaaattatttgcagataagacgctttacgttagcggacattgcgtcgctgaggtaagcacccttacgaaggtttctttttctcttctgcgttttaataccgagcttatgacggtgttcggaatgattcatctttaccttgccgcttccggtaacggaaaaacgcttgcaagatgcgcggtggcttttaacttttcccatgattatgttatcctttcaatttataatcttactgttctttcggcggctgatccttcgactgtttaagcggattgatgaacatcgtcatctgacgtccttcaagaaccggctttttgtctacggaaccgtaatcggcgcaggcatcctgaaatttggcaagcatatcgcggccgatctcctgatgagccatctcacgtcctctgaatttcaggcagacacgaaccttattgccctcgccgagaaatttcacggcgcggtttgccttggtttcaaagtcatgagtatcaatacggcaggaaagctgtatctctttaacttcaacggactgctgctttttctttgcttccttttccctcttgtcacactcgtagcggtactttccgtagtccattgcgcggcatacgggagggttgccctgcggtgcgatgagcacaagatcaagacctttatcataagcatattcttttgcactgtctatgcccatgatacccatctgatctccgttctcgtcaagcatacggacctctttaactctgatatcatcgttgatgataagttctttagcgcctatagcggtagcacctccaaaataaaatcgtgcggaaacatcttctccgcacgaccgaaaatatctgtctgatcgcttattaaccggacgcgccatacgcgcggcggtgagaacggagagttctgcttcctttttccccgatattatatcaccgctcacgcgcgttgtcaagtactttttttatttttacgaagaaagccgggcggatatccgcccggctttccggtaaaccttatcctgcgtcgatcgattcggtacggtagatgaatttaacctgaccgtcggaaccgtcgggcaatccggtgaaggtcttataatccttcgaaacgtcaaccgtcgcctttactctcgtaagaagtccggcgaggtctccttcaaccgcatccgtaagttttttcacacccttttcattgaactctttgagtccgtcggaaagtgcaagcgctccgtcacgaagctttgaaactccgtcaacgagagccggagcgccgtctctgagtgtgagtatgccgtcataaagctcgccgatgcctgcgtaaagcgcatctgcaccgtcgctcagagccgatgcacccgaacttaatgccgacgagccggagctgagcgaggctgcgcctccgctgagagcatccgcaccatcctttgcggatgcaacgccgtccgtatatgctccgagtccgttgtagaattctctgtagctgtcaagctgtcccttcagcgcgcttatgcttgccgctccggactttgccttttcgagagccgccgtgatctgatcctgcacttccgaggaattcatgttctgttcgataagagccgcgacctgttcatcggtcttcgaggatatcaaagccatgatatcgtccgctttcattttcgcttcgacgtttgcggaaattgtctgagaaaccgcgtcgctcttcatgttttcctcgatcaccgcattgatctgcgcctgctgctccgcacttatcatgcctgcagcgactgccgcgtcgtactgttcctttgtcatattcatggctgcgaggacctgcgattcgacatttgcgcgaaccgctgcggtcacgcccgccgtcacttcttctttaaccttttcgctgacggcagcctcgatatcgccgcgcttcgcgtttaccgccttggtgaccttttcctttgcggcggcgcgtgcctgatctgcaattttatccgtatcgagagatgcgacgacaccgttcagaacctccgtgtagttatccacggtaagcttcggaaccgtcagtcccgctgctgccagctgactgtcggcaattccgagaagggattcaaacacctgctttgcgccggcatttagctttgcgctgttcgagtcaagctctccgagcccggatgcaagctcagccgcgccctcggcgagcgccgccgctcctccgttgagttccgccgcaccttcgctgagatctgcggcgcctccgctgagttcggcagccccgttcttgatcttttcggcgcctgcggcaagcttatctataccggatatgagctcaccggatttatcgagaagggtgcaaagtccgccgtacagctcggacgaaccgtccgtaagctttgtcatcgcatccgtaagctcatcgagcgaatcggtgagcgcatccgccgaatcaagcttatcgctgtcgatcttactgaatataccgtttgttgcaacggtcacggtattcgtcatttcgaatccctttacatcggcgctgatctcaacataatccggaatctcgaatttatcgggatctattgcgagattttcacggagtccgggaaaagcgagtccgacgaccgcgatacggtttccgtcatttataagtttgccgttcgacacctcgacatcggtgaacttatcgccgtcgaggaggattcccgtgagcattgcgaacgggacgtatattttttcggtctttccgtcgatctcgacattctcgtactgattgttcttatagtcgaagcgtatcgtgaccctgccgctttttccggcgagatcatccgcgcttatgctgcttccgtcaatcttatacgaaaccgaaagattcacgggcagttccttgtcgatatttccttggcagtaaatatcattgccctgcgcattccatacgcgcatattgtctccgttcatgctgtaggtctcgctgcccttgacattttccacgttatcaaggtcggagctgtcgtatatctcgtcttttccgagagtattcctgagccaatcgctgacaattatcttctgaacacttccgtccgctccggaaagaacgtacacggtctcatccttaacggttttatccgtctcttcagccgccggtgccgaagctaaaaccgcatcatcctccggcgcctttccggaatttgccgcaaaaaccgcggcggcggttccgcctcccgcaagaagcagtgcgcacaatgtaacggcaaccgttttggtaattccctgtttcattattactttacctccgaattctttaccgaaatatgtttcataccgagtgtagtcacgcatacaagcttatcgcagagcatgagaagtgcgggcaggatgaagataacgcagagcatactgacgaccgcgcctcttgccatgagcatacacattgagctgataatatctatatccgaataaaccgcaacgccgaacgtagccgcgaacagtcccataccggatacgattatagacgggatcgatgttgaaagcgccgtaagtatgctgtttttcttactctgtccggcgattctttccgacttatatctcgtcgtcatcaggattgcgtagtcaaccgttgcgccaagctggatcgtgcttatgcagatcggtgcgataaacggaagcgattcaccgaaatagtgaggcagtccgagatttatgaaaattgcaagctctatgaccgctataaggataaacggaagggagatgctcttttcgacaagcgctataataacgaagatcgcaactatcgaaaccgcattgacaaccttgaagtcgtggtcggtcgtttcgatcatatccttcatacagggcgcttctccgatcagcatgccggactcgtcgtactttttcagtatcgcgttgagcgagtctatctgatcgttgactttatcgcttgcgactttatactccgaattgataagcagcagctcccacttatcgctctcgagtatactgcgtatgccgtcggggatgatctcctccggtactctcgacccgacaacggattcaagcccgagcacatattttacgccgtcgacgctctccatctcgtcaatcatggaacgcacggatttcgaaggaagatcggcgctcacaagcaccatgtgggtagatgcgatatcgaattcctccgaaagcttggaatttgcaatgacatactccatatcctccggcaggcactgtcccatatcgtaatacacttcgtcgtttgtcttggcgtagccgtaatatgccggagggataagaagcgcaaatataactagaaacaccgagaagcccttgagaatgccctttgaaaatttggtcatgtccggtataagtgatctgtgctttgtcctctgaagaggcttatcgaatacgaggataagcgcgggtagaaccgtgacgcagccgataacgccgaatactacgcccttcgccatgacaagtccgaggtcgcgtccgagcgtgaacgtcatgaagcacagtgcggcaaatcccgcgacggtcgttatcgaacttccgacgaccgaggtaagcgtttcctttattgcaagcgccatcgcttccttggggtcgccgaacttctcacgctgttcgttgtagctgtgccacaggaatatcgaatagtccatcgtgaccgcaagctgaaggaccgcagaaagagcctttgttatgtacgatatctcgccgaagaagtaattcgttccgagattgagcaggatcatcattccgatcgacgcaagaaatacaaacggcacaagccatccgtcgaggaaaacaagcattgcaaccgttgcaagaaggacggcgatgccgacgtagatcggctcctccttttcacaaagatccttcagatccgtgacaagcgccgacattccggaaacgaagcactgcctgcccgcgatcgagcggatctcgcggatcgcatccatagttacgtcggcggaggtcgcactgtcaaagaaaaccgccatcatcgtcgagtgatcggtattgaattcgtcgtagatcttatccggaaggagctccttcggaacggatatgtccgcaagagtcgaataccagatgaccgtctcaacgtgatcgacctctttgatcttatcgcaaagcgccgcaacgtcgcggtcgggcatgtcttccactattatcagtgaaaacgcgccctttccgaaatcctcaagcagctcgttctgtccgatcaccgtatccatatcgtccggcagataatcgagcatatcgtaatttatcctcgtgcctatcattccgagcaccgacggtatcataagcagaacagctatgataaggatcggtatgcggtatttcacgaccgcctttgaaaaatgcatatcgtttcagtcctttctttcttcgtaaaaatccgtttctataacatcggggcgctggtgcttgattatctttaccgcggtgatcaccgtgctgaaattaagcattccctccgcaagaagggtgattccgagaatcacggtgagcaccctgccgccgtctccgggacggatcgcaagaagcagaccgcatattccggtaacgaccgcaaatataagtatcagccaccattcgggaatgccgaagctttttgcctcgaacgatatctgtatcttgaacattccgtccgcaagaacgaatatgccgagaacgatgcagataaacgtcatcaggcttcccggatgcacaagcataaccgtgccgagagctataaggagaactcccgacgtcaggtcgtactgaaaagcaaggcggtaaagatccttggaaaaatacccggtaagcttaacgattccgaacactatcatcgtaataccgcatatcactccgagaagagataccgaaaaatccggaaaggcgataagcaccgctccgagaacgcagagcactgccgaaataattatatatcctgttttggctgctctcatcggcgctgtcgaacgcatgaagaacgcctcctttcgtcaaagaaggtacggcaacaaacaccgcatccgctttgtttgactcaattatatcagtcggcagaaaaaatgaaaatgggcaaaaaagtcccgctgcctcaaaaacggacagcgggagcctttttgtctgatattagtacattcgggtatgctttgcctaaaaatcacggacgtgcgttttttcaggtgtgctctttgcttctcttaattatttcatccgacatgccccggcagagctcggtaacatgatgaatttcctcgatcgcctcttccttcataccgtttgcgatccaatcgaacgtaaggccgaaaagctcgcacttaaagaatctcacggcgatcgcatgatccttttcgctcactgcgttttttccgaaagcagtatcgagataagtcgaaacgacatattcgcaaagcttcattatgtagctttcgtatatgtccctgtttatcgaattgtatatatggagaacagccttcttgttctcgatcgcaaaacggaacgcaaggttcacacactcgtcaagcgaactgatcgtaggatattttgcaatgagagtgtctatctcttccatgacgatctcttcgataagcgacggaatatcctgaaaatgatagtaaaacgaatttctgtttatcccgcattcctcaactatgctgcggacgctgatcttgttcagcggctgctcgttgagcaatttcataaacgcggattttatcgcctgtttggtgaaattcggcacagttataccctcccggagaatattttatctttatccgatatgaaaagcttatgccggaaagcgaaaatgttgcatgaaatcaatttcagtcgcatcccgcatcggcacattgccgtgccttcgtcttggtttcaacggtcatttttcgtccgtatccgcgtcgtttccgctcggagtataaccgcttttcccgtaaccgtatttcgaagagccgtatccgtattttccgtagccatacccgtatccgtacccatatccgtagccgtatctgctgtgacggcgacgcactccgttgaacacgcatccgactatatcggcgtttttgccgtaaagagtactcaccgcctcggttatctgcgattttttaacgtaatcctgcttcacgacatatactaccgcatccgcgaatccgcacagaatcccggcatcggcaacaaccccgcacggcggtgcatcaataataatgtagtcgaagctgagcgtcagctccttcagcgcggaagcaaaagcctttcggtcaatgtgatagtgccgcttatcggtgctggcagaagaaataaatttaagagccgagccggaaacatccctgaggcaatccgttatcccgatctcgggattttcaaggtactccatgagccccggcttttcgtcggaatccgcgaaaaattctccgacactctgattgcggagatccgcatcgacaataacgactttctttccctcgccgacagccgaaagcgccaggttaacgacgaccgtcgtttttccctcgcccgcaagggtactcgttatcattacgatctttttgtcggggacaagctttttcttgagctttacgcggagtccgcgtaccgactcggtatatccgctgtcactgtcgggagtgatatacggagtgcgtcctccgctgcgttttttcaaattgacgaaaggcagaacggcgagtatcggaagatttaccacgtcacgaagctctccggtcgtcgtcacggttctcgacatgagcgaaaccaaaaacacaagtatgagagctgcggctgcccctgcaagcgcgccctttatcaccgtcgttttcgcgttgaattcattataaggctcggtaggaagcgtcggtgcttcacgaattatgagggacggattatcgaccatgtaaaccgcgaccttcgggtagcaggcgatcgccgcattcagcacatcgtaagcactcttcggggatgagcttctgacggtgagcgtgaaaaggttcgtatccgcggacgactttgcggacacggttccgtcgatgtaagacgttccgaggtattccgtcatcagatctctcattatatcggttgacaggatattcggaaatgccgccgcaagctcctccgcagccttgttgtcgtaccacgagcttccggatgagcggatatcgtccgatgccactccggagtttacagtaaagcgcgctcttgccacgtacatcggggcatacgctctgtacgcacgcacatacgcaagcgctccgaatgcggcggcaaaaatcagcacaaaaatccacattctgcgaagcgttttgcggaaatggagaaaaagctcggaaaggtctatatactgcttatctgattccatccctgtctcctttactcatgcgaactgccgtgcttatccgttttacggcgctctccgtaaccgtactttccgtatccgtatttggcgtatccgtacttcccgtacccgtagccgtatgaatgcacacgctcgctcatatcgttcaaaacgcagccgaggaatttggaagaggaatttttgagagtgtcgatcgcatcgtttatgtcgtatgaggaagtatagtcctggcgcacgacaagaagcgaggcatcaacggactcggcaagtgcctcggcatccgggaaaagtcccatgggcggcgagtcgattattatataatcgagaactctgagctggcgaagcagtgtctgcatcgtagctccggtaagaagctcggtagagcgcttgtcgctctcgagcgggaaaagcatataaagcccgagcttatcgtggcgctccatgcagttgaacagattgttttttgtgaaaggtcccgcaagaaagcggttgagcgggagttttccgccgtattttccgtcaaagaaaagattcatcgacggcttgcggagatcggcgtctatcaacgcggtattctttccgctcatcgccaacgccgaagctacatttgcggctatagtggattttccttcattttcaccgacgcccgccacaagaaacaccttcaagccgtgagctgcattttcatggtcaagctgtgaacatatcttgcttatctgctcggtatacgcaaagctcgtcgtcggattgaacacctgaagtccctgcttcgagcgtgaaaacagtccgcttactccgcacttctttttttcatgtccgaccgatgctattatcggggaatcgaggagtccgcgcgcacccgccttcgtctgaacggtctcgcgtttcacggacatccggcaaagaaggagcaccgtgactcccgcccccagcgccgccgcgataaggcacaggcgcttttcgttaagagtgtttacgggagacgaggatatctgcggattccttattatctgcacgacggagctgtcggatatataatcggacagcgaaggaaaaatctccgcaagagatgtgagcgcaacatacgcctttttgggagacacatcctcggcgcttaccgaaatgaagttgctctccggtacaagcgacgccgatatctttcccgaaaaatccgcaaggtcgggcgagctcttacgaagattatccgttatcacatcggtttcgatcagctcggcgacgacagccgccacttccttcgccgacgtaatattggcgtttgaatatacgcttccctttttagccgtcacggcataagtcatggaggctctgtatacgggggtgcggaaattttcgatatataccgcggtcgccatcgaaaagattagcgcgacggcgatcaccatccaaaaattcctcgcaagcattctgagaatgcagacaggtgaaatatatgagagattcatcttttccgaattcatctttaccctccgcgcttactttactgccaccgcgagcgcggtcgttccggttacgccggaatcggtataagtgtatattaccctgtaattcccgggcacggaggtgtcaacgtcgctttgacatgttacctttgacatatcggcaagcgcgccggacggcaaggtaaccgacgatatatacgacagcggatcaaacacgctgtcacgctccgcatagacgagcgccgacgaaagggtgatcgcggggcggtcttttccgctctcgcttattacaaccggaagctcaagctccgcggtgtctcccatgctgtttgtcacctgtacggttatggtgtaaacaccggtattcacggatgaaagatcgagagccgaaactcttatcgacgaggttatatccccgtcaaccgtatcttccgcccgaaggcggtcctttatcgagacagtctgaccgacatcaaacaaaagcggagcgtcgagagtaaaatacggctttttataatccgtatatttgacaagccgcgtcatccttgccatattgttgtcgctgtcaaagaccatatatgtgatcttcgcggtattgtccgaaatcagtttggatattccgccgataactatgcccgatgtgagatccccgtcctggttgtcataagcacttactccgcgcagaaggacgtcgtcgccgtcggaaacactgaccgtgacggtatcggtatcgcacttgagaatcggggggtcgtttttcccggaatggttatttatatatcttgtcgcaataaacacagccgaaactaccgcaagcagcaaagcgaccgttatctttaactttctcattgagactcctgattcatgttctcatgtttcgggaatgccggcttttgatcttccgatttatatgccggcggaattatacgtcggcacggtttcctttatcagagagcgcagtttctgcgcatctccctcttcgaagcttccgagaagctccagatggcgtttaaacgtctcctcgtcgaaatcaagctttcttcctatataaatgaggttattctgcgttttacgcatcccctcttcgtccataagtatttcttcaaaaagcttttctccggggcgaagtcctgtatagacgatctttatatcgacatccggttcgaatcccgaaaggcgtatcatgtttttcgcaagatcgtttatccgcacgggctttcccatatcaagcacgaatatctctccgccgtttgcgtatgcccccgcttgaagaacaagggatactgcctccgggatcgtcataaagtatctgtttatatccgggtgcgtgaccgtgaccggaccgccctcttttatctgtcggcggaacagcggtatcacgctgccgttgctgccgagtacgtttccgaaacgcacggcggcaaagcttgtacggcttttttcgtccatcatctgaacgatcatttcgcaaatacgctttgtcgcgcccatcacattagtcggattcaccgccttatccgaagaaatcaggataaagcgtccgactcccgccgccgaagctgcgcgcgccgtgttaagcgtaccgaaaacgttgttcttcacagcctcgagcgggctttcctccatcagcggaacatgcttgtgcgccgccgcgtgatatacgatatccggcttgtactcgttcattacgctctcgatccttgcgtaatcgcgcaccgagccgataagaacctcgagcggcagctcgggacgctttgctataagctcctgctgtattgcatatgcgttgttttcgtatatatcgaacagcacaagctttttcggtgagtgcgccgccagctgccgtgcaagctcacttcctatgctgccgacaccggtaacaagcaccgttttgcccttcacatattcggctatcatatcgatatcgacgcggacaacctctcgttccaaaagatcttcaatatcgacgtcgcggatctgctttatgctgacctcgccgtttgcgatctgataaagcccgggaagctgcttgatcttgcagcttgtatgcgagcatatctcgacgatctctcttttcgactcatgcgatatcgacggtatcgcaatgattatttcctcaacgccgtacttctcggcagccttcacgatcttatcacgtccgccgacgatcggaacgccgaacatacgtctgtcctgctttgaacggtcatcgtcgattatgcagacaactcggtttgacgaatggtcgctgttctgaaattcgcgtataacctgcgcgcctgcatctccggctccaataagcatcgttttcttgcgtgatgcacgtcttacggctgaggtctcgcgtctgatgaagcgatacgaaaagcgcaaagccgcggtaaaaaagcacagaaggaatatatatatcacgggaaaacttctcggaattccgagattcagtattttcatgaggcagaactgaagcactccggagagtgccgacgccgacgcaatccgctggaattcatatattcccgcaaattcccacaggctgttgtaaagcccgaaaagcatgaacaaaacgaacgtcaggacagtattaaacggtgcacatttcagcagagagatcacaaatccggattcttcaagagcgacaagatcgaattcaaggcgtataaacaatgcaagaaaagaagaaagattgataaatataatatcaaagagtacaagaaaaatcctgcgtacaagctttgcgtaatttattttatcaaacgtcttttccatggccggacagtgatcctttcatcttaaaaatagtatcgcgcaaacggtaaagttttttgtcattcggtcccgttttttcggaatatctgcgcaaccccgcccccatcagtctctgcggcggcttcc

SEQ ID NO: 4407 - DNA, 32759 bp, Unknown
  16S sequences of unknown bacteria
gatcggtgtttgcgaggacatgtgcctcgcaaacactccttataggcgaaaaataacggaaacacgtgtgtttccgttatttttcaagagcaggggtggtactggcggggatagagggagcaaggcgagtataacgagccgccgcgatccggcatccccgtccagcagcgtgtcgactttgtcgacgcgctgagagcgccgtccgatgatggacggcgctcttcgtttatgctgggggattatccgctgtcgtcttcgagcagctgcagcgcaagggtgttggtgttcagacgattcacgatccggtcggtcagcaccgggtaccgggcgggatcgctgtcgtgcagcaggtcggcggttttgaccagacgggcgatggggtggcccttcagggcggcgatatacttctggtaagggacggcgggctcccgcgtcaggaggcggagagcctcgagaatggcggcgggaaagcccgcccgttccagatcggcgaaggtcatcatggttttctccaccacgtcgtgcagcagggccacggtgatggacgcctcgtcgggcatctgctctgccaggtggagcgggtgatggatatagggcagcccggcctcgtcctcctgcccgcgatgggcgttgtaggcgatgcgcagggcttttttggtcagcgcggtgtacagcatgcggttccctccctttcggacagtatagcacagaaggaccgcgggagaaagcgacggagcataaaaacatccccgggcatccgtgaaggatgcccggggacgcgttttttatcagggatttacagggggttatttcttccgcttgcgcacggccatcgcagccgccgccgaggaggccagcaggacgacggcccccgccgccagggtcacgccggtgggcgggataaccggcgtgtcgccgccgtccccggagggctcggaggcgtcggaggaatcgggggacgggccgggattcggctgaggatcggaagcgtccaccagcgcctgataggcggcctcggcggcggtcagcacggcgtagttgccgaccagcttcttctgcgcgtcggtcagcgcgtcataggcggcgcgggcttgcgcgatgcggtcccggctgtccagtgtcacggtgccgatggcgtcgattttctcgctgacggccgcggccttcgcctcgtcggcggcggcatcctcgctgggggtcaggcccgtccagatgggagcggtgtaggccacatagtcggcgttcttgattttttcctcggaatccttgacccgcacatagaagtaggtggcggtggcggaggtgagggtgacgtcgatgtttgcgctgtagccgtttacgtcgaaggctttcaccactttgcctccgtcggagacgatctcgatggtcttcagcttatccttggccacagtggtgtcgggatcgctgacggcaatctggaaatggaaggtgttggtgccgccgtccagctcgctgcccagcacctggccgttgaccttgtagtcgataagcaggttgctgtcgtcggtggcgtaggtgcggtgcttgcggatggcgtcgtagattttcgtctcggtcagctcgtcggtgaggacggcggtgcgggtttcatagccggtgatccagcagccctgatggatgtcggagttgccggtgggggatacgtgccagccggcgtccagggctttgatatacccctcctcaaagtggcccaccttggtgtcctgaatggacaggaagttgataatttcgtaggtgttgagcaccttgtcgaccgcctcggagtaatggccgaagtcgtcgaaatcccacacgttgttccacagatccttcgggtggttccactgggccaggagggtggggctggcggccagcacgtcgtagaactgctgcatgccgtcccacagggccttttccttggcggcgttgccgtgatcctctttggtgaacaccacgttatccaggctgtcggcagagccggcgggataggtgaacatctggtcataggtgccgccgaagacgttcatatgcccgaaatagccgctggcttcaaagccgatcatggccagaaaatcgtcggaggtgtacttctccgccgcggccatgccgtccaggtaatcctgggtgctcagcttgccgccgccgtgagggccgtaatggtgatcggtaatcatcagaaaatcggcgttgcctttctccgccgcgtgcttgaaggcgtccgccggggtggagcggcggttctccgtccaataggtgtcgaagccgcggctctcgtaccaggcgtcgttgtccggatcgcccgccccgtccgagacgccggtgtgggcgtgcaggtcgccgaagaagacctgcagcttgctctcgtcgaccgtcacgggcttgaccgtcacggtgatttccgccttgttgcccgtcttggaatcggtggcggtgacgacggcggttccggctttcaaaccgtggatggcggcggcctgcggataggcctcataggtctgcaccatggcgatgtccggcttgctggacgtccaggtgacgccggcgaagttcggctcgtccagatccgactgcagctcggccacgaaaccgcgcagctcgtcgatggtctgcgcggaggcggcgaaggagatttgtccggcgttttccgccttttcccggtaagccaaggcttgtgcctccttgtcgcccagggcgcgccgataaatccgcacgtcgtcgagggcgaagttgttggcgcccacatgccagttgttgccgccgccaatcaggaagggcaggccgctgtccgccgaggcgctctgtttgtcggcggggatggcggcggtttccagcagttcgccgtttttgtacagcttgatgccgccgtccttatccaccgcgtagacgatatgcgtccatttgccggcgtccacgggggattggttggttttggcgtaggggctggagccgtcgcccagggccatgtacatgtggtcgaggccagaatacatcacgccggtgcccttcgccttttcaccgatgccgtagtcctggttgcccaggatgtaggtgaatttgggggtgccgtcgtccttgatccagaaggagaaggagtagtcccccgtacccagggccagggtcttggaggcctgcaggtaggagccgccggtgaaccgggcggccgtcccgccgttgacgcccttttcataggtcagggcggtgcccttgccggtgaaatcgaagccgttgtccgagctgtcggcggtgttcgattcaaaatccaggcggcaggcatagtcctgggccagataggcggttttctcgtacgccgccttcacgtcggcggcggacagggcggaggcatacagggccacttcgtcgagggcgaagtggttgttttccatccacgacgtgccgcccgcgccgatctggaagatctggtcgctgtccacggtttccccgcgcttgttttccggtatagcggcggtttccagcagctcgccgtttttatacagctggatgccgccgtcccggtcgaccacgtaggccacgtgaacccacgcgttcttctccgtcggggattggttgatcttggcgtaggcggaggatccgtcgcccatggccagatacaggtgatccgcgctggcgtacatcaggccggtgccccggtatttctcgccgacgccgtagtcctggttccccatgacataggtgaactgcggggtgccgaaatcctggatccagaaggagaaggaataatcgccggtgccgaaggacagagccctggaagctttgaggtaggattttccggtgaatttcagggccttgccgctcaccccggtgatatactccagggagccgctcccctgcgcggcaaagtcaaggccgttgcccgaggaatctttggtgtcgccgtcgaagttcagatagaccgctggggcaggggcggttccttccgccagagcgccggccggcgcgatccccagggacagcccggtcagggggaccgccgccgcgagagccaatgccgccattttttcagcttcatcgtctgcattcacctctctgttttaggagcgcgggaaaagcgttcccgctccctttatttccattattagggcaaacggcggaaaagtaaatcctccattttccggcgatcgacaattccgggaaatggaggattttttggattttcagcggatttggatgtcgtttcccgggtcggcctggcatttgcctttgaggaaccggcagccctccagcacgatgttcttgcaggtgtactgcggccgggcggaggaatcctttttcacctgggtgcccacgtggaaaatctcggcgtcggcggcgtagggggtggtgaaggtgcagtttttaaacaggatatccttggggatagggccctccacataggtttcgttttccacccgtacccagaaaacgttgaaccggcagttctcaaaggtgccggaggagcggacgcgcacggtgccctcgatataggaatttttcaccacgtagtccttgttgagggagtagaaggcgatttgacagccgggggcgaggccgggaaccgcgcggttcaagcggatctgcacggaggtgtcggagggatacacctccgcgatggttgccgtgccgtaatcctggccggtggccatgttgtagatggccagctcgtccccaggatttaggccgttgcgatacggctcggcctcggtgggggtcatgaccactcggccggtgtccgcgtcataggaggtcacgttgcagatgacggtggacagattgaaggcgtcgtccccgagcgggccgatgtagcagctgtcccaggtgggcttggagacgttgtccttgacgtggaagccgtcccgccaggagacgagatggatgccggatccctccggcggctccaggcgtacgttggtgaagcgggtgtagccccggttggagcggatatcgaaggcgaattcgggcacggcttcgatatagacgttgctcatctcgaagttttcggtttcgctgatggagaaaaggctgccgatgctgtgggagttctgatagacggggaggatgaattcctcccccacctgcgccgcggccacccgggacgcgtccgtcatatacaggcggtaggagccggttcccagctgctccatggaggagatgaagtagtgcagccgctcgtccgtccggttgcggaaggcgtaatagggctgaggcggttccaccttgccggtgaagttcaaatcgtcccgggtggtgaaatcgatatagcgtttatccgggtcgatggcggcgacggtgcccaggacgaagggcttcggggaatagtcgatgataaagccggaaaactccacgttccggcactgcttgaagtaggcgacgcggtagggggctttcatcagcagacgggtgtgatcccccaggatgcggaggttctcgccgccgatgaggctgaacacccgctttaggctgttttcctccggggcggaggccagccggtaggtggcgtccttccggaacaggagaaccttttcgggcttcgcgctggccatagcggcctccacggcccgggaaacggcggggccgtcgtcggtggatccgtcgcccttcgcgccgtaatcctcgggccggaagatttccgcgttctcaggcacggcggtggtataggccggacgggcggagagaggcgatgtctgaggggcggacgaggcggcgccgctttcgccgggcgcggccggacgggagcaggcagacagcgcgggtacaagcagcagggcgatcagagcgggaaaatagcgccggatgggttgccgcatgaggctacagtcctttcagcatgtggtgataccagtcgagagacacagtctcccatcgtattcaaccacgcgcgggccggaaagtaaatcgcccattttccggggatcgacgaaaatgaaaaaacctccggcaaaaagccggaggcggcggttaccaaggaaaaaacacgctcaaggccatggtgaactgggccccataatattaggatataagatagggacgctttggctgcgccacgaggggaacaaccgcctttaggcaacgacgtcctctattgacaatccaacagagagtggtatacttttcccggtggcactaccggcggcagagaggccgcgcgcggtttcaaggcggttgtctccttccattctctgggagggagaacgcttctttttccctcctgtgaaaggaggggatgctgatggttacatatccagagctgtttcagttctgccttgtggtaatcggcattatcggcgtgattatttccgccataaaaaagaagtaagccgcccgttccccaacgcttcggcttacttctagtcgcacgaggggacaaccgccttttggtagtgccaccatctatttgtatgatagtataacacgcgggttttgtcaaggggcggcaagccttaaagcgctgctgcgatccaaaagagtatagttaatttttaattttttcttaattattgccattggaatgtatacattccaatggcaattcatgatctgtggtaaaaccaaggaggtgcacaagaaaaagaaaggaagatgagctttatgaacgagaacgggccggaatgcggctacctggaacaggaattcagcagactgcctgaaaaagcacagcgggccgtctgctgggtgcttgaaaacaaaagcatggccgaccaattcgcgcgggggaaaaagctgacggatcgggccgtacaagacatgacgaggaaagccctggaaaaagaagactatctcctgctggcgctggtctgttataaaaagtggaaagatgaaaacgcgggtgggtaattggcggccatccccaagtctttcccttgctctttttcgtccgaaatgctataataaagggaatcgtccgccgggcctggggtttggcggagggggattctcgattttttggccgggctgccggcctttcataacaggaggcacatgctttgcgtattggaatcgacatcggctccaccaccgtcaaggtggtggtgctggacgacagcgaccggaccatattcaaaacctacgagcggcacatgtccaaggtgcgggagaagaccgccgagatgctggagcggctgaccgataccctgggcgggcaggaggtacaggtggcgatcaccggctccgccggcctgggggtggcaaacgcctccggcatcgccttcgttcaggaggtttttgccaccgcgggggcggtggagcgattcatccccgacaccgacgtggtggtggagctgggcggcgaggatgccaaaatcattttcttgaccggcgggctggaggagcggatgaacggctcctgcgccgggggcaccggggcctttatcgaccagatggccaccctgctgaacatcaccgccgacgagctggacgcgctcagcctccagcatgagaagctgtatgccatcgcgtcccgctgcggcgtgtttgccaaatcggatatacagcccctgctcaaccagggcgcgcagaaggccgacatcgcggccagcattttccaggcggtggtcaaccagacggtggccggcctggcgcaggggcgggaaatcaagggcaaggtgctgttcctgggcggtccgctcttcttcctgaagggcctgcgggagcggtttgtggacaccctgaagctggacgaggagcacgccgtgttccccgacaacgccgacgtgttcgtggcggtgggggcggcctgctacgcggagaacaccgagccggtgcgcttcgaggagctgatggcccgcatccaggacgcctcggcccagaagaacaccaccaacaccatgcctcccctcttcgcctccgacgaggagtacgaggcctttgccgcccggcacgcggcggcttgcccgccccccatggacgcggacggctacacgggggacgcctatctcggcgtggacgccggatccaccaccaccaaggtggcgctggtctctccggacggcgggctgctgtacacctattacgcctccaaccagggcaatcccgtccaagtggtgctggagcagctgaaggaaatctaccgccgcttcggcgaccgggtggtcatccggggcagcgcggccaccggctacggcgaggagctggtgaaaaacgcgtttcacatcgacctggggctggtggagacggtggcccattaccgggcggcccggcatttcagcccgcaggtggatttcatcatcgacatcggcgggcaggacatgaaatgcttcaaggtgcggggcggcgccatcgacagcatcctgctcaacgaggcctgctcctctggatgcggctccttcattgagacctttgccaaggcgctgggctatgacatcgcgaccttctcgaagctggggctgcgggcggaaaagccggtggatctcggctctcgctgcacggtgttcatgaactcctcggtcaagcaggcccagaaggagggcgcgggggtggacgacatctccgccggcctgtccatcagcatcgtcaaaaacgcgatttacaaggtcatccgcgccgccgacccggccgagctggggcagcacatcgtggtgcagggcggcaccttcctcaacgacgcggtgctgcgcagcttcgagctggagctgggcgccgaggtcgtgcggcccaccatcgcgggcatcatgggcgcgtacggcgcggccctggccgcccgggacgcggcggcggccggccggctggaaggggagcgttccggcgtcctcacgccggaggagctgaaggattttgtccatacggcgaaatccagccagtgcggcctgtgcggcaaccactgccagctgaccatcaactccttcggcggcaaccggcggttcatttcgggcaaccggtgcgagcgcccgctgggcaaaggcaagcagaaggacgttcccaacctgtataaatggaaatacgattacatccgctccctgcagggcggggagaaccggcgggggcgcatcggcatccccctggggctcaacctgtatgaaaacctgcccttctggcacgcgtttttcaccactctgggctatgaggtggtgctgtctcccgagtccaaccgggagctgtacgcctgcgggcagcacaccatcccgtcggacacggtgtgctatccggccaagctgatgcacgggcatgtggaaaagctgctggaaatgggggtggacgccatcttctacccctgcctgccctacaatttcgacgaggagcggggcgacaaccattataactgtccggtggtggcctattatcccgagctgctggcggccaacgtggcgcagctgtccgaaatccggtatatgaccccgtatttcggcattcaccggccgaaggacttcgccaaaaaggcggcggaatactttgggcaggagctgcatctcccggccgcggaaatcaaaaaagcggccaaggcggcctacgccgcccatgacgcgtacatgcaggccatccgccagaagggcgagaaaatggtcgcctacgccagacagaacggcaagcggatcattgtgctgtccggccggccttaccacatcgacccggaaatcaatcacggcatcgacggcctgatcgcctccttcggcctggtggtggtgaccgaggacgcggtggcccacctgggccagaagaagccggtgcaggtgctcaaccagtggacgtaccacagccggctgtacgccgccgccgaatacgtcaccacccagccggatatgcagctggtgcagctggtgtccttcgggtgcggcattgacgccatcaccaccgacgaggtgcgcgccatcctggagcggggcggcaagctctacacccagctgaagatcgacgaaatcaacaacctgggcgcggtgaaaatccgtatccgcagcctgctggccgccatggacgcgcgcgaggacgcgccggccgacgcgggctgaggggccggaacgaggtcccgcattttgagacaacgatcccatggaaaggaaacaacgtatggccgaactgctgtataacgaggaagggcggctgctcttcaccgaagagatgaagaaggagtacacccttctcatgccccagatgctgccggtgcatttcaccatgctcaaaaaggtctttgagatggaaggctaccaggtggatatgctgaccaccaaccaccgcggcatcgtggacgaggggctcaaatacgtccacaacgacacctgctatcccgcgctgctggtcatcggccagctgctggacgccgtgaaaagcggcaagtacgatccccataagctggggctgctcattacccagacgggcggcgggtgccgcgcgtccaactacatccatctgctgcgcaaggccctgcaccgcgcgggctacgactacatcccggtggtgtcggtcaacctgtcggggctggagaaaaacccgggcttttccctggggctgggcatgatcctgcgcatggcctattccatgatttacggggacttaatcgtgcacatggccaaccagtgccgcccctatgaaatcgtggagggggagaccgaccgccgcatcgccgcctgggtggagcggctggtggaggatttcacccgcaagggcgcgttcagcaagggccacgtgcgggagaacttcaatgcgatttcggacgatttcgcctccatcccggtccatcgggtgcccaaggtgcgggtgggggtcgtgggggaaatctacgtcaaattcgcccccctgggcaacaacaacctggaggatttcctgcggtcggaggactgcgagccggtggtgcccgggctgaccgatttcatcctgttcaaatgcgacaaccgggtggaggatcataagctttacggcggcaaaacggccacctacatcggcgcgggctttttgaaaaaatacgtccgccgtctgcaggacgacatgatcgcggccatcgggcggcatcccgagttccgcaagccctgcacctttgaccatctcaaggagctggtggggggctacctcggctacggcaacaagatgggcgagggctggctcctcacgggggagatgctggagctcatcgactcgggcgtgtgcaacatcgtgtgcacccagcccttcggctgcctgcccaaccatgtggcgggcaagggcatggtgcgcaaaatcaaaaacaaccacgccgacgccaacatcgtgtgcatcgactacgatcccggcgccacccgcatcaaccaggagaaccgcatcaagctgatgctggccaacgcgaaaatcaaggccggccgggccaaggtgatcgcccgcccggcggaatccgacacggaacaagcgcccgccgcgataaaataaacggcggctttcataattgacgcctctgcgggtaacactaccggagaggtgatcgcgatgagccagacgaacacaaataccaacggcgagacgccggaggaggccgcctccctgcaggggcagctgaaggacgtggtggaaaacggggcggtgaccaccaatgacggccggcataccatccactgcctgaccattattgggcaaatcgaggggcattacgccctgccccaggaaaacaagaccaccaaatacgagcacgtcatcccgcagctggtggccatcgaggaaagccaggagatcgagggcctgcttatcctgctcaacaccgtgggcggcgacatcgaggcggggctggccctggcggaactgatcgccggaatgaccaagcccacggtgtccctggtgctgggcggcgggcattccatcggggtgcccctggcggtggcggccaagaagtcgttcatcgcttccacggccaccatgaccatccatcccgtgcgcatcaacggcctggtgctgggcgtgccccaggccttcacgtattttcagcggatgcaggagcggattaccaccttcgtcacgtccaactcccatatgtcccccaaacggttcaccgagctgtgcatgaacaccgacgagctggccaccgacgtgggcagcgtgctggacggggaggacgcggtgaaggagggcctcatcgacgggctgggaagcctgtcggacgccatcggcgcgctcaataccatgatcgacgagaaccgggcgaagcagacggaggaacccgccgcccacccggccgactgacgccggaattccggcccgcggaagcgggcacattacataatcgaggggtttgtccatggcgcagagaaaaaccacaaccaaatcgcggccctcctccgccaaagcggaggccaacagccgcaaaaaggggaagccgacggccgagcaggccagcgcccggcatcaggtcgcggccatcctgctgtttttcggcgccctgctgctgctggctctcgtgcttattcccggggccagcctgtgggggcagctgcacaagctgctgctggggctgttcggcatctgcgcgttcgtgctgccggtgctgatggggtatatcgcggtcatcgccgccatggaaaagcccatcggcagcatcagctccaagctgtggcagtgcgtgctgctgctggtgatgctgggcagcgccatctacatatgcaccacctcgccggaggggatcaattacttcaaggccatcggccagggctatatggacggcatcgccctgcacagcggcggggtgctcggggtgctgctgggctacccgctggaatacgccttcaccgacctgggggcgaaaatcatcatttttctgctcatcggcatgttcctgatgctggtgaccggcaccaccatcctgtccctgttccgcaccgcctataagccggtgaaaaagaccagggaatccatcgagacggccatgtccgtgtccgccgagcggcggcagcgcagggccgcgcccatcgacatcgacctgggcgacgggtatgaggaggagccggcgaagcccggccgccgcaaggccgcgccccccgcccccctgcccgagacggcacaggagctttcgcccgaacagccgcctgtcaagtcggacaagctggcggcgctggaaaaggcggcccgggacattcaggcgcaggaagaagccccgccccccaagctggacgacatcctgaaggccaaggagaagccgggggaggacaagccggataaggcggccaagaccgggttcgccccgcccacccagacctccctgtttcccgaggaggaggacggctaccgctatccgcccatgtccctgctggacgagcccaaggcggccaacgacgcggccggcgagctggatgtgcaggggctgtccaagctgctggtgggcaccctcaaggacttcggcgtgagcaccagggtcattgacgtcacccgcggcccctcggtcacccggttcgagctggagcccagcgccggggtgaagatcagccggatcaccggcctggcggacgacatcgccctcaggctcgccaccaccggggtgcgcatcgaggcccccattcccaacaaggcggccgtgggcatcgaggtgcccaacaagagccgcaaggtggtctgcctcagggaactgctggataccaccgagttttcctgcgccaagggcaagctgacggtggccctgggcaaggatatcgaaggcaaaatcatcctggcggacctcgccaaaatgccccatctgctcatcgccggcaccaccggatcgggcaaatcggtgtgcaccaactcgatgatccagtcggtgctctaccgggcatcgcccaaggaagtcaagatcatgctcatcgaccccaagcaggtggaatttgggatttacaacggcatcccccacctgctggtgccggtggtcaccgacccgcgcaaggcggcgggggccctgggctgggccgtcaacgagatgctgggccggtacaagacctttgccgagaacaacgtgcgggatctccagtcctacaacgccctggcccgcaagagcgacaccctcaaagagctgccgcttattctcatcgttatcgacgagctggccgacctgatgatggccgcggccagcgaggtggaggattccatcatacgcctggctcagatggcccgggcggcggggatgcatatggtcatcgccacccagcgcccctcagtggatgtcatcaccggcctcatcaaggccaacattccctcccgcctggcgctgaccgtggcgtcggcggtggactcccgcaccatcctggacgccggcggggcggagaagctgctgggctacggcgatatgctgttcatgccggtgggccagcccaagcctctgcgggtgcagggctgcttcgtgaccaaccgggaagtggaatcggtggtggatttcctcaagaacaccgaaaagcaggaatacgaccagcagatcatcgacgaaatcgagcgccaggccgcggccagcggcaaaacctccggcaagggcggcggggacgacctgggcgacggggacgaggacgacatgctgccccaggccatcgaggcggtggtggaggcgggcatggcctccacctccatgctccagcggcggctgcgcctgggctatgcccgggctggccggattatggaccagctcgaggagcggcacatcatcgggccgcatgagggcagcaagccccgccaggtgctgatcacccgtcagcaatggcaggaaatgagcctcagccgcgaggacggcgacgaggaatcctagaataacgaaagagggaacggcgcgaagataagctgtcgcgccgttccctcttcatatgtttgtaaaaagcatcttgttatgaccaagaaccgtagttcgttaccgtccgattccctccatagacgacagacacattaagggcattcaaaactccatcgatttttaggcaaagaccgtggctgttgctgtttattttggcaaatgtaattcccatcaggcgcacttttttatatccaggaactccagaagcgtccgaattggcaaatcgggtgccgataaaggaaccgctatccccgccttgtgtattgttgctgatttcaatcgcggtgtaagaatacccatccaaagaaaaattaaaattcgcgttcaaaacagtccctgttgtaacctgagttgtacgtgcctgtcgaaatacggataatccggcagttatttctgcattgctatacttagaatccaagcaagagggggtggacatacagcatataccggtgatttgtgtagggacggcataaccgaattgtacaaacgcttcgtcgtgattattccctcgactccctttttgatacttacctatttcctgatcgccgccgttatacatcactctgtctgtttgaataacatggtaattggttacaaatccatattgaccattatcgtttcgaaccgcattgaaaccaatgctgccgtaagatttattcaaataaaacaatccgaatttatagtaaacctctccgccaggcaaagaaatgactggtgaggaggcgcgtggtgcaggaacggaggttgtcccgttgggagaatccttgctttgagccgattccagaagttctggcaggtcgtcggtgagggcaaaatcgacagcttttaaatcgatatccaaacgctgcagcaaagcgataatagaatcctgataatcggcgcattctgatttaatatttataatgattttgtttttaacaacatcgataacaaaactagcgacaccgagattccaaatcgagttgtccgcgttgatcgtatcctgcatctccaaaagatcgctgtaggcgtatttgacaaggtttgtatcgatatcgtttttgcgaatgatttccgccatggcggttgcggccgagtcctttgaggccagcatatttttggacgatacggtcacattgacatgcagttttccttgttcatcgtaataatggcctccgaactccttgggatacaaaacttcaggaacggcttgtccttctttgtaagagacatcttgcagtttcatgttggcgcctttgacttgaaaattatctagaatattgcggaatatttccacctggccatattcattaacggaaacggtactatcagcgcccactgaaaaaagacaacaattgatgatgaaaaggatacaagcaagtatggcgactctctttttcattttgtctcccctttctcatgtctcacacagaagctttacccaattcgaatagaataatctttttataatcgcccccaaatataataaacgcgttcgattctaactccttctcttctacatcagcagacggatcatcgaacgcgttttgttggcagtatccttatttcatttttttagtccggaaatatttcctgaaacaaaaaatggcgatacacatcaaaccgatggaaagcaagccgcatagaacgataataaagggggaaaaagaactttgactgcacagttccacgtcttttctcatatgatcgcatacgagacatatcgtaatcagacttgtggcgcagaaggccgtcagtacgcctattatacagacgagtcttttaacaagcgtttttttccggctttgaagcaaagggagccccagtttgcgttccatttccaataggtttctttctggcagcttaatagaaccgcgtatcactcttttgacatgtttcatctgtttgctatccctcatttggcatggatttttttattttatttaaagcagttttatatttccattgaacagtaccctgcggtaaatggagcaactgggatatttctttatgggtaaatctgtataccacctttaaaataacgatttgggcctcttctggagatagacatgataaaatagatattatgtcggctggttcctctatagcctgattataagaaatgaaatctatatcgtcaatattcgtatgatattctctctttatttttttataattctccaacgccttgtttttggcgatcgagtatatccatccaataggattcgatgtaggaatattttccgccgacactccgaaaattttaataaacacgtcctgcacagtatcgttcgcatcgtgcgtatttttcaaaattgatagggcgatgctgaaaacgagaggggagaactccgtatacaattcaagaaaagcatctgtgtcgtgtttcgcaacgtgatgcaataaacgtaggatatgttcttggcgcatggcggcccctccaaacggattacaactcttcagattatatataacataaaatggcatagatgtaaatatgggccgctaggttgacaaattatcaaaaacttactatgatgatacagcggaacccgtccgggttccgctttttgtgggtagcttgcaaatagtcactgacaaaatataggagatatacggccgctaacttgtgcggattcacgaaagaagtgtaaccggctgccatccggtaacaatcgagtaacaccccggtaacccgcatgaatgctggggtttttccgctttgttactggtgtaaccgagtttatataaagatagtataggtatcgtacagtacaggggaagtagccagataaatattgttgggaacatccggttacacggtaacagaaaggacgggcgctatgccgtttttacctatcaccaaagaggagatgctggacaggggctgggactgcgcggacgtggtgctggtcacgggggacgcttatgtcgaccacccctccttcggcatcgccatcctgtcccgggtgctggaggcctgcggctggcgggtgtgcatcctgccgcagccgcgaagcgcggcggatttcacccgcttcgggcggcccaccctgggcttcttcatcagcgggggcaacatcgactccatggtggcccactacaccgccgccaagaagaaacgcagcgacgacgcctataccgccggcggcaaggcgggggcgcggcccgaccgggcggtcatcgtctactgccggcaggcgcggcaggcctatcccgactgccccattatcatcggcgggctggaggcctctctgcgccggttcgcccattacgactattgggacgaccgggtgcggccctccatcctgctggacagcggggcggatctgctcaccttcggcatgggggagaggcagaccatggagatcgcccgccgcctctccgagggggagccggtgagcgagctgaccgacatccggggcacctgctacgccgtgccggcgcgggagtacgccccccgcccctgcgccgaatgcccctcttacgagcaggtgcgcgtccccgacgaggcgggcaagcggcagtacgccatatcctgccgcatccagcaggacgaacaggacgaggtgcggggcaagaccgtcatccagcgccacggcgataccatcgtggtgcagaacccgcccatgcccatgctggacacggaaaccttcgactgggtgtacgagctgccctacgagcgggcgtatcaccccagctacgaggcgctgggcggggtgccgggcatcgaggaggtgcgcttctccatcacccacaaccggggctgcttcggggcctgcaacttctgctccctggcctatcatcagggccggcggatcgcctgccgcagcgaggagtcggtggtgcgggaggctgaaaagctggtcaagctgccgggcttcaagggctatatccacgacgtgggcgggccgacggccaacttccgccgcccctcctgccaggggcagctgaccaaggggctgtgcaaggggaaaaaatgcctcgcgccccagccctgccccgccctgcgggcggatcacagcgaatatctccatctgctgcgccggctgcggaagctgccggggatcaagaaggtgttcatccgctccggcatccgcttcgactacctgctggccgacccggacgagagcttcttcaaagagctggtggagcaccacatcagcggccagctcaaggtggcgccggagcattgctccgccccggtgctttcctgcatgggcaagccccccatcgacacctaccgccggttccagaagcggttctacgagctgaccaagagcgcgggcaagaagcagtatctggtgccctacctcatgtcctcccatcccggcagcaccatgcgggacgccatcgagctttccgtgttcctcaagcgggaggggctgcaccccgagcaggtgcaggatttttatcccacccccggcacggtgtccacctgcatgttctataccggcctcgacccgtataccctgaagccggtgtacgtcccccgcacgccgcgggagaaggcggagcagcgggccctgctgcaatatttccgccccgaaaaccggccgctggtgctggcggcgctgaaaaaggcgggccgctttgatctcattggcaccggccccgactgtctggccgcgcccgagaccggcaaagcccccggcgcccgcccgggcggcgcgccccggcgcaaaaccccggccaagcgaaagccgccgcgccggcgctcctaaaacagacggcaggaaaccatcccccgaaaaggactgcgagccttttcgggggattttttgcgtgtaggatactggttccatatttggttataccaagtttagcctggcgaatattcgctagaataaaattggaaaggatgtggggccgtgaacacgcgcaagctggggctgggcaaccggaatctggtgggccgccgggtgacggaggcgcgaagagccttagggatcacacaggtgcagctgctggcccggctgcaggtgcgcggcgtggacatcagcgggacgtccctgtccctgctggaggggcagaagcgaccggtattcgactacgagctggcggcgctggccgacatcctgaaggtggacgtgaactggctgctggggcggcaggaggagaagtatggcggcaaagaaacggatgactaaaaaggagcgggagcggcggcacagacgccgcttttgggcggggatcctgctcgtcagcctggcggccgccttctgcgtcctcgtcaccctgagcgagcagatgacaaggcccttcctgcccacctggaaggagatttttcaaaaggtcggcctggccgaggcggagccgctggacagtgagctcagggtccatgtcatcgacgtggggaacgccgacgccatcctggtgcaaaataaaggggccagcctcctcatcgacgcgggagagaaggacgacggggagcgggtgctcgcctacctgcgggagcagggggtggacaagctggacatggttatcgccacccacgcggacgccgatcacatcggcgggatgaagacggtgataaacggcatggacatcgatgcctttttgatggccaccatgccggaggggtatacccccaccaccaagacctatacgggcatgctggaggccctggcgggcaaaggggtgaagatcaccgaggccaagccgggcgcccggtatcccctgggggacgccgtgttggacattctcggcccggcggcggagtttgaggagaacaacaaccaatcggtcgtctgcaaggtgaccttcggggccaaaaagttcctgttcatgggggacgcggaaaagcaggcggaggccgagctgctgagcaagggcctggatttgtccgccgacgtgatcaaggtgggccaccacggcagcgacacctccaccacagacaagctgctcgacgcggtgaagccccggtacgcctttgtcacctgcggggcggggaactcttacggacacccggacaagtcgacgcttaataagctgaaggcgcggaacatcacggcctatcgcagcgatttgaacggcaccatcgtggccgccaccgacggcagccagataaccatcaccaccgaaaaaggaaccgccgccccatagggggcggcgggaaaggctgtgagcgtatgacctatgtgaccatcgaccggttcgagggcacccaggcggtgctggaggacgacgaggagcggacgttcgccgtgccccgggagcggctgcccgccggggcgaagccgggggacgttttggaaagcgagggcggggcctacatccccgcgccggaggaaacggaaaagcggcgggcctacgcccgtcgcctggaggagatgctcaggcatcctcccacatgagaaccagaaagggaatcgcccagggcgattccctttctggttatgccggataatagggattggtgaacgccctgcggccctggctgtcggtcaggacgaagcgcaggaagccgaaccgctcggccgcgtcggcggggatctcccattcgaaatgggtcaggcagtcttcctcggcgcagcggccggcggcggagccgatgcccttgcactgcagcgcgatgcggcgcaccggcgagcagtccaggcacagccggccgtcctccagatagagatcgtggatttccgggccggtggagcagtagtagtcccccgcgtccagggccttgataatcgcgtcataggcgaggaccggggccttgatcatggtgaagccgcccatggcgtcggattcgccgcccgcgttgtggttgtcgtcggtggcgatgcagaacagccgcttgccatggttcagcagggcggcgtaatgggcgcggtcgtccccgtcgccagaggccacctcgcagccgtggttgtaaatctcgaaggcggtcagcccttcgtattgcaggtagttctccggctcctccgccgaccaggagggatggttgtaatgcacgataaaatccgcctcgcgcagggcgcggatggtggcgttgatggccgcgggggaataggccgtcggccgggggatgagcatcgcgtgctccggatcccgggaaatggcgcacaggtggcagcagcgggaatacccgtcgggcgccgtctcgcagacgtctacctcgtagccgcagagggccagaaagtccggagcgtccagatccttgtgccactggagaacattgtggtcggtgaaggcgatgatggaatacccgccggtttggtagaggcccttcatctgcgcgggggtgagccgcccgtcggaaaaggtgctgtgggcgtgcaggttggctttgaaaaagcggccttcatggggaatgagatactgcttcatacatgaccattcctttcctccgtaccgtttaaaaaggcgagcgcccttttatgggcacagtatacgccttttttcacaggaccgcaacccccaggcaagcgctgaatgcatcacgcctgacggctcagcggcgacttggcggaggaaatgccctataccaggccaaccactggatttcatcgtcgctccccctcaccttaccctagcggcctgttttcgggcgccttctcctccaaagcggccgatctccgggaaacggtgccggttcccgctttcttttgcttcttctacctctttcgccctcaaattccaggatgcgcccaccgattccgacacattcgccgcccccgccgccatataatggaaacactgaaatcttagtggtggtgaggatgttgaaacagaaagcatacgccgggggagaacccaatcccacaggtggacaagccgtggaatccggcgtttcggcacggggggagcagaccctgcggggggagcctgtccggcaggtcgccctcgtggcgctctgggcgttgatcgggctcatcgtgccccgcgcctccgtctacggcggcatggcgcccttcggcgtcggggtggccgccgccgtgtccggccctggggcggtggtggtgtatctggccacggtggtcgggtatctgctgcccatgggcaccgccttccctctgcggtatatcgccgccgtcgccgccgtgggcgggatccggtgggccctcggctccctgcccgccatttccaagcgcaccggcttcgcgccggtgctcgccttcctcgccaccgccgtgaccggcgcggccatgagcctggcgggcggggcggacgtctataaggcgctcatagtcatcgcggaaagcctgatcgccggcggcttcgcctacttcatggcggtgaccgtccatgtggcgggggaggggaacgtccccaccctgtcggctcagcagcaggcggccatcgtggtcaccggcgcggtggcgcttatggcggtgtcggccgtggagttctccggcatctcgcccggccggatcctggccgtggtgctggtgctgctgctggcccgctgcggcaaggagcagggcggcgccatcgccggcattgtgctgggcgtgaccatggcgctggccagccccgagcacctggtgctggccgcggcctatgccttcggcggcctgatggcgggcatcttcgcccggttcggcaagttcgccgccgccggggcctttctcgtgtccaacattatcgtctttatgatcaccgccaccgacctgctggtggtggccagcatttatgaggtgctgggcggcagtgtgctgttcgtggccctgcccaaatcggtggatcggaaaatcaaccgcttcttcgtccggggccgggacatcccggcggtggagggcctgcgccgctccatggtgatgaagctggactatgcctccaaagccatgggagaggtggccaccaccgtggattccgtctcccagaagcttgcaggcctgagcgccccggatctcggctcggtctaccggggggtgtcggacagcgtctgccgggtctgcggcctgcggatgtactgctgggacacctgcttttccgacaccatgtcctccctcaacgacctgacgcccctcctgcgggagaagggccaggtggacaagtcccaggtcaccggccacctggcccgccactgcggccggctggaggaagtgatccgcaaggtgaacaacggctataacgaatacctgatacgggaaggcgcctggcggcggctgtccgaaatccgcacggtcatcaccgaccagttcgccggcatgtccgagctgctcgacgagctgtcggagaacttcaccggcgcccagcaggtggataccgaagcggcggcccgggtgatggcggtgtgcgaggatcacggcctgctggtggaggacgcggtctgcttcgtgggcaaaacggggcggatgtcggtggaaatcctggcggccgacgcgggcatcaagctgcggcagagccgctggttccgggatatctgcgacgcctgcggccgggagttcgaccatcccgtcgccgcccggatcggggacgcggtgaaaatctccctgtcggaaaagccggcctataaactgaacatcggctcggcccagctgaactgttccaacgaaaagctgtgcggcgacgccttcgagaccttcgcggacgggggcggccggatggtggccgtgctcagcgacggcatgggcagcggcggccgggcggcggtggacggcgccatggccgtgggcctgacctcccggctgctgaaggccggcttcgggcaggacagcgtgctccggctggtcaattccgcgctgatggtcaaagcgggggacgagagcctggccaccctggacgtggccagcatcgatttgttctccggccggatggaaagcctcaaggccggggccacggtctccctgctgcgcagcatgggccgggtcagccgcatcgaaaaatcctccctgccggtgggcatcctgcgggatattcatttcgagcggagcaccgacaccctcaccgatggggacatcctgctgcttctcagcgacggggtggtcagcgagggggtggcctgggtggaggaggccctgcgggactacgacgccgacaagggcggcatgccccgcctggcggaggaaatcgccagcgaggcccggcgacgccagaagggccagcgggaggacgacatcaccgtcctggccatgaagctggaaaaggtgaaataactcagcggagggcgcgttgcaaaatgtaaggttttgcaacgcgccctatctctgcgaatatcgtcgctctcccggcgaatgtcggaagagcgaacgcatggtgcgacagccttttttttgcggaaattttggcgcatttttgtccggattatggtatactggtagcatcgattgacaagggcgaacacgcctgccgtcggccaaaaaggtggcctgcggcgttcagtggtctttgctggccgcctttttggccgacggcaggtccttcggagtttttcggcagtgaaaaagaggagatggcaaggcggacgaggccgccgggctggcgcccggcaacgaggacaacgccgccagcaccccttttcacgccgaaaaaccgcgtttccccttgtcaatcgatgctaagcagagcttagaaaggacggatgtctatgacgattcccgagctggccgccgcccaaaggcggtttttcgactccgggcgcacccgctccgtcgccttccgggaggagcagctccgccgcctgcaggccgccctgcgggcggaagaggagcccctgctggccgccctgaaacaggatttgaacaagtccgccggtgaggcgtatatgaccgagcttggcatcgtgcacgacgagctgtcctgcgccctggggcatctgcgccgctgggcccggccaaaaaacgtgcgcctgcccctgttccagtttcccgcctccggctgcatcctgcccgagccttacggcacggccctgatcatctccccctggaactacccggtgcagctgaccctcaaccccctcatcgccgccctggccgcgggcaactgcgcggtggtcaagccctccgcctacgcgccggccgtctcggcggccctggcccggctgctgtccgccgtctttcccgcccagtatgtggcggtggtggagggcggccggcaggagaacgccgcgctgctcgagcagaaatgggacaccatctttttcaccggcagcgtggccgtgggccgggtggtcatggaggccgcgtcccggcacctgacccccgtgtccctggagctgggcggcaaaagcccggtgattgtggacgcgacggccaacctgaaggtggccgcccgccggatcctgtggggcaagaccatcaacgccggccagacctgcgtcgcccccgactacgtcctggcggacaaccgggtgaagccggcgctgctgcgggagatggaaaagcagctgcgcttcctctggggccgccgccccctggagaaggaggagtatccccgcatcgtcaatgagaagcatttcgagcggctggtgggcctgatggccggggagcacgccgccgtcggcggggagtgcgacgccgccgccctgcgcatcgcccccaccgtgctggatcgggtgacccccgcctcccccgtgatgcaggaggagattttcggccccctgctgccggtcctgggcttcgacgagctggacgaggcgatccggttcgtccgggaacggccccgccccctggcgctgtacgttttttccgaggacgcggcggcggtgcggcgggtgctcggtcagctgtccttcggcggcggctgcgtcaacgacaccatcatgcacctggccacccaccgccttcccttcggcggggtgggggacagcggcatgggccggtatcacggcaaattcgggttcgacaccttcacccattacaagccggtggtcagccagtccacccatctggatctgcccgtgcgctacccgccctacaccccgcgcctcgggctgatgaaacggtttttaaaataacggaggtctctcgtcatgcaggtcaagtataaacagaacaacagccggatgtgcgtcatctgcggcatggacaaccccttcggccttcaggcccccttctacgtcatggaggacgacagcgtcatgaccctgttccgctaccggcaggagcatcagagctatcccggccgggtgcatgggggcctgatcaccgccatgctcgacgagctgggcttccgcgcctattgggcgttcgagcccgaggtgctggccgtcaccatggagctgcagaccaaataccgccgccccgtcccctatgacgagccgctcaaggggatggggaccatcctgtccgcctcctcccggttcgtcaaaagccatgcccagattaccgatatggacggccacgtgctggccgaggccgagatgaaatacatcaagctgcccagcgataaggtgaccgacgcggactatcacgaggaaatgtgctacgccctgcccgacgacgtcaaagcgctgtaagcgccgcgttccctcttttcatttccaaggatttgtgatagtctgatgtaaaggagcgcctgcatgaaaaccgaaaccaaatggggcctggccgccgccggcgcggcgctttcggccggcctgtggctgtatcaggagaatacgtccgtggaggtggagcccctccccgtggccctcagcggcctgcccgccgccttccggggctttaaaatcgcggtggtgtccgatgtgcacctgccccgcggcggcgtgtcgtccgcccgcctggcccgcctggtcgccctccagcggcccgacgtgattgtcctccccggcgatctgaccaacagctatgccgactttgatcgggagggcctgacggatctcgggcggcggctggccgccgtcgcgccctgctacgcggtggcgggcaatcacgagctgcggttcggccggacgggggaatacgcccggctgctggagcgcgcgggcgtgcgggtgctgcgggacggctggacgctgctggagagggagggggagaccctcaccctgtacggcatggagcgcaagcggccccggcccttgcccgcctcctgcccccggccggttatcgccctggcccatcagcctcagtggctgtatctgtacgaggccgccggctgggatctggtcatcagcggccacgcccacggcgggcaggtgcgcctgatcggtcaggggctgtacgccccggggcagggaatgctgccccccttcaccagcggcctctaccggcggggcgacactcagatggcggtcagccggggccttggaaacagcaccttttccctgcgcttcggcaaccggctgcacctgccggtgctggtgctcgggtaagggcgaggcggggggcgttcccccttaccttaaggatcgataagggagtgtaaaacatggccgatacccatcaaatccgctgtccccagtgcgcgacgctgtatgacgagggggaggcgcgctgcccccactgcggcctgcccgccgagccggcggcccggcagcggcatatcgagcagctgctggagcatacggctgccggccccgccgcgggggcgcccatccgcaccgatccggcttcggcggccttcgcgccgcccgaacccgcgatcgcggtcgcggagcggccttcccggccaccggccgcttatgtcgcctcgcccatccccgcggtgcaggcggcctttggggagccgctgcccccgcccgccgggagcgtcgttcccggctccgggtgggcctgtgtccccctgggccatccggtcgcccccgccaaggggccgtccccggtgggcccctttctcaaaaagcaccgcttcaagctgctggccgccgccgtggctgtggccgccgtggtggcgctcacactggttatcggggcggtgcgcagcacgacggccagcttccgctcctcgcccgaacggctggtcgccgggctgcaaaaggccctggacgacaaggacgtccgcctcttcgccgagctggccctgccggccggcgtcgaatacaacgccagcgattacagccggctcaccgccagcgatctgccgaatcttcagctcgagctggtggaggtcttctccggccgaaaggacacctatgccttggcgatcgtccgctatactgagcgggaatctctgagccccggggacggccagatggaggtgctgatgctgagcaaaaccgacggcaaatggtacaactccaacaccacgaacgccttcctgcggggtctgctgggtacggtggactatagctaccagtatgtcccggatagctacgacgacccctacgccgtgccggactgaaccaagccatataaaaaccacccgcgagccaaaggcccgcgggtggtgtcgtttccggcgctttctattcctccggggaaaattcgccctcccggcggacatgctcccggattttctcaaagctctcctggctgaccacatgctcgatgcggcaggcgtcggcggcggcggttttccgatcgacccccagaaagaccagccagtcggtcagcagggtgtgccgctcatacatccgctgcgcgatttcccggcccttgtccgtcagcagcaggaaattcccggcggtcatctccacatagccgttttcccgcagctgcttcatggccacgctgacgctgggcttggaaaagcccagctccacggcgatatcgatggaacgcacccggcccttgctttgctcgagcatcaggatggtttccagataattctcagcggattcctggattttcacgcgagacgtcccgcccttctatgcgatatggaatcattgtagcacatccccggctgattttcaacgcccggcttgtggaaccggccggccggtggtatactgaaccagtagccgcttggccgtccccctttgtccgcgacgaataatccgcccgccgttctcataagtatggcacgggggcggaacagccggtgcgttccatggacggctgccgaaaccgccccctttcagtttacacgaaagaatgggtggttgacatgcggatcatcaggaacagccgggacagggcctctcatcgcccggaacgccgggagggcgcgccccgccgccccgcgcgccgggacgccgtccggaagctgtggcagtggtcggcccttcccctggcgggctgcgcggtggtggcggtgttcatcgcggtgatgcagattaccctggccgccagcaccgaggccggcatgccggccgacacggggtatatcctcatcgacccgggccacggcggggccgacggcggcgcccaggcggcggacggcaccctggaaaaggacatcaacctggccgtggccctgcccctgaacgatatgctcaaggtctgcggctacccggtgaaaatgacccgggataccgacatttcggtgcacagcgattccgcccgcaccctgagggagcagaaggtcagcgacatgcataaccggctggccctgtacgacaaggccaaggcggcggtggggatccataccaataagttcccccaaacccagtatttcggcacccagctgttttactccgccaactgcccggaaagcgaggggatcgcctccgctatccgggaaagcgtggtcgggctgctgcagccgaaaaatacccgggagatgaaaaaggcggacagcaacatcttcctgctggataaggccaaggtgcccgcggtgttcgtggaatgcggctttttgtccaacgagggggagctggccaagctgaaaaacccggactatcagcatcagatggccctggccatcctgaatgggctgctgcagtacgggttatagaaacgtgacgaaaggcaaggactggaaatggcacagaaagcgaaagcggtgttcgtctgctcggaatgcggcagcgaatcgcccaaatggtacggcaaatgcccctcctgcgggcagtggaacaccatgaacgaggaggtgcgcgccccccagcgcgcggcggcccccgccggggcgtcctccgccgtgagggcgcagccccggcggattggggacatcaaccccgagggggagcagcggtataaaaccggcctgaaggagctggatcgggtgctgggcggcggcatcgtgcggggcgggctgatgctcatcggcggtgaccccggcatcggtaaatccaccctgctgctgcaaatctgcgagcatctggggcagcggctcaacatcctgtacgtctccggcgaggaatcggcccggcagctcaagctgcgggccgaccggctgggcgtgcacagcgagcggctgttcgtgctgtgcgagaccgacgtgggcgccatcatcgagacgattttctctgagaagcccgacatcgtcatcatcgactccatccagaccatgagcctagcggacgtggcctcctcgcccggcagcgtcacccaggtgcgggaatgcacctccgccatcatgcgggcggccaaaagcgtcgataccccggtgttcatcgtgggccatgtcaacaaggacggcgccatcgccggccccaaggtgatggagcatatcgtggattgcgtgctctacttcgagggcgaccgccataccagctaccggatgctgcggtgtgtgaagaaccgctatggctccaccaacgaaatcggcgtgttcgagatgcgggacaaggggctggccgaggtggagaacccctccctgatgatgctgtccggccgcctgaccaatgtcagcggcacctgcgtcgcctgcgccatggagggcagccgccccctgctggccgaggtgcagggcctggtgtcgcccaccggcttcggcaatccccggcggatgtccaccggctttgacaacaaccgcctcaatctcctgctggcggtgctggaaaagcgggcgggctatttcttctccaacctggacgcctacatcaacgtcgtcggcggcctcaggctggacgagcccgcggccgatctgccggtggccctgtccctggtgtccggcctcaaggacacgccggtgggggaggggatcctggccttcggcgaggtgggcctggccggcgaggtgcggtcggtctccaacgctgaagcccgcgtcggggaagccgcccgcctgggcttcaccaaggtcatcctgccctatcataacctgaaatccctgcaaaagcgcggcgatatcgagctggtcggcgtgcgcaccgtgcgggacgcctacgaagcgctcaaaccataagaaaatgccctcggttccttgcggaatcgggggcattttttaggcttattctcccgcctcggcccggttgatggcgcacagaacgcccctgaccgacgcgaggttgatgttgttctcgatgcccacgccgaaaatcggcttgccgtccggctttttcagctggatgtaggcgatggccttggagtccgagccggaggagatcgcatgctcgtgataggacaggaactcgtaccgggtcatgtgggccgcctgcagggcgttgaagaaggcgtcgatggggccgttgccgctgcccgacagggccgtttccttcccgtcggaaaccagcacgccggtgaatcgcacgctgtccgcgtcctccacaaagctgtgggcgcgcagatccaccttccggggcacatcgatatagtgctggcggaacacgccgaacagctcgtcggcggacacctcccggcccagccggtcgcattccgctttgaccagcgcgccgaattccggatgcatggccttgggcaggttgtacccgaaggcgttctgcatgacgaaggccgcgccgcccttgcccgactgggagttgatgcggataatgggctcgtactgccggcccacgtccgccgggtcaatgggcagatacgggatctcccagtagtcgctgttgtgctcccgcatgtaaatggtgcccttgttgatggcgtcctgatgggagccggagaaggcggtgaacaccagctcgcccacatagggctgccgctcggggatgtgcatcttggtgcaccgctcgtacagctcccggtaggcgggcagattgctgaaatccagccggggatccaccccctgggtgaacatgttcagcccgaccaccacgatgtccaggttgccggtgcgctccccgttgccgaacagggtgccctccacccgctcggccccggccagcagcgccagctccgtggccgccacgcctgtgccccggtcgttgtggggatgg

SEQ ID NO: 4408 - DNA, 32759 bp, Unknown
  16S sequences of unknown bacteria
tcagttggtagagcacctgactcttaatcagggtgtccagggttcgagcccctgatcgcgcactgaaagcactgtttttgtggacatggagccgcggggacggtgtttttttgcgtccgcgcagaaacccagtgtttatgcggactgcttggtgtgtcggcggcgcgatagcactgtttgtgtagcaggggatcgtgggagatttgagtgcgaagctcatttaagagaaataagagagtgctataacatgacataagaaaaaagggaagggcagcagaggttgagcaaaacttctgttgcccttttttagattcaggcggatatttgcagtttatcaagaggaggttgatacgcttcctgatataagctgcttatggggaacttatttgattaggttaaacacgtaaaacgatagattcgtatttctgaagcatataagtaccgctgatagtcgtgtcgctaaaaagagaatgcatcggctttttcagaatgatttccttcggctcagatttataattcagagcaaataagtatttttgtccatctttttcgcgcataattacctggacttctggtggtgcctgaataagatcctggaatggttcaaggattccaaggtaagtaaggagttgttttacatttttttgagagaatgtgcttccaaaatgcaatacctttcccgcgcctactgcatgctcagtgagagctgctgcaccgctgaaataactatttgcatagcttgcaagcacctttgtatcgccaagcggtgtcagtaggtcgttaaagatcggagtttccatcggaacagaatcaaatgttgcaaaaatcggctcttcgaatgggcttggaaaggtggattcgtggatgtctgttcctgtcaaagcctgaagaagacctggctgtggaagcatgaggcattttccgttcatatccttgtgaccgctacggcagccgagaaccagcgtaccgccctgttgtacataagcggtaagtagagctacccgttcttcgtttattaaagacggatgtggatagaaaatcacaggataccttgcaagatcatttacggtggtgtcaggttgcagatacagcatattgtatggcgtgtgatttaattcagacgccagaaagattgcttcgtcactggctacggttactttttcatgccagatatctgtatttgtatcccattcgttgtcataatctttcagtaatgcgaaggatgcaacataatcagagccgcaaagtggatcgagttttttgaaatcccggaagaaatcagtgacctcagcaagtttacggttgtcacggttatcgtggtcgagaatgccataccagtaaatttctgttccaaaggtacaggttcgccagcggaaaaagctgatataatcggcaccatgagcaacactttgcatggcccaaagtttcaactgaccaggacggggattcggttgaagcatccgggtcgcccatcctccggcgccgctttgttgctccataatgccaaaatggggattgatggaacgaacctctgtcaaatgttttgaccagtgtcgatcatccagatttgcatggcgactggtatccagtgcctgagcaaaatttggataacaatcgtaagtgtaaacatcgagagattcctttttcatattgtgattatctaagttccagaattttccgtttgtagtaatgaaatcttgttcttttatatattttctcagaatattagattgcatgagacagaatcgtcgggcgctgtcggagacaaaacgatagtaatctagatgcatatgtgggttgcttccgcgctcatttgtgcgtcttggacaatagatttcattccagttcgtataggtctgattccagaaagtagttccccatgcctgatttaaacggtccaaagactgatatttttcctttgcccaggaacggaaggcggcggaatctgcatcagaatagaattcagagatctcacagttaagctcgttgtcaatctgccagccaatgatcgcaggatgcgatgcatagtgggctgcttctttttcaacgatacgggcgacgaacatctgataaattttcgaattataattgtaatgtcgccttccaccatgccggtataaaactccatctttagtagcgtttaaaacttccggatatttgttcgtgagccaggcaggaggtgttgcactcggagtacagaaaatgatgttcattttttcttcgctgcagagatccagatattcgtcaaaaaatttaaatgtaaagacgccttcctgtggttcgatcaagttccaggcaaattcagcaatacggatcgtggaaattcctgcgcgcagcattcgccgtaaatcgtctcgccagagggatttatcccagtgttcagggtaataggcaacgcccattgtcatttttgtccatacaagtttgtttttcatacattagctcctttcttttgtaagtggtatttgaaatgatattttagttccgctgtctggatgactgtctatggtaaagtttatggaatcaccgtataggagaaataatctgcggtatacattttttaaaccgatggagtccttttgcgacatgtccttacattgtgccagtaaagcagtcaggtctgtttgaggaataccagttccgttgtcttcgattttgaaaaatagaaaacatgcttccttccatatctgtatttgtaaaataccttttctggtgagaccttccagtccgtgaatgatactgttttccaccagaggctgaataagaaactttggcatatacagctgtagtatatccggattaatttctgtaaggatttcgaagcgatcccggaagcggtaggactgtatctgcagatattcctgaacaccgttcatttcttgctttaccgtgacaaaatcctcacgtgataaactgaaacgaagtagctttgccagtgatacagtcagatttgagacatcttcatttccgtttttaaatcccagccagctgatcgtatcgagtgtattataaagaaaatgaggattaatctgcattttgagataatcaatttccgcttctttattggcaatttccagagagtacacctgttccaacagtgcctgtattttttcggccatttgattgtacacagtactgatctggccaatttcgttcatttctgtgatctgcatacgtgcacgcaaattgccgtttccgaattccttcatacagttctgcaaatcttttgtgggtttgaagacttttctggtcagattgcggcttaaaatgataccaaggagaattgtaaaaaatacagcaataccgattaaaaccagatttatccgcaaattgtcccagacatattccgaggagacagttgtgatcattctccagccgttatccatgacatcttcgccgtagtaatagctttttttgagcgataaaggatcctcgactgtagaattttgttctgtgtctttttcagatgcaagaaaatgttgaccgatgatggaggagtcagcagaggcaatgatgacattgcctttgtcaactaaatacacatttccggaatatggtgtatgtaaggcggataaacatttttctagataagtgcttggacaaagaatgaccatatagccaagtggttccattgtttccagattcagaatggctctggctagataaatatagtttaaatcctcagaagtcagccagagggcaccgccgtttttggcgtaaatatcatcagcggatattggatcaatggttcctgcaaagttggattcgtaagtaaaactaatgccattttttgtataaatccgaattgtagtaatgtcattttccagcaaggccatggagcgaagcttgctgctgatagcagaaatgtatcggttgcatttccagaggtttttcggattgttaaaatctgctatctgattaacagcaacgattttttcctgaatatctgtatctgacaagagccggattgacagctggtttacctgattcagtgtggtagagatattttcccacgtgagctgttctcgatccttcaggtgagaagagacctgatttttgtaggtataatagtagctaaatgcaaatacaagatagcaaagaaaagaacttaccagaataattaaaataagaagtcggaatattttgcgctcgatactgtttttctgattttctttttccattctatttttttcctttttccgcaaccttcaagaggatattggcaaatgaaacgtttttattctgctgcattttgaattcggatggagaacaattgaatatacttttaaaaacctgagaaaaatatcgctgatcctgaaaaccggattgagagcagatataagagattttctcgttcttaaatagataacctgccgcatatgacaaccggattgctttgagaatttccagaaaggaataacctgtctcagctttaattttcctggaaaggtacgcagaagaaaaatggtatttagctgcaagcgtgtccaaagataattcggaggcataattttgagagagttcagcgatcatctgtttacatgcaggtgagacagagagaaagcagttctcgatttgctgtggaatgcccagagatactgcctcccctgagtctcttataagatttttttgacagattttggcaaccaattctaataagtcacgaggacgaaaaggttttaggatatattcgcatacaccaaaggaaatcgcctgccgtgcatattcaaattccgcatagccggtcaaaagaatcaccattgtttgtttctttgagagttgaatataattcgctaattccaggcctgacatgccgggcatccggatatccaaaatggcaatatcgatcgaattttcatttaatattcgctgtgcttcgatccctgtgcctgctgataaaacactcgagatcccgattgaagcccagtccagactttttaacccttcacgaataatgtattcgtcatctgctattagtaattgcatagttgtcctttcacgaaatcatagattagcctttgactgcaccagcgaccattccttccatgatttgtcggtgaagaagaatataaacgatgatacttggaataatcgtgataataaccgcggcaatcataccgacataatcagtagaatactgggcctgaaagttggtcagtccaactggcagagtcatttttttggcacttgtcaagaaaattcttggtaaaagtaggtcattccatatattgatgaactggacgacagcgactgttacaatcgaagattttgagattggaagaataatctttgcgaagcattggtaaatattggctccatcgatgatagctgcttcttccagctcacccggtattccctgcatgaaaccgcagataatgaagatcgacatcggcagtccgattgcaatatggggaatgataactgagaggtaattatccaacaggccgagatttttaaagatcgagaacaaaggaatgatcatggcataaataggaatcatcattcctgcaagaaaaatattgtatacaagccgtgataatttccactgcattctggtaatggcataagagaccatagttgccagaattgagatcattataacagatgatacggcaatgatcacggagttcatgaaatattctaaaacttttccttttacaatggcattgacataattgtcaggtctccactgcgcgggaaatccccatggattcatgtataattcagtgttctctttgaaggatgagagaaaaagccagaataaaggatataaacacatcagtgtaaagataattaaaagaatatatgtaatcagacggatcgctttttgcgttgctgttttcttcattcctatcgcctcctagtctctgtctttaaagataaaattagaaagtgctaccgaaccaaagcaaagcaggagaagaatgactccgattgtactggaatagccataatggaggacattaaatgcctgatagtacatataggtagacataacttctgttgcgtgattcggaccgcccttggtcatgacagcgattaagtcgtaatattttaaagaaccggtaataattaaaacggcatcaatctttaaaataggttttattagaggaaaagtcacataccagaactgttgccagtcagtagcgccatccagttctgctgcctcgtaaaaatttgggtcgatatttctcatggctgccagttggatgatcatgtgatagccgacatattgccacataataacaaccatgatacagaacaaggcaatgtctttgttagaaagccagacctgctgcagatttcctaagccaattatttttaaacaggcattcagtaagccatagtttccattatagataaaagtccaggtcaggccaacggcgacgccgcagatgacactcggcataaagaagaccgtttggaaaaaggtagcgccctttatgtgtttgaaaatggcatttccaaaaaacatggcgagcggcatatgggcgatcagagagccgatgacgaggagaatgttgttggataaggcgtgattaaaagtaccatcattaaataaatctttgtaatttccaaggccgacaaatgtcatgtgtgacattaaatctgtatcaaaaaaagaaagatatatattatatgctataggaaatagtgcgaatatgacatagatcagaaaggctggaagaacaaaaacggcaatgctttttttattgcttagggttttattcatttgtgtgctcctttcgtgtatgaaaacagccgccgcacaaagacggcgactgttctgaaaagaaagaaaagttaaaaattatttctgattttcatagaaagcctgtaatgcatcataggtttcctgcggatcttcgccatttgcaatggcagaagcgctgttgttgaattcatttcccatattcgtatccactcggtcaaaccaggcggtgagatgctgctgttcagaaactaactgaattgtagcgtttccaagcggagagagtttttcttcatcgactgtgacgttggttgtcggaagtcctgcataatcatagatcagcagatcctgaaattcttcgctggtcatgtatttcaggaatgcaactgcagcttcgatattctggcagtttttggagagtgcataggtacggttaaccgatcccatgatggttcctttgttttcctgattgcttgccggcattgcgaatacgccaacttttccatagataggtgttgcatccggatcatctaaagttgcatttgtccaaccaccattatagtacatggcagtcatacctgtctgaaaaagagcacgagcctcattatttccgactccggtgaatccgtcttcaaagtatccggcatcaatccatttctggagcagctcagcagcttcaataaatgcaggatcattccagttgcgagagccgtctacaataccggaatagaggtcgtatccggcaataccattggagagctcctgaataatctgcgaaaccagccaggcatcttcagaggttccgccgagtgcaatcggggtaataccagcttcctttaactggtcgcatacggcttccagctcttctattgtagtcggaacggtcagtccttgttgttcaaaaatttcttcattgtagtacatcatagcaactgttgttgttactgggattgcataaacatcaccatcataggttacaggatctaaaattccagcattaaaactatcgcgccactctgggtctgcatcaagatattcctgaagatcaataactttgtcgccattgataaaattttttaagtaaccaagttcccaagtatagaaaatatccggttcagagtcagcggccatgacagtggacaactttgttttataatccgcattggccagattttccagttctaatgttacattgtattcatttgtttcgttaaattgatttactgcatactgggttgcctttaaaatactgtctgcttcagctgcattttccataatgcgcatggtgattttttcggcatttgcaacggatgagaagaccattggtgctgccatggcaagtgtaagggctgtaacaagagtttttttcatagtaacctccttttgatcggcatacacgctcgtcgatctgtttaatttgtattatgatctgattataatgcctgattatctgtaaaaaaagacatattttttaccagaatgtttgaaaattctaccagataagcaaaaaatgcctaaaaaatcaggataatacaacgaaaaatataaaaaatgcacattaaagctgctttttaaaatcactgtcagaatcaacaaaatcccaaaaacatttttggtaaaaagtaaagacaggattttcttgacagagtcttatgcaaaacgtataattaaaacaacaaagtacacgtgtacgcaattaaaaataaccaaccaaagggcggattgtattgagaagaatacaaaaagcgagacaacgttccgctccatttttaaagggaaaaatgtacacgtatacgcaaacgcttatgagcatactgttcgctttggctcaacaagaaaaggaggaaattcaaaatgaaaaagaaaactatcagcctgcttatggcagcatcactggcagcatcttctctggcaggcggaatcgtgagcttcgcagaggagtccgatccgatcaccctttctgtatgggcgccgtttaccggatccgacggagatgtgcttcgagagatcattgataactataacgagacaaataccgacaatattacagtccagatcgatatcatggacaatgcgactctgcagtccaagctgccgaccgcagtatcgaccggcaccggtccgtcctttgtactcgtaggcattgagttcctgcagcagtatgcggacaacgatctgatcgaggatatcagtgatttctgggatgcgactggcgttgataagagcaatttctatgaaaatgtacttgcaaagtcttatgttggcgatacacagtatggtgttccgatgcagtacaacctgcagtatctctactataataaggatatttttgaggcagcaggactggatccggagactccgccaactacgctggatgagctgaaagcagatgctatcgcatgcaccgatccttccaagaaccaatacggcatcggtttcccgcagaactacacctattactgtgagtatctgtgggcaaatggtggcgatgtcatcagcacggacggaaaagaaaatcttctgaattctcaggaaaacatcgacacacttacctggctgcaggatatggttgtaaatgagggcgtatctccggaaggactgaccggagcagatgcagataccttattccaggctggtcagttggctatgtatatgagcggtccgtggaacatcaatggtctgaaccagctcggtgtcaactatggaatcacggcgattccggcaggcagtgcaggtgcattctctccggaaggtgggtgcgcttacatgttgactaagggtgcagacgatgcgacgcgggcagcggtttacaaattcatggcatattggctgtctgatgcgacgctgaaagaatggtcgaaccgcaatggcttcccggtatggtcatattcggtactggaagatgaggacatcaaggcaaacgagattctgagcaatgtttccaaggcatctgagatcggaagagactggcatctgaatctgacgatcggcagccagattgacagtgatgttatgcagccgatgatggagaagattttctccggcgaggatgttgctgaaaatgtgaaggccgcatcggatattttggatgggattattgcggcacagtaatggtactttgactaaggcaggcggatcacggtaattcgttgtgccatctggctgaatgcctccgcagattttgcagaaatgcttttgcggaggcatttaccatatatagatcgggtatgttattttcggaataactattttgttatgtacgaaaaagtaagcgctgtcaggtaagacggcagaaggagttattatgaaaaagaatgctgcgggaaagcagaaggagacagggattcggacgcagaagcaggcgtatctgtttctggcgccgtcgttgattatcctgacagtatttgtttttgtacctctggtcggggcaattgcaatcagtctgatgaatatcaatatttacatgaatgatatttcttttgcagggctgaaaaactatctgaaaatgtttaccgatgcaagagtcgggaatgcgacgttaaacacattttactttgcattgctggaggtgccgctccagattgggctggcactgcttctggtcatgtttatgacgaaaaatacgaaggttcacaaattgatgcgaacgaccttttatcttccgtatgtatgctcgatgacggcagtgagcatcatgtggtcgatgcttttgaataagaactatggaatgctttcctacctgcttggtaagatcgggattcagatgccaagccttttgaccagtacgacatgggcaatgccgacggttatcctggtcacggtatggaaagggtttgggtataccttgacggtactgtctgctgcggctctgggcgtgtcgcattcgttgtatgaggcggcggaactggacggtgcgggtggatttcagcagtttcgctatgtgacgataccggggattcgggatacgatcggtttctgtacggtcacgacactgattatggcattgcaggtatttgaccagatctatgtcatgacagatggaggaccgcagtataagacggagacactggtcggttatatttataataaaggatttcagatggcaccgtttgacttaggatatgcctcttcgatggccgtatatctgtttctcattattgcggtactgacctttatcatgcggaagtatgcattcccgcagggaggtgacgaagaatgaaaaaacgtaaaagtgcagtgtttgatgtggttggatatatcgtactgcttttgattgtactgattgtggtgctgccgcttttctggctgatcgtctcatccttcaaatcggatgcggacgtgatcaaatggccgccgcacttcttcccgtcggagtgggtggcgacgcagtaccgttacgtcatgaaagcgatcccggtgcttggcatgctcaaaaatacggtaatcttcgccggatgcgtgacggtaatcagtctgttttttgactctcttgcggcatatgcgttttccaggatgcagttccggggaagaaaggtgatcttcagtattattttacttacaatgatgattccgtttcaggtcatcatgattccgctgtatctggaggagttcaatctgaagattctgaatacctatctcggactgattttgccgcgtaccgcgagtgcttatggtatttacatgctgacctcatttttctccggcgtaccgaaatcgctggatgaggcggcgcgcatcgatggcatgagggagtttcagatttactcgcggatcattgccccgcttgcaaagccggcctttgtgacgcttggcatttaccatttcatgaataactggaacgacctgctttatccgatgatgctgacgagctcggttgacatgcgaaccttatcagcgggactggcgatactggtcgggagcaactcgatcaaattcggtccgactctggcggctacggtgatttcagtagctccgctgctcgttttattcctgttcggacagaagttctttatggaaggaattgcgacttcgggtatgaaggagtgacagaagcaatataaaaaagtgttgtaagctgcgaagcagttgcatatagggatgaatcaggagaaaaaaggagattatatgaaaaagacaaaaattttggcacataaaaaatttcagaaaggaaaaatcgatccgagaatctatggctcctttgtggagcatatgggacgggtcgtgtactctggcatctatgagccgggccatgcgacggcggatgagaacggattccggcaggatgtcgcgcaggcaatgcacaaaatgggcgtgactaccgtgcgctatccgggcggcaattttgtatcgaactatgactggagagatggtgtgggtccggtgaaaagccgtccgcgcaagattgatctggcgtggaagagcatcgagacgaatgaagtcggtaccgatgaatttatgaaatgggctgagaaaaatgcgattgatccaatgttcgcagtcaatctcggcaccggcgatatcaagagcgcagtatctctgctggagtactgcaactttccgggtggcacctactatagtgatatgcgccgggaaaacggaagagagaagccgtatggcatccatacgtggtgccttggaaacgagatggacggagactggcagatcggccataagacggcatgggagtatggaagaatcgcgcacgaggcagggaaggcgatgaagcttctggatccgtcgattgagctgactgtctgcggaagctcgatgtctagcaatgcaacgtttggagaatgggagcgcgaggtgctgcagcatacttatgactgtaccgattatatctctttgcaccaatattatggcgggcaggaaaagggaacggcagcgtttctggcacagtcgatggatatggaacgctatatccggacggtctgcaatatctgtgatgtgaccggcgtgcagcgccgctcaaagaaaaaaatcaatatctgctttgacgagtggggcgtatgggagattccgaataccgaggtgcaggagtcggtggaaaatgcgccgtggcagatcgcaccggccttcagtgagcagatttatacgatggaggatgctctgctctttgccgggatgatgatgaactttctacgttattccgatcgggtaaagctggcgtgtcagtcgttgctgacgaatatcagcgcctgcattatgacagagcgtggaggcggcgtatgggttcagccgatctactatccgtttgcaatgatggctgagcatgctcatggcgtcgtgctcgacagtctgagtgatggtccggcttatcaggccggcggctttgatgaagtaccggtcgtggatcaggtagtcgtatacaacgaggaaaagcaggagcttgtactgttctttgtcaaccgcagtgaggaagcggccgaggtagaaacagatctcgaaggatttgccgtgattggtgaggtgctggaatctatggctttgcgccatccggaccgcaaggcgaccaatgcaatcgagcacaaccgtgtcgtgccgcaggcctgcagcaactatgtacagaaggacggtgcgctgtactgcgagctgatgccgctttccttccagatgattcggataaaggcgagataataccgagccgcggacttgtgtgagagtgagagattgtgatatagtatgatgatgatacaagggtcaaaaggtcatgcgtttcatgcttgcatgaaaaagcatgacttattgacccgcaaaacaccgaaaagtagccatttttcgtagaaaataagcggatttcgaatactatacacgaagggggaacacgtcatgggaatcacgacaaaggatctggcgcagctgtgcggcgtatcacgcacgaccgtacaccgtgcactttacgggggaggaagaattcatccggataccaaggaaatgattctgcgtgtcgcgaaggagcatgactatcggccggatctgctggcgcgaggcctggtgaagggacgcacctactatatcggggtcgtagtcatggatgtgcgcaaccggtattttgcgggaatgctgagcgcgatcggacgggaggccgcgcagcatggctacaatatcaacatcactctgcatgataacaaccgcaagtttgagcaggatcagctcacgcggctttcttcctaccggatggacggaatcattctttcctccgttaatgagggagcggagtatgcaaaatttctggaaagcctggagacaccgatcgtgaccgtggacaataagatcgccgatgggcttccgtttgtgagcattgaccagcgtgcagcgatgcgggaagccgtggagcacatcctggaaatgaaaaaatatgagcggatcgtatttgtctgtccggcgatggcagtggcaggagagcagaacatttatgtacaccgggagcgaaaaaagggatttgaggaagcaatggcgggtgcacccggggtacaggcagaatacgtgctgaactgggagtatttaaagcaggtagagaagctggcacaggatggcatccgtacagcgtttgcctgcaccgcagatgattttgcactggatatcatgaaatacctgaaagaaaaaggactgcgtgctccggcagattacggcattgtcgggtttgataatgtagataccctgaaatacatcacaccgcagctggtaacggtatccaataaggtcgatgcggtcgcaaaggtggcagtgcagatgctgtttgcgctgatcaatgcggggcaggagcaggcagatgagaagtcgcaggtggcagaacaggaagctcagagacgggtacagatacttccgcatgagctgatagatggagagacactgtagatgaaaagcaggacagaaaactctgatgccctgctttttttcagcctaaagataagaaatcttattgtgaatattatttttgtgagcaactgttttactaagactcatccgtattcttaaaattttccaacacgtccatatctgaaaaaatgtaagtttgcggcaccagtttttttgttctatattcttttggtgagcaggaaaaagcatctttaaagagttttccaaaatagctgacagatgaaaaaccggtcagatatgcaatttccgtgacggaaagattaccctctgaaagtagaaagcaggcattattcaggcgaattttggttagcgcctgaatagtggacagattatactgctttttcatacatcgaattaaatgggttggatgacagtttgtgaccttggaaagcgtttccagtgtaatgttttccgcatagtgtgaatgcatgtactgcatagcaatatatgcaatttccacatgagagaccttattcaagataagggaaatcctttgcaaaattttcatgaaaagctcctgctgataaaaagcatttgtagagcttttcgatatggtgttggagcggctataaaaatcaatactttgtgtttcgagtctggacataagagaaataactgcctctgcattatcagcggtaagactctgatacatgggaattgcaatgcggtaagaatttgtagaaaaagaagaagtggaactggtaaaagagttcaccggagattcttctatggtgtagttttcggttgcctgaaagtgcagccagtgaaacaaagtcttttctgtacagatgctggttcctttgtgtggataatgtggcggaataatcagtgcattattttttttgactttaaaaatttcagagccaacgcgaacagtaaggcatccgtattcaacaacgattaaatcaaagcaaggaatccctgcatttctacaggtatgcgtatcgccgggccggtaaatagcatttccggaaaaaaagtaatatggaaatggcggaacctgaatgttaataaaagacaaaataaatccccctttgaacaaaaaactagtcaattttataaagccttttatggattcggctttaggaaaagctaaaataattatataaataatatgccatatcacgtgaaaaacgtcaagaaagaggtttttgaaaagttaatattctgatagttttgatgctaaaaatcttataaaacaggatgagaaaaatatataaaatgcgtgtaaagaagcctataattcagctatatttattgaatattcataaataaatttggaacggaaaaaagaaaaaacgaaaaaataacgaaaaaagcaaaggaaggaaacgagaattatgaagaaaaagatagtgagcggattattggcaatggcaacggttatgagcatgtcgggttttatgattccggcgcaggcagcggatggaggtgcactggaagtatgggtaagaaatacatactatgatgagatggtggaagcatcaaaagcatttacagaaaagaccggaattcaggtaaatgttacagaaccgtcgaatatgtccgatgatctggcgctggcactttcctccggagatacgccggacgttgtttccattgattgtgtactcgctccgtattatgcatcgattggcgcactgaaggatattaccgaggagtttaatggtctggaatataaggatactttttctggcggattgctggatcttacaaattatgaaggtgaacagtatgcagttccatttgcaccggatttaagtgtgttaatttataataaggatatatttgaggcgaatggactggatccggaagcaccgccaaaaacttgggatgaactgattgaagcggcaaaggcctgcacatcggatgactgctatggttatgtattcgcggctgcggatgcaggcggaatgatgtttacctttggaccgtatatctggaataatggcggcgagtttacgagtgaagacggatctgagtctcttctggattctccggaagcaattggcgctctgcagctcatcaccgatatggtttatgagtataaggtaacaccggagagcattacttcctacgacgggacggcagcggcggatgcatttaaggcgcaaaaggcagctatgatcgtgcttggaagctctgcagtaggagatattgtaaatgataattacgatttcaaggcaggttgtgcgctgattccttcttctgacggaacaaattatgcatcgttctcaggtggagacagcattgcaattcttgcagatacagatatgccggatgaagcatggcagtttgtagagttctgcttatccgaagaggtacaggttggccagctggcagcttccggaaacattccggcaagatccgatctgtttgataatgaaatttatgcagggcatccggagtatgatgtattacgccaggcactggaggtcggcaaagcaccgtatagcttgaaatataacgagatgtatactccgtggttggatgcagtacagtatgcactgaatcaggagaagactccggaagaagcaatgaaggacgcaaaggcagaaatcgacgacattttggcagaataatcgtttcattcagagcacattcagagatagaaagaggagtgaaagcgggatgagaaatcacccgctttttcctttcttgctattgtcgttggaaaagaaggagtatcaagattatgaaaacaaagcgtgccagatatataagaaaacggctgtttaatatggcgtttattttgccattgctgattgtaaatattaccttttttgtaattccatttgtaaagtcactttatatgtctttgtttgactggaaactgttaggaaacaagctgtttatcggactggcaaactatgcaaaggcatttcaggatccgaaatttctgcattctttgaaatttacgtttcagtatggaattatcgttacaccattgctgtttattgttgcatttattatggcgatactggttaatcagagctttaaaggagttggaattttcaggacaatttactttttgccggttgttatttctatgacagccagtgcggatatctggctctggatatacaatgaattgtatggtgtactgaaccatttgcttatgaattttggaatcatagattcaccaattgcgtggatgcatatgccatctacctcgcttccggcggtctgtattatggtcacgtggaagatgtcaggtttcagtatgctgatgctgcttggagcatttcagtcaattggggatgatatctatgaggcatcaagtattgacggagccaatgcgatccagcgctttttccggatcacgataccgatcattcgaccgaccatcggattatctctggttatttctgttattggatctgttctggcttttgagcagtttaagatcatgacagcaggaggaccatcctctaaaacgcagacagcagtttattatatttatgaaacctcttttggacattacaaatttggatatggagctgcgatgtctatgattctactgatcattctcgctgtgctgagttatttccaatttgcagtgatgaaagattctacgaactagagaaggggtggggatatgaagcaacatagaaaaaagacgattattattttgcttaatgtgattctgggaattctgtggctgttgccaatttactgggcgtttgtcacttcagtaaagaccgataatgaaatttatagcggaattacattaattccgaaaatatttacgagtgtgaattataaaacgctgtttgaatacaaagaggggatcttttttacctatctgaaaaattcagttattgtttcactgatcagcacggcagttgtgactttgatttcgattttggcaggatttgcgttttcgaaactgaaaatatgggggtcaaagatctggatgacgatgacgctgttcacgattatggtgccggtacaggccttgatggtgcctctgtataatcagctctcggcgctccaccttttaggaactcaggcaggcatggttctgatttacgcaacattccagacacctttttgcgtttatatgatgaaaaatgcatttgatgcagttccggtagcattgcaggaggcagctacaatcgatggggccagcaatctggcaatattccgcagcatttatctgccacttgcgcttccgggggcagtgactgtactggtatattccgcatacaatacgtggaatgactatgtgatcggtctgacctttggcgggagtacgatgaagacctttaatgtcggtctggtagacatgctcagcaatgatgagacaatcaaatgggggacactgacctctggttcgattgtaggaatgcttccgatcctgatcctgtttctgtttttacagaaatattttgtaaaaggcatgatgagcggtgcagtaaaataaaaggagaaaatacgatgggaaaattagaaaaactgaaattgacagaaatccatccggagggatggctgaaacggcagcttcagatccagatgaatgggctgaccggaaaattgtacgatatatgggacagtgtcgggagttattccggatggctgggcggcaccggggaaagctgggagcgggcaccttattatctggatgggcttgtaccattatcctactatcttgaggacaaagaacactgggagttgtgttgccggtttattgaatggacgttaaacagtcagcaggaagatggaaatttcggaccgaaggtgaccttacatgagcagtggtccaaattcgcaatgttgaaggtattgattcagtatgaggaaatcacaggagatgcaagagtcatcccgtttgcggtcaattatctgcagtatattgcagatgtatcgaagaaaatcaaaatcagagaatggtcagaggcgcgtattccagatttgctgtatgtggccaagtgggtttatgacagaacgaaggagaaaaagatattagatctgatgagacagattgaccaggcaagctttgactggtgtgattatctggaacagcttcccttcccaagaccggcggcttactatatgaactggaaattatatgaggatcaggtcagcaggacagctttggaggacatggcaccctatcatgcgacgcatatcgtaaatgttgcgatgggactgaagcatccggcggtgaggaacgtatacgcaggggagacagagtattatgcgagtgtggcggaaaagggaatcggggatctgatccggcatcatggcgtagcctccggctgtctcaatggagatgaacatctggcgggaaataacccgtctcagggatcagagctgtgctccgttgtggagtatatgttcagcttgcaggcattgcttgagtcctttggaagcactgcttatgcagatcagatggagcggctggcgtacaatgcgttaccggcgaccattacggaggattttatggcgcaccagtatttgcagcaggcaaatcagattatggcagatgatacggagcgcccgtggttcaataacagcaaagagtccaatatgttcggactggagccgaactttggctgctgtactgcgaatatgcatcagggctggccgaaatttgtcaattccctgtggtataaagaagattcaaatacagtagtgagcatgtgctttgcaccaaatacgctgaaaacgcggatagccggggaagaaacggtgattgaactttgtacggaatacccgttcagggatacgctttcatatcagattcagaaagcgccaaagaaagcaattactgtgaagataagagttccgaactggtgcgaagactttacgattgcctgcgctggtgcggaaatcgtgacagacaaagcagctcgcatgatcgtggttacgaaggcattccaggaaggagatcagatagaagtccggtatccaatggaagtgacgtattctacctggtatcacaaatctgttgcagtagagcgcggtccgctcgtatatggattaaatatgaaagaaaagtgggttgtgaaaaaagaggtggctggggttaaggattattgtgtttacccggaaagcgactggaactatgcgattgcccgtgacagaggcagcgtggatgtccgcgaagcagaaatttctgagacgccattttcaaaagaatttgcaccggtgcatcttcaggtatcagcgaaaaagctggcaaagtgggggttggatggaggaaatacgatggatcttccacctagtccggtgaaggcaaatgtcgaagaggtaaagatcgatctgattccatttggttgcacaaaactgcgtatttcacagttcccatattatgaggctaaagaggattaagcaggcatatgaaagaaacgaagataaaaaatgtagggtttgagaatattgcgattacagatggattctggaaagaaaaacaagatttatttcgggatgtgacgctggatgcaatttatcagcgtttcaaagaaaccggacggtttgaggcactgaagtgcaattggaaaaaaggaatgccgtttgaaccacatatcttttgggaatcagatgtgacaaagtggattgagggtgctgcgtattttctccagaaggaaagagacgcagaattagaagccagaatcgatgcattggtggaagatatgtatcattcccaagaaaaaaatggttatttaaatgaatattttacagtagtggaaccggaagcacgatttacccgaagaacagatcatgaactgtattgtgcaggacatttgattgagggggcaattgcatatgcagaggcgaccggtaaaacgaggctgctagaggtggcggaaaaatatgtggcattgattgatcgtgtgtttcgggtggagcactccgctgcatttgatacaccggggcatgaggaaattgagttggctctggtgcgtctgtatcgctatgccggaaagaaggaatatctcacacttgcttcttattttattgaaacgagaggaagaagtacaagggatacctgctatgagtttgcggatcagaaaaatatgcagtcacaccttccagttcgggaacagaaaaccgcggaaggacatagtgtaagagcattgtacctgtattctgccatggcagatattgcaatggaaacaaaagatcaggaactgttagatgcgtgtaaaacgttgtttgagaatattacgcagaagcggatgtatattacaggcggaattggttcgacaaaccgtggagagtcttttacttttgattatgatctgccggaatatacggcgtacagtgagacctgtgcttcgattgcgcttgcaatgttctgcagaagaatgtggatgttggatccggacgcaaggtatgcggactgcgcagaacgggccatctataatactgtattgagtggtgtttctttgtctggagatcgcttcttttatgaaaatccgctggcagccgatcccgagcggaatgagtttaacgatgtgcagccagaaggcactcaggagcatcttccgattttgcagcgggtaaaggtgttttcctgttcctgctgtccgccaaatctgcttcgtatagtaggttcgattgcggactatatgtattcggtttctgaaaagacgatttttgcacattgctttatgaatgcgaatgccatgattaacctggacggcgcacgcatttgcctggaacagaaaacaggctatccatatgagggcggtgttgagattcgggtgcagtcggatgctgcgtttacattggcagttcgagtgcctgagtggagcaagacgacggagttttatgtaaacggagaaaaggcggagccggagatacaaactggttatgcatacatttgcagaaactggaaagagggcgatacattgttgcttaaattggatatgcgtgtgaaactgtttgcggcacatccaaaggtaaaggctgtctgcggcagagtggcagtgatgcgtgggccgatcgtttattgtgcggagcagctggatcatggttcaacgagtatgcgtgatgtccggatttcgccaaaggcaacatttgctgtagagtatactgtactgggtggggaaaaaatggcgttgctccatacgacggcagaaaaacggatggtgcgccaagaattgtatcaggagtttccatatcagacggaaaaaatggagcttacgttgattccctatcatgcatgggccaatcgaggcgtgacagaaatgacgacctggctgctggatgaggagaaaggctgatagcaaaagagaagacaggtagcggatgtggttgaacatcgtaacatcgttatcagacataaaatccctgtgcttaccgtatcgtaaaaagctggtgagcatggggatttgatattgcgtggtgtggaatcgatatgctatgatggtaaagaaattaactggatcgttttatttttgaacgcagatcgcgaagcgactgcgttcatgagcaagtagcgaagctaggccctgtcagcagagctgcagggatggattgcgaatgtccgctttactaaagcaaaaatatgattcatacagggggacaaaaaatggagtgctacaaaaaggactacccgcggccacagctggtgcgggacaactggacgtcactgaatgggacgtgggatttttgctttgatgatgaggcacgtggagaacggggcagctggtatcagatgtggccggtgaatcaggcacagacaatcgaggtgccgtttacgtatgagacaaagagaagcgggatcggagatgagagagcacacagacaggtctggtatcgcagaagcatcgaggcggatgctgcacagctgtcagagggaaaacacctctggctgcactttgagggcagtgattttcacacaaaggtgtgggtgaacgggcagtacgtcggcgatcacaggggcggctatgcgcggttttcatttgatatcacaagatttgtaaaggccaaagaaaatgagatcgtggtgaaggtggaggattcctttgatccacagcagccacgcggcaaacagcgctgggtgaaggacagctttggctgctggtatgtgcagacgaccggtatctggaagacagtctggatggaatatgtcccggagatttatttaaatcaggtaaaaatgacgccgcttctgacggattcgtcgctggagctgacttatgatgtggtgcttccggaagagcaaagagatggcagtgttgagattgaggcagagattacctttgacggtattcagatcagccggacacggatggctgtgcttggcagaagtgtgaaaacgcgcgcaaatgtatttcatccggcgctcggcggcatggagtggggtgtccgggagtggacaccggaggatccggccctgtacgatatcaggttccgtgtgcttgtgaacggagaagaaacggactgtgccggctcctattttgccatgcgagagatccggattgacggtccgaatattttgctgaacgggaaagtgctttatcagaggctgattctggatcagggctactggaaggatacgcatctgacccctccgtcagaggaggcgctggtcgatgatatcgaaaaaattcgttcaatgggctacaacggattgcgcaagcatcagaaaattgaggatgagcgtttcctttactggtgcgatgtgaagggcatgctcgtctggagtgagatggcggcggcttatcagtattcggatgaggcggtaacggaatttacgcgagagtggatggagatcgtacagcagaattacaatcatccgtgcatcatcacatggacgccgatgaatgagtcgtggggtgtgcatgagatcgagacagatcggatgcagcagcattttacagagatgatctatcacctgacgaagagtctggatccgtatcggccggtgatcgtcaatgacggctgggagcacaccgtgtcggatattctgacgctgcatgactatgaggaggtcggcgagaccttatataagcggtatacagaatgtaaggagcagatattgacgacagaggtatatcacagcagcgtaaggtcggcatttgcaaatggattccgctatcaggggcagccgatcctcatcagcgaatacggcggcattgcatttaataatgatggcggctggggctatggcaataaagtgagcacaaaagaagagtttctgcgccgttttgaggatatcacgacggcagtcaagcggattccgtactgctgtggcttctgttatacgcaggtgagcgatgtccagcaggagatcaacggccttctggatgcagaccataattacaagctcccgcctgaggcaatcagagaaatcaatgaacgcaaggtggggtattggaggtcagagatgtaataaatccctcttgcgttttccacacaataccattatagttattggtaaagactacaacagaaaatggagggactgcaatgcagctgcttaaggaccgcatccgtaaggatggaaaggtaaaagagggaaatgtactgaaggtagacagttttctgaatcaccagatggatatccggctgttccgggagatcggaaaggaattcaagcgccgctttgagggaaccaagatcaacaaaatccttacgatagaggcttctggtatcggcattgcctgtatcgtagcggaggagtttgatgttccggtcgtttttgcgaaaaagacacagacgaaaaatatcgcaggagaggtttatcgttcgcaggtagagtcttacacgcacggaagaatttatgacatcatcgtttcgaaggagtttctcggaaaaggggacaaagtgctcctgatcgatgatttccttgcaaacggaaaggcactggaggggctgattgatctggtacaagcagcaggcgctgaggtcgttggtgccgggatcgtgatcgagaagggcttccagccgggcggagacatcatccgcggcaagggcatacatctggagtcactggcgatcgtggagagtatggacgacaagaccggagagattacattccgggagaaataatcagaagtgagggcgctgtgttttcgtggcgctcttttcttctttgtatggggaaaggatttgtaatgggatgccatcctgcgaaagaaaggacgaaatgtgtatgaacgcggcgaaaattgatttacatcttcatctggacggctcgctgtaccttccatgggcatggaaaacggcagtaaagcgcggtgttgtggaggccgagtgtacgtttgaggaatattatagccggtttcaccggagaaatttcaaaacacgtgaagagggaatgaagcgatttgactttccagtcgatgtgatgcagacgaaagaggatctggcggatgccgcttattatcttgtacagacgttaagcattcagcagatgttttatgcagagatccgatttgcgccgcagcagcatacaaaatgcgggctgacgcagcgggaggcggtgcttgcggtgtgtgacgggctggaacgggccaaacaggactttccggatatcgataccggtcttttgtgctgcctgatgcataagggagaaaatgcgcatgtaaatgaaaaagaaaattttgagacagtagaagttgtccgagagcttctttctgaccgtgtgctcggtctggatctggcaggctatgaaaatacaggagattttctgctgtatgcgcctctgttcgaaaaggcccacagctatggtattccctatacaatccatgcaggagagatgggcgaaggagcccatgttatggacgcgcttgcgatgaaggcgaaccggattggacatggaattaactgcattcagaatccggaatggctgcatgcagttgtagagagccagattccgctggagctttgcccaacctctaatacaagatacgagcttgggtatgcggcgcttcctgtccgacagctgctggatgccggggcaaggattacgctgaacaccgacaatatgtcgtttggcaggaccagccttgcgcatgaatatgatatgatgcgctccgtcggaatcagtcagaaagagctgtggcagtgtgcgtggaatgcggcagatgcggccttttgcagcgaatcgagaaaagagaggcttcgggagagactaagagaagaacagaataagaagacagagtgatagaagaaagctcttaaagcagacccttgcgggtgtggctttaagagctgttttatttcgcaggcaacgggtcgggcagatatgcttgtgtggatgtgttaccacaccgtcacgtcgaccgcttcatatgatgctgtatcataggtgacgctggcagtcacgcccggctgcaatgtctcggcggtatcacccatcgctgcgagctttgccgggtcgaaccagaactggatgacattgccatccggctgctggagacggaagtaggtgctcgcttttgtgatgactgtaccgtatacaccgatggtttcagacgtcgtacctgtggagctgctgtttccggaagtactgctttgcgtaccggagaaggaataggtgatgccgttatccttcatgtatttcaccatgagcgcaatattttcattttcacactggttcagtacggtcggatcaaagtcagcggcttcgattgttccactgtaccaggacttgccattgaagtaatcctgtacttcctgaagcacaaatttccgatgatgccgtgcgtaaatttcattgatggccatctggatctgattgccgctcaaagaggtcagatctgaagtgctgattacggcttccgagctgtctgggaaaatatagtcggaagcgctgccgatcgatatatcgtttccggtcgattttttatattcatccttgatgcggatggtgcttacgacctgattcacgccatcgcttaaggtgcggaactcattgagggcatccgcgtcgtctgtgtagccctgcatgtcagtcgcaaagcatacataataatatccggcagccgtttcgccgatcagctggtaagatggaagatcggtgaaatccatgttttccgagaaattgatggaaaagaggaagccgccgttttcatagccgagactggctgtccagagctttcgggactgaatgtggaaaaaggaggccgagtccgcagcagtggagacctgacatttcccggcccagctggaaggaagtgtgatctgtacctccttgaagtcgaccaggatatcattttccgcatcccgcgaggttgaacaagaaaagagattttccggaactgcgcctgcggtgatggaagcaccggcgagcatgcaagccgaaagcaatgccagtgataaagctttaaaagatcgttttctcatatgatttcccccttatgacttgtatgtacatttccgaaaacgagttgagaacgctccggaatctattattagcttaacatagaattttccggaaaaaatgaatgtattcttaagaggaaacagagatttttgtaaatcagcagatcggcatgagctcgccagtctcggtattgatgacgaaaccgctgattctgacatcctttggaatcagcggatggttgcggatcgtatcgacggtctcacgcacagaatcctctactgtatcaaagcctgcgagccatttttcaaaatcgatgccacagtatttcatcaggtcgatcgattcctgcgaaatgccgcgattcttcatatggtggatcatcatttcgctgtcgatgtgctgcacgccacagtcggtgtgaccgatgaccaggacctcggtgacacccagctcaatgataccgacgagcaggctgcggatcacgcttccgaacggattcgtcacgacaccgcccgcatttttaatcattttcacatctccgtttttgataccaagcgctgccggaagcagttcgacgagccgtgtatccatacaggtcagaatcgcgaccttcttgttcggatatttgctggcagcatactgctcataacgtttttcttccacaaattttttgttgtaggcaagcatttcttcaatcatataaaatccccctttgctgtctgaatccatgcgaaatggataaaaatggataaatccagtttatcatgaagcaggcggatagacaagaatttagcaggctgttataataaaactatctttgtttccgtgagcaagtagcgaagcggattgtgaatgtccgttttacgatggcggcaggagatttggctttttagaggaggtgcggcatcatgcagaaaatcgcagtcggagtgcaggattttgaaacactgcggataaatggttatttttatgtagataagacagagttcctgcgggagtggtgggagagcggagacagtgtgacattaattaaccgtccgcgccgttttggaaagacgctgatgatgagtatgacagagcagtttttttcagttgaatatgcaaagcagacggaactgtttaaaggactggcgatctgggaggatgctgcatttcggaaacttcagggaacttatccggtgatttttcttagtttctcgggagtaaaagaaaactcctacaaagaggcaaggaaaaaaatctgccgtctgattcagctgttgtaccgaaggtatgcatttttgctggagggagatcttttaagcgaacaggaaaagaaggagttttatggaatttctgcggatatggagacgtatgaggcatcgctgtcgcttcagcagctctcgaattatttgagccgctattatgggaaaaaggtaattttcctgctggatgaatacgatacaccgatgcaggaggcgtacgtggacggattctgggacgaaatggtcggattcatgcggaatctgttcaatgcaacatttaaggggaatccttatctggagcgggcgattctcacggggatcacgcgggtgagtaaggagtccgtgttttctgatttaaataatctcaaggtcatcacgacgacatcagaagaatatgcggataaatttgggttcacagaggcggaagtatttgctgcactggatgcaaatgggtggtcagatcggaagcgggaagtaaaggactggtacgatggattttcttttggaagcaagaaggatatttataatccatggtctatcatcaactatctggatactggaaaattccgtccctactgggcgaatacgagcgcaaacagtctggcagatcggctgattcgcgagggaagtgtctgggtaaaacaggattttgagcagctcttgcggggagagagcctcaaggtacaattggatgaggaaatcatttatgatcagctggggaaaaatgaaggagcagtctggagcctgttgctggcgagtggttatctgaaggtagtgcggaccgagtatatagagcggaccggaagaacagaatactatcttgcgcttacgaatagagaaacgcggctgatgtttgagacgatgatccaggaatggttttcacagggagaaggcacttacaatgtatttctgaaagcgtttttgcaggatgatctcaagtcgatgaacgtgtacatgaatcaggtggctctggcgtcgttcagttattttgataccgggaaaaaggcggctgtggatggcgcaccggaacggttttatcatggctttgtgcttggactgatggtagagctgggggaacgctatgttctgacctccaatcgggagagcgggctggggcgctatgatgtaatgctggagccgcggcggaaggaagatgacgcaatgttgttggaatttaaggcgctcgatccgtcggaggagaagagccttgcagatacggtggaggcggccctgcggcagatcgaggagaaaaattatgcagcggcattacttgcaaaaggaattccgaaggaaaaaatccggatgtacggttttgcatttcagggaaaacaggtgctgatcggagggcgaaggatgcactgagacaggatttatacatccgtttcttctccctcgtttgcctgctccatgacgatagtagcctgctgtgggttggcgacgtattcgacgtgcaggacggcctgcggccagttgagactgatgcagggcatcttctgacgctcagttccggctttggcgatctgggcgagcagttcgtcgagtacggagcgggtgagatagccgcccttccagtggaaggtcagaggtttttcttttttggcggcctgcagtgcgcgccggtagacatcctcggttttggcaaaggaaagcttcttttccttatagtaagaatgtgcgctgtcggtacaggccggggccggtgcgatcagcggctcgtggtcacggaaaatctgtttgtcatccagattaaaatagtcgtatcggatccgggtggaggcgctgcctttctttccggactttttgttgccggggatgggatgctgcgcgatgtcgccatgggtggctcctgcatttccggagtcggatgcggtattagaagcatgcgaatagtttcggccgagagaattgtcgaaggtcgcatccagatgatagtagctcttgccgattcggacgatgttccaggtgtggcggtacttgatgcctttttccggattgttgccgctaagggcgatcatgcaccagataccgagtgcgtcgcagaggcatttgacagtctttgcgatgccctcgcacacgccgacgccctgcccgagcgggccgatgatctcgtgagagtagggctttttcagcttatcgtaatgtacattttcacagataaaatcgtgaatatactgctccttttctgactctgacaggtctttggcaggccggatgagcttatcaatccgggcgcgcatcgcctgctggtgttcccggattttgcttttttcaaataagtagtccggcagaaagagaaggtttggagagtcctgataaaagcggtatttgtagccggtcgcccagaagatttccggatgatcgagacgcagccggaaaaaaacgtcgtagagctcttctgctgacaggcgcggaagctgaatctcaggggcgagctgattcagtccctgcagcatactatgataggccgcctgctgcgggcgggacattttactgtaataatatggttccatggtggtacttccttttcagttatggacaggcagcgaaacaggttgcgaatatccgtatgcctgtcgttatcatatcacgttgctgtaaatctgcgcaatcccccaaacctgtgctggatttttaccgggaaggggtttatactgtgtgtaaccagttcagcgtggcaacaggatatcagatactggcaccactgccggatatgcggaatgaataacacacaaaatggaggatgcaacagatgaaaaaattaggattcggaatgatgcgcctgccgcttctcaatgaggaggacaagaagagcatcgacaaaaagaccgtctgtcagatggtggatacatttatggagcgtggttttacttattttgatacggcgtacatgtatcatgagtatgaaagtgagcgcgcgatgaaggatgtgcttgtgacgcgcaaggaccgcgatagctatacgctggcgtcgaagctgccggtcatgcagctgaaggaaaaagaggatatggagcgcattttcaatgagcagagagaaaaatgcggcgtggagtattttgactattatcttctgcacgcgctggatgcggagcactataagaccgtgaagcgtctggactgctttggatttgcgatgcagaaaaaggcagagggcaaggtaaagcacgtcggattttccttccacgacagtgcagaggtgctcgatcagatccttacagagcatccggaagcagaatttgtacagctgcagctgaactatctggactgggaggatgcaaaggtacagtcccgcaagtgctatgagacagcggtaaagcatggcaaaaaggtcgtagtcatggagccggtcaagggcggtacactggcaaagcttccgaagaaggcagaagatgtgctcaaagcactgcatcctgattggtcagctgcttcctgggcgatccggtttgtcgcaagcctggagaatgtgatggtcgtactgagcggtatgtccacaccggagcagatggatgataatacagcatatatgaaggagtttgagccgctgaccgagaaggagaagcaggtgctgcttggcgaggtcgttgacagcatccacgaggcggcaaaaatcccgtgtactgcctgccggtattgtgtcgag

SEQ ID NO: 4409 - DNA, 2174 bp, Unknown
  16S sequences of unknown bacteria
gaaagccgtgagcctcgcgacaaggggcaaagagtgggcgcggcgggccagacatccgccgggtcaaacaaggtggtaccgcggaattcaaccgtccttgggcaatacacatgcccgaggacggtttttttgttaccgaaccgggccgcgcatccgcaacatcgggcggcgtcagccgtcccggagcgcggatgtgcgagagacgaaagggaagacatgagtctgattgatgatctggtcaaactcgaggaagaggccaaggagctcgtcactagcgctgacgacgccgccaagctcgaggccgcgcgcgttgagctgctcggccgcaagggccgtatcaccggcctgatgcgcatgatgggcaagctcgctcccgaggatcgtcccatgatgggcaaacgcgccaacgagatgcgccagctgatcgagggcatgctcgacgagcgcaccaccgagatgaaggccgccaccctcaagcacgcactcgagcacgaggccgtcgacatcacactgccgggcatccgtccgcagatcggtcaccagcacctgatcaagcagatcatcgaggaggccgaggacatcttctgcggcatcggctacaccgtcgagtccggccccatggtcgatacctcctactacaacttcaccgcgctcaacgcgcccatggatcacccgagccgctcggctcgcgacacgttctatgtggtcgacaacaaccccggcagcgtcgcgcatcccgaggctcacgctcacggcgagtccgacgtgctgctgcgcacccagacctcgggcgtgcagatccacaccatggagtcgcagaagccgcccatctacatgatctgcccgggcaccgtctaccgtcccgacacggccgacgcctgccacctgccgcagttcaaccagatcgagggcctggtcgtcgacgagggtatcacctttggcgatcttaagggcacgctcgactactttgttaagtgcatgtttggcgaggatcgcaagacgcgctatcgcccgcacttcttccccttcaccgagccttcctgcgaggtggacgtgagctgccacgtgtgcggcggcaagggctgcaacttctgcaagcacagcggctggatcgagatcctgggctgcggcatggtcgaccccaacgtcctgatcaactgcggcatcgaccccgagaagtacaccggcttcgcctttggtattggcgccgagcgcgtcgcggcactgcgctacgacctgcccgacctgcgaacgctcatgacaggtgatatgcgcttcctgaaccaattttaggcttgcccaggcaccccatcttggcgttcaaaccgtcgctcgcgtacctttagtacgcgtcgctcctctttcacgccaacctggggcacctggacaaccctaaggcgaacgtcttcatttgatattcctccctttgcggagattaagaactaggagagctacatgcgcgtttcttacgactggctcaagaccatgatcgatattccggaggatcccaagaccctttcggacgaatatatccgtaccggcaccgaggtcgaggcgatcgacaccgtgggcgagtccttcgaccacgtggtgaccgccaaggtgcttaccaagaccccgcaccccgatagcgaccacatgtatgtgtgctcggtcgatgtgggcgacaagaatctcgacgccgatggcaaccccgccccgctgcagatcgtctgcggcgcgcagaacttcgaggccggcgaccacatcgtcacggccatgatcggcgctgtcctgcccggcgacgtcaagatcaagaagagcaagcttcgcggcgtcgtgtccatgggcatgaactgctccgcgcgcgagctcggcctgggcggcgaccactccggcattatgatcctgcccgaggatacgccctgcggcatgccgtttgccgagtacgtgggctcgagcgacaccgtgctcgactgcgagatcacgcccaaccgccccgactgcctgtctatgatcggtatggcccgcgagaccggcgccatcttcgatcgcgatttccacgttgagctgcccgccatcaaagccgagaccggccgcgcgaccgacgacgagctttccgtcgagattgccgacgagggcctgtgcgaccgctacgttgcccgcatcgtgcgcaacgtcaaggtcggctcgtc

SEQ ID NO: 4410 - DNA, 1966 bp, Unknown
  16S sequences of unknown bacteria
ggatatcaaagaattcgtctttggtcagatattcgccctcggtatattcaatgccaaggttcttgagccactcctcgtccaggacgaagccgtccgcgcgcatgactgtggagcgcggcataccccagatacgaccatcgttgaaaatatccagtgcatcccaggagacatccgctgtgtgcgccatgatgttttcatagttcggcagcagaccggaaatatcctggaagatgccgccctcgcagctctcagcgaaaacgtcgctcgttctccaggagtccggaaggatcacaacgtccgggcggtcgtcgctcaggacgagcatctgaagcgtatcctcgtatccggaggaaggcggaagctgccactcgatcttcacattcagcttttcctcgatgccctccagccacttctgtccaccgggcttgatcgtatcaaagttcgccatgatcttgatcgtgaccggctcttctgcgggtgctgcatcctctgcaggctgctcgctgctgtccttcacggcatccgcgttgtccgccgcaggctgttcggattcattcggggtctccgtcgccgtctttgcgcagcccgtaaagagtgcggaaagcatcaggatcgccagaagaagcgcaacacactttttccagtttttcatttgtttcctcctacaatttgtttatttatgatgggttttccccagatcataccggaaacggtcagccttttacgccgccaaccataacgcccttcgcaaaatatttttgcaagaacggatatacacacatgatcggaactgtcgttacaacgacagccgcatactggatcgttttgctgccaagctttgaagcaagcgccgcagcagcaggatcgcctcaagaatcgctgtgctcgcctcagacatgatctgcttcagcaccatcgcaaccggccatacatcccgatcaagcgcacagtaaagctgcgctgcaaaataattgttccagtagccgaccgcaagaaacagcgcgatcgttgcaagcacaggctttgacagcggaagaatgatcctgaagaagatatacggctccgatgcgccgtcgatctgcgccgcctcaatcagctcataggggatctggcggaaggagttgatcatcaggatacagttgaacgcgctgaacgcatacggaaagatctgtgcccaataggtattcagaagcccaagctcctgcatattcagataacccggtatcgtacctgcgttaaacaccattgtgaaaatgatgattgccataaacagcggcttccatctcagctccttacgagacaaaggatacgcggtcaacgctgtcaatgcaagacctattagggttccggcagccgtcacaaaaatggagttcagatagctccgccagaacatggagtttttaaaaatatactgatatcctgtaaagttaaaaacctttgggaacaccatccatgggcggcttaaataatcccggttgtctgcaagcgagaccgcgatcacattgatgatcggatacagcatactgaatgcgatgagtgtgataaaaatatagatgatcgtgttgaacactctatcgccagtagtttcccgtatcttttgagatttttttgctgtgccttggctcaccacagtccgctccctcctgtttttttcgaaatgaaattagaaacaaagaccatgatgcagccaaccaccgattggaacaatccaattgccgtaccaaaggcaaatcttccctgcttcaagcccactgaataagagtatgtctccagaacctccgaaacatcgatattcatggagttctggaacagcagcgtctgctccagaccgttattcaaaatcgtccccattcgcatgatcagcatgaccgttaccgtactcagaatgcacggcaaaaatatgtatcggatacgctgccagcggttcgcgccatcgatcatggctgcttcctggatcgccggatcg

SEQ ID NO: 4411 - DNA, 3079 bp, Unknown
  16S sequences of unknown bacteria
cgatcgcgttctttctgccgttgatggcgattcaggtggcggtggggctgtatttcccgacgtgggcggcgctgatcgtgaatttcgtcggtatcgcgatagagataaatatcccgtattttctcggtcggaagctgggtttcgattcggcggacaagctgacgaagaagttcccgaagctcggcgagatgctggagggcgacgggagccggtggtatatcgcgtacattctgcgggcgctgaatatgctgccgttcgaccttgtgagtatgtatctcggttcgctgaaatacccgtatctgacgtatttttcgggcagcatggtgggcgcggcgttcggcgttctctccgcgacgctgataggaaggtcgctgaccgacccgacctcgccgatgtttattttttcgtgcgtgctgtcgtgtacgatcgcgggggcttcgtttgttatgtatcggaggattaacaagaagaaaagtcagtgacgataatatggaatataaacgacatttgccggaaagaaaaaagaatcgattagagaattttgattatagctcctgtggtgtatatttcattactatatgcacagcaaacaggcggaactatttctgggaaagtggcacaaccgttgtaggggcgaccattggtcgcccgccaaactatggattatccacaaacggtcatattgtcgcagaagcaatcaatgagatttcgtccaaatatccgaccatatcaattgtaaattatgtgattatgccaaatcacgtccatattttgcttcggatttgtgccgatgaaagcgggcgaccaatggtcgcccctacagtgtcgcgggtcgtccaacaatttaaggggcttgtttccaaaagaataggaaccgcaatctggcagaaatcttttcatgatcacctgatacgcaatcttaaggatttcgcagaccatatgcggtacattgatgagaatccggttcgttggaaatatgacgaattgtacagagaagaataagctaaaggctgaccgtcggtcagcctttagtaattagttcatttcttcaatatagtaaacgtagtccaaagaactgatcgcctgaataatctcactatgcgtcttatatttcttaagctccggactgcaaatagtcattgacaccgagaaaaccgcgagccccgacccgatataggcggggtttgactcaatgtcatcaattctgactccgagccgtctgagtgtggtgacgaagtcctgcaagtgtgctttatccgtcagttcgaggtggacctcaaagtggttcgaccggtttttgaggtatatttcgaagtccgggaacagcgcgaggcagcagagcatcgcggcgaacccgacgaccgcggcggtgtacagcccggcgccgaccatgattccgagcacgcattccgcccagagcgcgaccgacgtcgtgagacccttgatctggttcttcgacgagtacagaattgtgttcgagctgatgatggcggacccgatgagggcggcggcggagatgagcgccatgtccgcgccgaatttcacgcagacgaattcgtcagccatggccgccatagcggacgcgagcgagacgagcatgaaggtgcgcagcccggcggcgtgacgtttcgcggcgcgctcacagccgatgacggcggcgaagagtatcgcgatgagggcgcggaagatgatggacgccggtgtaagcccggtcgcccagtcgccgagaagcgacgcgatgggatcgatcatgaaattcttcctttctgtaagtcagctcacagccgtctgccgagacgcccgcgcatcgcggctcgctgttcctcggcggcttcggtgaaggcttcttcggcgtccgagacgtagcctttgtgcggcgggagctcgtgctggattttctggatgcgttcgatgaggagctcgacttctgttttgtgcttttcttcggtttccgggacttcgacgacgtcctcgagctttgtcgagtaggacttcgagagcgagagcgagagcttagccattgccggtccgatgagctcgtagaggacgctggacgcgaggattatcgtgttgagcgcttccccgtccgcgccgccgagcgttctggctccgagcgcggcgagaccgatcgctacgcctgcctgcggaatgagcgcgagaccgaggtaattccggatgctcttggagctttttgtgacgagcgcgccggagaacgcgccgatgtatttaccgatgatgcggacgaagaagtagacgacgccgatgatccagagcgggtattttccgccgttctgccccgccccgaacagcatgtcgagcttgaacccgagccccgagcggacgaagaagatgagcagtatcggcggggagaagtagttcagctgcaagaacagtttctcgtctccggtcatgtttatgtaaaccgccccgatgaccatgcacccgagaagcggcgagacgtcgagcagcgcgcagaacccgcagaagcagaacagcagcgcgacaaggatgatgagccggttgtcggtcgagcgttttttcggcatgaggagcttcagaagcactccgccgaccgcgccgaccgcgatcgcgagaatatttttgagtatcggaacagtaatcgcgctgacgttgacgttcccgccggacgcgaccgcgagcgagagcgagatcgcgacgctgtacgcgacgagcccgacgacgtcatcgaacgcgatgacttgcagcagaacgtcgacaaattcgccttttgcccccgtctgccggatggtcatcatggttgacgccggagcagtggcggcggcgagcgcgccgagcacagccgagaacccgaaatcgagcctgagaatgaagtagcagacgccgaaaacaaggatggtagccgcgagcgcctcaaaaacggtgatgattacgactttccgtccgctcttcttcagtgtgtcgagcgtgaagaattcgccgacgccgaaggcgatgaacgcgagtgcgatgtccgagatgaagtcggtgccgtcgatgatcgactgcggcacgaggtcgaggcagtacggaccgagaagcatgccggtgattatgtaag

SEQ ID NO: 4412 - DNA, 2127 bp, Unknown
  16S sequences of unknown bacteria
attatgcatttgtggaaagatctgtaaaactgtttgactgcacaagtgtcgaggaaatgcttgccgcagcaaaaaaaagactggaggagagtaaaggtcagaagctgacctggctctactgcagaggctggaatgaggagcattttgataagccgcgctatccgcataaggatgagctggatgcactctcaacggaaattcccatcattatggtgcgtgtctgcgggcacgtggctgtgtgcaacagctgtggtctggagcttctgaaaaaaatcccggagtttccggagattgagaaggaggttgatcttgataccggacttctgaaggagaatgcagtacagttttattcttccgtattggaagcaccatcccaggaagaagtggaaggctacatcagatacagtgcgaagaaactgaatgaatgtggatttacaggtgtacagtccgatgatcttgcctcccttccgggaaaaaactggcgtcggatcatggcctcctacaaggcactggatgccagaggagagctgagtatccgccattatgagcagtgcctttttgagcgggcggaggatgcgaaggcttttatcgaggaaggatatcgtaccgggcagaggggagatcactttactgttggaccgatgaagctgatacaggatggttcccttggtgcaagaacagcggccatgaatgagccttacgaggattcgccggaaaataccgggatcatcacattcagtcaggatgagcttgacgatctgtttgctttttttgaccggcatcagatgcaggcggcggtacactgtataggcgatcgtgccatggatatggtcattgaggcagttgcgaaatctccttaccggaaggataacaaaaagggcagacatggtatcgtgcattgccagatcaccaatccgcgtattttgcagggtatgaaagaccaggatctgctggcatatatccagccggtatttatcgatctggatatgaacacagtggaacctgccatcggcgcacaacgtatggataaggtgtatgcatggaagagtatgctggatatgggaatccatacgtccggcggctcggatgctcctgtggtaagctttgatgcaatggagaatatttattttgcagttacccgtaaaaatatcagcggtcagccacaggaaggctggatcccatccgaaaaaatatccgtagacgaagcggtgaagctttttacaaaaaacgcagcttacgcttcctatacagaagacgagaacggaaccatcgaagtgggaaaaaatgcggacttcgtagttctcgagaagaatatctatgagatcgacccggatgagatcaaggccacgaaagtggatatgacagttcttggcggtgagatcgtttatgagagagaagtagaagaatagcggcagtataaaaagaaaaaagtgagaggcagagtctgagaggagcaggctctgctttttttgatttcagtaaaaatatagaacaagatgtataccataacggtgaacaaaattcgtcgaagaaagcagtaacattgttacatggaaaatattgattgagaaacgagggtaaactggttataataaaatcaagaaatttatagtattatcagcagaaaatgaggtgatgatgtatgccaaagattatgcaggatttaattaaacagtatgtggaagaggtcaagaagatttatggttcccatgtacgtcagataatcctttatggttcttatgcaaggggtgacttccgtccggattctgatgtggacattatgattctggtagatatgtcagatctggaattaaaggcatatgcacaacagctctcgtacatgacctatgactttaatatggatcatgacacggatattaagcctattgcaaaaagtgaagcacattttaacaagtggattgtgaactatccattttattccaatattcataaagaaggggtagttttgtatggagcagcataatcaggaaatcggtactagacgggatctggtgttatatcgtctggaaacagcccgaaatgatctgaaatcagcaagagcattgttttctattgaaaactgcgcgtcgcattctcgttactttagtgatgagttagacgcgcaat

SEQ ID NO: 4413 - DNA, 7887 bp, Unknown
  16S sequences of unknown bacteria
cgggcggcggcgcgctcgggtcgaggcgcgcggccatctccgcgcaaaagcgccgcgccgcctccagggccagggcctcgtccggctcccggcgcgcggcgaggaaggcgatgtgctccgccgcgcgctgcgagccgacctggccggagttgagcgccgagccgcccgggcgcgcggcgccaaacgtgcccgcgctctcgcccgcggcgtagagaccctcgacgctggtctgccagtgcgcgtccacggccaggccgccgttgtggtgctgcgcacagacggcgatctccagccggtcgcgcgcaaggtcgatgccgtggctgcggtagagggcgatggcctgcgggttcatgcggcgcagccgctcgatgggcgtgggcgcgagcgcgcgggagcgctccaggtactcccgcgcctccgcgcccatggcctcggcggagaaccccgcggggtcctgcgcgtagtccaggtacacgcgccggcccagctcctccgtctcgcggtaaaccgcaaggtccacctgggaggactccgccgcgcgggcgctgtcaaagggccactcgtaccccttgcggaagaccatgcgcagggcgcgcgccgcgccgcccagcgccccgggcaggaactcccgctccacgccctgcgcgtccacggagacatagcgcggcaggacctgctggtagctgcccgagaggttccagcggaaggccgtgctggcgatgccgtactgccagtggttcaggttgcacccctgcgccccggccagcagcgcggcgcccgtgcacccggtctgggagggcggatagaccgtccgctcgtagaccagggccggcccgcccgtgcacagcaccacaaagggcgtcaggaagagcgtcaggccgtggtcctcctccccgaggcggtccaggtccagcgcgagcaggccgtgcacgcgccccgcctccacgatcaggcgcaccacctgcatccggtcgcacaggcgcgcgcccctttgcagcgcgctccgctccagcgcctcggtcatggcgcgggaggtgagcggcccgacggacgtggcgcgcatccgggggtcgttgtccgtcttgtagcccacgaattcgccgtagcggttcgtggggaagggcacgcccagcaggttgagcttcaggaacgcgcgcgccgatcccgccgcctcgcacagcgcggtatcgccgtgcacgccgccgcccgcgaacaggtcgcgcgccatctggcgggggctgtccgccgcgccggaggccagggagagcttgtaataggtctgcttgtcgctgcccgcgttgcgcgaggtgcccgcctcccgcccctcggtcacgaggcagacgtccggcacgccgtaggcgcagagccagtccgcggcgttgtacccggcgcagcccgtgcccaccacgagcgcgcccgcgcgaaggatctgcatctccttcccccccttctcacaggcggcgcaggtggaagccgccgtccgcgttgagcacggtgcccgtgccaaagtccagcaggcccgagcacgcggccagcacctggtccgccacgtcctccggctggccgaagcgccggatgggcgtcacgccctcctgctcgatcatgcggcggtacttgtccgcgacgcccgcggtcatgtccgtctggatgatgccgggccgcacctcgaagacggggatgccctccccggccaggcggtccgcaaagagctttgtcaccatggagatccccgccttggacacgcagtactccccgcgcgagggcgaggaggcgtaggccgagaccgaggagatgttgatgatccgcggccggtagtcgggaatgccctgggcctttcccgcgagcatgcgccttgcgccggcctggcacatgaagaagcagctctccgtgttcacccgcaggagccgctcaaagctctccgccgtggtctcgagcacgtccaggcgctgcaccggcgcgacgcccgcgttgttgacgagcacgtccagccggccgaacctctcctgcatgccggcaaagagcgcctcccggtcctgcgcgttggagacgtcgcagcgcaggtaggcccaagtccccagccgggtcagctccggcgcgatgtccgcggtcgcccgcggctcctccgtcacgccgcacagcagcacggcgtagccctccgcgagcagggccttggcgatccccaggccgatgccgcgccgcgcgcccgtgaccagggcggcgcggccctttccgctcagcgccttcatttcttcgtcaactccttgtagagattcgtaaactccgggtcgcgcaccacgcagcccgtgcggctgcccatgcgcatgagctgggagcacttgccgcaggccacgcagcagcgccggcggtccaatcccgcgcccgagagcaggtcccgcgcaaactccggatacgcaaaggacagccgcccaaagcccgcggcgtccatgagccccgccccgatcgcccctgcggcgagattgcccgcgaactgccggggataggacagggccgatcccacgatctgtacgccgggcaccgcgcgcttgatgccccccacgcacgcgagcatccgcgcaacgcccagaagcgggtcctccggcaggggatagggctgccagtccgccgggcggttgacgtgcgggttgacgtacgggtttccgatggtgatgttgaccaggggcaggcgcagctcgtcccgcaggatctgcgccaggcggatcggctccgcaaggtccggctccaggccgccgccctccgccgcgccaaagccgtagggataggggaacccgtcgtaggcgttgagccgggaggtgagcaggaactccccgtggaccgcctggcgcgccttgcgcagggcgttgcgcaggaagcgcgtgcggttctcgaagctgccgccatacggccccggccgcgtgaaggccgagagcagctcgctgcccaaataccggtggctggccttgatgtccgcgccgtcaaagcccgcgcgctgggccagggccgcggcgcgcgccgtgtcgtcctccgcgcgctcgatctccgcatccgtgacgatgcagctctcgggcaggggcgcgtccttctcaaagagcgggttgttgcaggcgatgcgcggcgcgggcacgccgtccggcttggaatagcgcccggagtgcgtcagctgcagcacgagcacgggcgccacgcccgtggtccgcagggcggtctcccgcatctcgtccgcgaggcggcggaaggcgtccacgttctcctcccgaatccagagctggcgcgggtttgcgcggccctggcggcagacggcgcaggcctccagccagatcatccccgcgccgccagccgccaggcgcaggtagcgccggcgcgtgggcgcgccgggactgccgtccgcctcgctgtcgcagccctccatgggctggatgacgatgcggttggggaccgcatgcgcccccgcctgccagctctggcgcaggcaggaagtatcctctgcaagcggaagctgtgcgccggccttctccgcggcttcgcgcagctcctccagtgttttccaggaaaacatctctctttcccctctcgtccttggttttcttccattgtattccccggcgcgcggcttttgtcgcacaaagccgcgcagaaatctgcaaaatctgcgcatctgcgcctcgagccttccgccgcaggttttgcagattttttcgcagggaatctctatccttaccctttcccgtctgctataatgataccataaacgcacaaaagcgaaaagggggcgaatgcatgcgcaagtatgcggtttggatgagcgattccgacgcgctgacccgcgtctatccggcgcagacgcgcgcgcagatcgcggcgctcgtttcagagctccccggcgacatccgccgggcggactttgcggcgcggcgcgcggatcttcagcgcgcagaggtgatcttctcgacctgggggatgcccgcgctctccgaggcggagatcgcggaatatcttccaaatttgcgggcggtgttctatggcgcgggctcggtgcagtactttgcccggccgttcctctcccgcggggtccgcgtgttctccgcctgggcggccaacgccgtgcccgtcgcggaatacgcggtggcccagatcgttctttccggcaagggcttttaccaggcggttcaccgctatgagcggcaggggcgggaggcctcgagcgcctatgccgactctctgccctgcaactacggcatccgcgtcggcatcctgggcgcggggatgatcggccgcatggtgctggaccgcctgcgcgcctatgcgtacgaggtattggcctacgatccctttgtgtccgacgaggtgctgcaaaggcttggcgcgcgccgcgcgacgctcgcagagatcttctccacctgccaggtcgtgagcaaccacgtggccaacctcccctccacggtcgggatgctggactatgcgctcttttcccgcatgcccaggaacgcgaccttcctcaacacgggccgcggggcgcaggtggtggaggcggacctcgtgcgcgcgctgcgggaggcgccggaccgcaccgcggtgctggacgtgaccttccccgagcccccggccgcggacagcccgctcaacgcgctccccaacgtgttcctgaccccgcacatcgccgggagcaagggccgggaggtcgagcgcatgggcgcctacatggcggaggagtgcgcgcgctggctctcgggcgcgcccacgccctacgaggtcaccctccccatgctggagacgatggcctaaatgcgcagcctccttctcgatctccagcacagccttgcgcaggcgccggagcaccagcacgtgcacctctcctgcgagatggtctacgtgcgccggggccgcgcgcgcttcaccatcgccggggcggactacacggccgggcccgggtgcttggtgttcatctcctccctggaggagcaccaggtccgcgtgctcgccgagccctatgagcgctactttgccattttgagcctgccggagctctcccgcgcatttccgcactcgcccttgacggcggtgtttcgcaaccggccgcagggcttcgtgcactgcgtggcgctgcgcagggacaagccggaggcggacgccctctttgcgcgcctctgcgcggaatacgccggggatcttccctgcgcccgccagatggtcgaaagccttctcggccagctcctggtgctcgcctatcgcgcctgcccgggcgactttgccgtctccccgaccccggccgcaaagcgaatcctcgacgcccagcaatacatggaagcgcacttcacggagcccctgtcggtggcggatctggcggcccgtctctacgtcagcccctgccacctggcgcacagcttccgcgcgcaggtcggatacagccccaagcagtaccttcgcctgctgcgcctctcctatgccaaggagctgttggagacgacggacagctccattgcggccatcgccgtccaatccggcttctccgacgtcaacaatttcatccgcgcctttcggcagtgctacggcgttccgccggggcaatggcgccggaaggcctaaaaaaggaggactttccttgcatacgcctctgcacgatctgcacatccacaccaacctctctgcctgctccacggaccccatgcagacggtggaatccatcgtggactacgccgcgaagcacggcatcgccaccgtcggcatcaccaatcacgtctgggaccgcgagattcccggggcgagcgagtggtacgccccgcaggacttcgaccacatctcccgcatccgcgagcagatcccccgggactgcaaaggcgtgcgcgtgcgcatcggcgcggagacggagtttgccggcggcgtcatcgcgctgacgcgggcgcaccgcgatgcgctcgattacgtgctggtcccccattcccacatccacatggtggggctggtcctgccccgcgaccgcgtgacggacgccgaggtcgccgcctatctcgtggagagcttcctcgccctcgtgcagcaggactttgccacgagcatcgcgcaccccttctgccccatcggccgcacgccggaaaacacgaaggccatcctggactgcatttctgacgacgaatttgcgcgctgctttctcgccgcgcgcgagcacggcgcggccatcgagatcaacggcgattgcctgcacggggaagcgcgcctggcggcgcacgagcgcatgtttgccatcgcgcgggattgcggcgcgacgtttacgctcggcagcgatgcgcacgccctggccgaactggacaacatctacttggcgagcgagctggcgcagcggctgggcctgggggaggaccgcctgctccacatttgaccacgaaaggcgaacggcttgcatgggttgctcctgcaagccgtcttttttcgccaaagtatttcaaaatatattgcaatttcatttcaaaattattgcatactcttcccgctaaaatccgaactcccgcggtcaaatttcgaaaaatctgttttattctcttgcgatcgtgctggcgcttgctatggtgctgtgcatgatccccgcgtccttcgctgcgtctgtgactggccgtgagacgatttctgacaagtcttacgacatcacggtgtttagctgggacaagaatgactttggcaaagagctgggttccgcaaccaacgcgaattccgtgaccgctaattacaactacgaaaccgagaacgacgatattacctccatgttcgaagaggatgccaagatggcgatcgtccgcattgttggctttgatgaccaggatcgtcttgagaatgcggatgatatcgaagttcgcattgatggcaagaagctggaagtcaatgaactggctggctactatccgggtgctgttggctatgtgcctaagtggaatgctgtctacttcccgattcagctgaccaaggcgggatatcaggacagttacctcatcgaggtttctggaacctatgagagtacgaccactgacggcggcaaggtggaaactacctacaccgagactgcgaagatctctgtgaagatggttaacgacgccgagtacaagaacgccaagactgccaccatttccaagattgagagcaatgctcgcaacatggatgcctacatcgttggcagcaagatctaccttgacttcactcctgagggcgaggattactccggttggtacggccagacggtcgatatcaccttcaaggacaataacggcgacctgttcgacgttgtgacctgggcttaccaggtggacaatgataagggcatggtcatgtctcctgttggtggcacgaccgttggcaacaagattggcaagaagctggatgattctaccatgacttacagcattcattctgcggtcgatgatagccccatccagttcactcttgagacctccagcagcatctacgaaaccaaggagtttgacgtcgtgaagcgctttggtatcgttgaggctgatccgaagggtatctactttgctgagaactctaagaccattgcgattggcgaagaatatactcctgtcgtgctgggcgttgctaccggcaagaaggttgatgctaccatcgagatcggtacccgcaccagcgatggtgaagctgttaacgcgcagtatgttgatgtgaccgatggcgagaccgtcattggtactcaggaaggcgttgcctacatcaccgcttcctacaccaccaatgatgacaagacttacaccgcttcttccatgaagatcaccgttaccgccaagggcgcgaccgacgatgatgacgacgacaaggacggcaagacctacatggttaccgcttcctccctgcgcgttcgcagcggcgccggcaccaacttctctcagatcg

SEQ ID NO: 4414 - DNA, 3620 bp, Unknown
  16S sequences of unknown bacteria
ctacgaacccacccccttgggtgggtgtcggtggtgcgggtggaatagtaccagctgccaggcaaatttgccagtgcatccgtgccctgatagccagtgtgcagaccgcttgccgcttcgctgttgcttacgcactgcggttgtggcttgatacctttttttcagggctacaccctgttccgtttcaacgaaaaagacttccgcgacggcggcttgcaagctagcaccctgcgtcgaaagcgcaagcgcagcggcaagcggccagcacaccaggccggacgacggatgcagtcacaagcctgcctggtaccccgtacagtgtgcggctgtactctcgacccccacccaaggggtgggtccttagggcgggacctcccgccctacgcggcgtctttctttccatattctttcttcgccggagaagaaagaatatggcccccggagggcgctagcaagcttgcatggaagaaattaagacgcaaaaaaccaacatcaaaacgcccgcgcgcagcgccaaaaaaaagacctccctgcggccttccccaatggggaagccacatgaaagtcttgttaccacaaaatggcacagctcacaggccgcggcgcggccggggatgttgcgagcatgtcgagaactactccctttgatgtgtggctttatgataccaggggccgcgccgtttgtcaagcacaaaccggcgcagccccggcaattttacagccccaggattgcccgggcgatgttgaagtagaccagcagcgacagcgcgtcgacgacggtcgtaatgagcggcgacgccatcagcgccgggtcgaacccaagcttgtccgccagcattggcagcacgcagccgacgattttcgatgccagcaccgtcaccgccagcgccaggcagacgaccagcgcgacgatccaattcaccccgtccgtatgcagcagcagacagtcgacgagcatgaccttggcaaagcacgccgccgccagcaccaggccgcagagcaccgccacgcggatttccttccaaatgaccttcgccaggtcggaaaatttgatctcattgaggctcagcccgcggatgatcgtgacggacgtctgcgagcccgcgttgccggcgctgcccatcagcatcgggataaacgagctcaggcagatcatggcgtagagctggttttcaaagtaggagataataaagcccgtaaacgtcgaggagatcatcagcagcgtcagccacgggacgcgctttttgaaaatttccaccggctgcatccgcatgtaggacttctccgaggggataatggcggccatcttcttgatatcctccgtggcctcctcctcgatgacgtccatggcgtcgtcaaacgtgacgatgccgaccatccgctcctcgctgtccaggaccggcagggccaggaagttgtatttggagagcatctgggcgaccttttccttgtcatcccaggtcttgacgtgaatgacgttggtgatcataatatccgcaatgaccgtgtcgtcatcctcgcacaggagcaggtccttgacggtgacgatgccgatgagcttccggtcccgggtgacatagcaggtgtagatcgtctccttgtcgacgccggtgcggcggatgcgggtaatggcctcgtcgacgtgcatcgtcggccgcagggagatatactccgtcgtcataatggacccggccgaatcctccgcatagcgcaggatctcattgatgctctgccgcatctccgggtccgcctggctcaagatccgcttgacgacattggcgggcatctcttcgatcagatcgaccgcgtcgtcgacatataattcatcgacgacttgttttagctccgtatcggaaaagccgtgaatcagcagctgctgggcctccggctccatctcgacaaaggtctccgccgcctgctccttgggcagcagccgaaacagcagcggcagccggtcctccggcagcgcctcaaacagcgccgcgacgtccgacgggttcattgtcacgaggatatcccgcagcgtcatatatttcttctcttctaatagtaaggcgatggtgcgctccatcgtacaggtgtattctgccatctcttcctcctgcgtgttataaaactacacggcaaattgttttatgccgcagcgccggataggctccggcgggcaggtctcaggtgcagggcagcgctggaaacttttacaagggccacagccgcaggtgcggctccggctctgcgctgcttcggtctgcgccgttccgactgcctgtgtccattgtgttccctcctttaaatttacgcatctggggaaataccccaactattctatcatacgcggattttatccatttgtcaaagaaaaaaaccacgcaaaacgatgccttttcagaaagccgccggtatgatacaatagaacaaataaatcggcggcctcacgcctgccggaatggagaatttgatatgcagacaagagaactatattacgaagaccccatgtgttcccacttcaccgccaccgtcaccgcctgccaagcgctgggcggcggccgcttcgccgtaacgctggaccaaaccgccttcttccccgagggcggcggccagcccggcgaccgggggacgctgacctatgacggcgctgccgttcccgtcctcgatacccagcttcaagccggggagcccacccacctctgcgccgcccccatcccggtcggggagacggtagacggcgcattggactggccccaccgcttcgacctcatgcagcagcacgccggagagcacctcgtctccggcgagattcaccgccgcttcggctacgacaacgtcggcttccatatgggcgcagagctggtgacggtggattacaacggcctgctgacctggcaggaccttgcgcccatcgaagccgctgtcaacgcagccgtctggcaggatatcccctgccgcgcctggtacccggcggacctggcagcggagcactaccgcagcaagaaggcgttagagggccccgtccgcctcgtccaattcgccggctgtgatacctgcgcctgctgcggcgtccatgtggagaggacggggcaaattggcctgattaagctcctgtccgtcacgaagttccgtaccggcgtccgcatcgagatggcctgcggggccagggcccttgccgtcgtcaatgcgcagctggcccagaaccgggaaatttcccaggccctgtccgccaaacccgacgcgacggcgcgcgccgtcgcccgcctgcagggggagcttgccgcgctgaagacccgcctgcatgatttggaaaacgaagccgctgcccgggtggccgaaacctacgcagggcaggggagtgcgctgcattttacaagcggcctggcgggcgacgccctgcgccgcctgtgcctggcaatcttcgagacctgcggcggccgcgccgccgtctttagccaggtcggcaatgtctggcagtacgccatcgccgcccccgagggccaggacctgcgccctgtcgccaaagcgatgaacgccgccctgtccggccgcggcggcggcaagcccggcttcatccaaggcgctgtcgccgccgaccgcgatgcgatcgcaaaatgcgtgtcaaaaatgaa

SEQ ID NO: 4415 - DNA, 2563 bp, Unknown
  16S sequences of unknown bacteria
ccttgccccgggagagcatggccagggtggcccgcttcaggctggggattttgtactggggcagctcgatgaggaagaaggacttccggtttttgtaaccggcgatcttgccgatgagcagggcccccaggaagatcagcaggatgcctacaaaatacatcagtgtgcccacccaggaggcgtcatggaaaaagacaccggcaaacaaagcgattaccggcagtttggcgccgcagggcatgaagggggtgagcatggcggtggccttccgctctctttcattgcggatggtgcggcaggccatgacgccggggatggcgcagccggtgccgatgacaaaggggatcaccgatttgcccgacagccccactttcttgaagatggggtcgagaaccacgctgactctggccatatagccgcagtcctccagcagggcgatgaggaagtacatcaccatcaccaggggcaagaagcccagcacagcgcccacgccgccgatgatgccgtccaccagcagggcctggagcaagggggagctgccttcgatccagccgctcaccgtaccctggaaggatttgatccaggcggccaaggtgtcgcccaggaaggggcctacccaggcctgggagatctggaacaccaggaacatcacggcggcaaaaatgggaatgcccgcccatttattggtgagcacattgtcgatctggtcctggctgtttttctcccgggtgagggtcttgcgcgtctccacctgggaaacgatggtgttcacaaaggcgaagcgggcccggtcggcctgttccaccgcctttttgctggtcaggtccacatttccctgggaatagggagccttctgcccctggcccagcagggaggccgcctgagaaaccgcttctttcagcccggtgtgccccgaggaggtggacaccgtctccaccaccggacagcccagcagctcgctgagctttttggtatcgatccggttgcctgccttttcgttcagatcgcttttgttcagcgccaccaccaaagggatgcccagttccagcagctgggtggtaaagaacaggctgcggctgaggttggtggcgtccacgatgttgatgatggcatcggggtgctcatgcttcacataggagctggtgatgctctcctccgaggtgaagggggacatggaataggcccccggcaagtccaccgccgtcagctccggggagccggaataaaaggcctttttgatggggctttccttcttttccacggtgacccccgcccagttgccgatccgctcgttgcggccggtgagggcgttgtacatggtggtcttgccgctgttgggattgcccgtcagcgcgattctcatattctttattcctcctctatacccggcctttggtcgggtgatatacattgtgattagcatacgctaactccatggggaaagaaaaggcggaattagcgaaagctaaccgcctttcaaaaaaaacggtcaaatctggatggcctcggccaactgggtgtctatgttgtaccggccgtccttgatggagaccacgcagccgcccttccggtgggagatgacggtgatgggctcgccactgaaacagcccagggaaaacaggaaactgtccagttcctcatcgtcggtgaggatttctttgacgatgtattccacgccttcctgtgcatgggtgagattcatagggattcctcctttgcgattggttagccaatactaaccgtgcattactataccattgcccagggcctttgtcaagggggaggggaaattttttccggggttgacaaatgtggactaaaagagtatggtattctatgtcaagaggaacgaaacacttttcacacatataggaggaaactacaatggatctgaagggaacacgcacagagaagaatttgttggctgctttttccggtgagtccatggcccggaacaaatacctgtttttcgccgacaaggccaagcaggaaggggaagaggaagtggcccagctgtttgagatgatggcccgcaacgaaggcgtccacggcaaactgctgtaccagagcatgaagcagatcggcaccagcagcgagaacctgcaggaggccatggaaggggaatatggcgagtggagcagcatgtatcccgctttcgcccaggtggcccgggaagagggcttctcccacatcggcaccctgtttgatgagatcgccaagatcgaaaaggaccacgagttccgcttcctgggtgcgctggccaagctgaaggccaagaacaaagcggctgctcccgcaccggtgaagcctgcggaaagcaagatgatctcggtggccggttaccgctgccagttctgcggcgccacttatgaaaaggctcccgatgtgtgccatgtgtgccaggccattggttccttcgagcccaccaccatccagaagaaagtggaaggctaaaaagtacattatattaagaatagaaaaacctatataacgaaaagggtcgtctgccctacccctatcaatccgtacagccgcgccgagtcgatccagacgcccctgacca

SEQ ID NO: 4416 - DNA, 4288 bp, Unknown
  16S sequences of unknown bacteria
ccgaggtcgttcgggtggcagttgtcgacggtgcattcttcgcgcatattggcggggaagagtgagtggccgtctatgaagatgactttttcgccgcggaggcgggcgttgttgtaggtctggtagatgacgtcgcggcgcgccatgtttgccgggtcgcagagccagaagtcgggtttgccgacgaggacgaccggggtgtcggggtgggcggctctgaaggatttgtagaggtgctcgtgagtcttcgcgaggtatccggggtcgggggcgttgtggtcgtagtccattacgaagacggacggttcgagggaggcgaggtagtcgaccatcggctgttcggcacgcgcggagccggagaagccgaggtttatgtattcggtgtcgagacggcgggagattatggattcgtatgccatgccgggtcttgacgcgcagccgccctgggttatcgaggagccgtagtagattaccggctttgtgaatttgtagtcggggcgtttttcgagggtggagtttttgtcgagacctatgtagagttcggttactccggagtagagcgggaagttgatcgtgatctcgtttctgccattcgggagccacgggaagccgattatgccgtcgaagccgtctttgtggccgttatagggcggggtgaagacgccggcgaaggtgtcgacgccgtttctcgcgacgtagatgtcaaatccggaggagccgatgagacacatgttagccatctgcgcggagccggacgaggtcatttttatcgcgacgtagtcggagtcggtgataaagcgcacacgacctccggcggtctgaaagttcagtccttttacgccgtcgttcgtggcttcggcgacagattcggggatgcggcggtagggcgaggtgttcagcgggtcaaagagaccgtgaatgctgaacggcgcctgctttacgttgtagaagagaatgtctttctgattcgtgatcgcggtgtttgtgacgccgagctcttcggcggtttttgagatgagatcgatcattgtcgtttcctcacttgataaaaatggatttatacgcgataaatggcggtacgccattcttcggtcagttttttcagcgtccacgcggcgttcgcggggcttgtcgatgggagacatatcggtgtgatcccggttttcggaaggatgagctttctgtagagcgtatcggcggtctttccgttcgttatgacggcgcggatcggcgctgacgcaatcagcgatggaatgtcattcggcaccgcggagcgtatcgagctgtcgctcgagccggtgacgacacaggacgcgcatacgtcccagagcgcgagaccgaggtcgaggatgagccgctttttctcgggaatggttagctccgcttccggaacggcgatgcctttgtctttcgcgagagccgtcatgattttccagaaccggttgcgcgggtgaccatagtagaagccttcctcgcggctcttcaccgacgggaagcttccgagaatcagtatttccgaatcaggtccgacgaccggaccgaaagggtgagtcagagcttcaggaatattctgcatgggttcacagggtccggctccgtttcggatgtcagcgatccgagggcttccgccataactttcgccgtgaaatcgtcgtagaatccgaccggctcaccgatgcccgccgcgtcatacgccttcgccgcggcaaggtagaagagaaatccgaacacgctcgacggggtgcgcacagaagcgcaggcgaccgatatagctctcgccgccgcctgtgccgtcgggtcggtctcggcgcaggcgagccttgatacggtcttgagcgccggacctacagcgccgcggcggattgctgtccttggcgacgccgtcgcttcggcgcacccgagacagatgttgattgattcgtcgagagcgcgcctgagcccgccgtcggacgaggtcgtgtgcgcgtcgaaaatgccgagacactgatccttcgagtagcgtatcgcccaacaggaaagggcggatatgctgcgcgtcgggattacgcgcaatatctcctcacaggcgggggatgacgtgaagttcagcatcctgcgcgccttcggtttccgttcgatatactgtttttcgggtgcgttgctcatgatccgtatcattcctttcgcagatttttcagcagaccgtcgggtcagtcatcgttttcgctttcggtttcattttcattttggtttgtgtcattttcgtcacttatatcgtcagaggtgtcaccggcatcgtccggttccggtgtgtcatcgtcgtcggtgtcgtcaagcccgaagatagagccttttttagcggctggcgcttttttgggcttttccgcgggtcctttcttctttcgtccgcggtcggacggagagtgcgacgcggcgagtttatacagctcgtgcagtgtgaaggtaagcagcgtcatgacggcgaccaccgcgaatcccgccgcgccgagcttcccgaacgagaagagcgcgccgaactccggcacagccatcccgagcgcgaagaacacagcgagtccgaacgtcagcgccgcctgtatcgtgttgacgcggacattcccggcaaagaccgacctgtcgctttcataagccgtcagcgtgacaagctgaaacagagtgaatgcgaggaaagtgacagtactgtagctcccgcccggattaagtccgagagcgtggaaagcaggcacgaccgcgaggagcgtcaccgcctccgcgagcgcgaagaccgccgggcggatattcgtgcgtatcgggtgcgcgagcgcgtacatcacgtcgtcgcgcattgtcaacgcgtcatgcggaggtttcgcgaacgcgaccgtgacgaccgccgcgaaatcgacaatgagcccgccgaaaacgagctgcaccgcgtcgggcgtcgagatctccgggaataccgacccgagaagtatcgagccgagcaccagaaaaattcgcgccagctggaccgtcacgagatatttcagtatccggagcatattccggaatatcgagtgcgagaactcgagcgcggagacgaccgcgcggaatccgccgtcgccgttcttgtccgcgtccgacacgacaacgtccgagatgaatttgagcgcctccgagtcgaacgtgtgcccgccggtgtccgcgatgcgtgagtacgccggcgtgccgcgggagcggatgtcgacaataccgcgcttcgccttcggggagatcgtgacgctctcggcaaagccgacgtcggcggtccggagcagcatcgcgccgcttattcctccggcgagcagggcgaccttcgcgccgtccgcgcgcagcatcgtcacaatctccgcgattcccgcgggcggtatgccgcagtacatattgtagaagggaaggttgacgcgcagcatatccttgctgtaggagagtctgcggttttcggtcagaatttctttttcgtcctttataagccctaccgacatagcgaggtatttgtcgctctcggtgtaccggtcggtcgtcattatgacgcggacgcccgcggcgcggcacttcgagatcgtctgcgcgacgcccggctcgagcggctcgcggagcgcgataaagccctcgaaagtgagatcgctctgtatcgagccgattctggtaagattgttgtacccggtcgtaccggtcgcgacggcggctatcttgtacgagctcttgatgaggctctccgcggtgccgaggaacgcgagacggtcgtcggtcgtcattctgtagatcgaaccgtttcttgtgtaatattcgcaggagttcagtatctcctgagcctcgccgcggcagaccgccatgtatcgcttgtctgtgtcgagggtcagcgtcgtgtcgaacttcgacgcgccgcccgcgggcttgtgctcgattatcgggtggtcgcggtctatgccggaattgtagagcccgagccggtcggcgagatcgacgagcgcttcctcctcaggtgttatccgccgcgaggacgagttgaggtcggacagccccgcgccgtagatgccggtcgaaatgacaccgcagagcaccaccgacctgaatttcgagacattgtccgcgtcagaggcgccgaacagctttccggggacgtatattttttcggcgatcgagtgggaaacggttatcattccgtccttcgggatgatgacgcagttcacgtctttaagagactctaacttttcagtgttcttgatgagcgcgccgacattgacgtcgtggcgccgcttcatcgcgttgaacactccgcagccta

SEQ ID NO: 4417 - DNA, 18499 bp, Unknown
  16S sequences of unknown bacteria
gccgccgcaacaagacggtgcgtcagcaggagatcgccgcccgcgcggcggaggaagaagccaatcgaccgaaaaagatcaactacggcgggcttcccggcacgaagcccaaaaagcgcaaataacgccgcggcttttcaggcgtaggcgcggcaggaacgaggagaatgtatgcgcatcatcggaggaaaatataagagcagggtattggcggagtttcccggaacggacgttcgtccgacgggggacagggtgaaagagtccctcttcaatatcctttctttgaaaataggcggggcgcgggtattggatctgttctgcggcagcggcgcgctgggactcgaatgtctttcccgcggcgcgaaggaagcggtgtttaacgatttttcgtccgaaagcatccgcctgctcgaaaagaacatgaaggcgctcggcgtcgtaaagggcgcggaaggcaaggtgtatacgctggatttttccgtctgcctggacggcttgaaaggcggattcgatctgatctttctcgatcctccctatcgcttcgagtacggcgttcccgcgctcgaaaaaatagcgcggagaggacttttgaacgaaaacggcatcgcggtgtacgaacgggacaagccttttgaagaaaggatagacggtctggaaaaatacgacgaacgccgatacggcagaacgtatctgacttttttccgcaagatttgattcgggcgaacaaaaggaattgcggacaaaaaagccgctcccgcgccgcggggacgaaaaaagggcggccctttgccgccaagggacgaaagacgcgcccgagcttttgtcgaagagatagagaaatttgagatcgggcgaaaaagggtatcatgagaaaatgcgtatttgcgggcacgttcgatccgcccacgctgggacataaagcgctcatcgaggactgccttacactgttcgacgaagtggcggcggcggtgatggtcaaccccggaaaacagccgtattttacggaaaagcagcgggaagaaatgctgcggctgatgttcccgaatgaggagcgggtgaagatcgtctttttcacgggcacggccgcggagcttttgaagcgggaagggacgaatatttacgtccgcgggcttcgcaatacggtggatttcgaatacgagaacgccaattatttcgcctcgcggaaactcgataaggagatgctgaccgtctatcttccctgtcggcaggagctgctgcacgtgagttccaccatggtgaaaaacagtctgcgtttccatacgcccatcgacgagtacgtgacggacgaagtgaagaagtatatttacgcgctggaaggcgcgccggaaacacggcgggagtgacacggcgcaaaggataaaaaggagtttttacgatacgatgttagagaaacagtattacatccccgagccggaggagttcatggcggaatccccgctctccccggaattgaaagagatgaaacgccgcagggacgaagaggtgaaggcagtggtgtcgggcaggagcggcaaaatgctcatgatcgtcggaccctgttccgcacacgaatccgcgcccgtgctcgaatatatctcccggctgggcaagctcaacgagcgggtcaaagagaaactggtcttggtgccgagaatttacaccaataaaccccgcaccaaaggggtggggtataagggaatgttcattcagcccgatcccgagggggaggcggacatcgtgcgcggcatccgcagcatccgcgcgctgcatatcgccgcgatgaaagaatcgggactgacggctgcggacgaaatgctctatcccgaaaatacggcttacgtcgaggatcttttgtcctatcacgccatcggcgcgagaagcgtcgaaaatcagctgcatagattggtggcgagcggcatcgacacgcccgtgggcatgaagaatcccatgagcggcaacctgcccgcgatgatcaattccatcttcgccgcgcaaagccctcaggtgtttaaataccgcaattatcaggtgcgttcggcgggcaatccctacgcgcacgccatcctccgcggcggcgtggacggagcgggcgccgacgtgcctaatttccactatgaaacggtgatgcgggtggcggaactgtatgcgggcgcaaagctgcaaaatcccgccatcatcatcgactgcaaccattccaattcggcaaagcaatgccgtcagcagatccgcatcgcccaggaggtcatgcagaaccgccgcttcggcagcgatttcaaaaagctcgtcaagggcttcatgatagaaagcttcctcgtggaaggcagtcaacccacgggcgaggtgttcggcaaatcgatcaccgacccctgcctcggctgggaagatacccagcggttgattctcgacatcgccgagtccgtataaaggaatctaagcgggggtagccgcaggacaggcgatcgaaaagatcggcgtagttctcttcgacaaaggaaaaaaagacgcgcttttccgccgggcacattcaaggtatcatcggcaagcgagaacaacgtatgcgcggtttttcgtaaacgcgggattcctccgcgacagaaggcggaaaagagtagtcggacgcaacgtattcctcgttttttgtaaaggaaaaatgtccttcgcggccggcttatgcctaaaccgaagagccgcggaaaataaaatgccgttcgcatactcaataagcgatggagcgctatgtacataagtccgcactcaaatagccgggaaaatgtcgtaagacttgtcgtttgtatattgggtaagacgccgggcgctgcgtacaacggcaaacgcaaagaacgaggttttccgggcggcgggcatttttcaaagcgcgcggaaaaagcgtgaaaaaaagggcgaagatgcggggaaagcgctgaaatgaaaatgcgcaataaagggtataataaggagaagacacattatgaaaatagcctatttgggaccggagggcagctattcccatctggcggcggaaaattttttgcaaacggaggggacttcctcctccttcgagcgcagcgagtgcattcctttccgaaatttccccgaagttctgcgcgccgtggaatcgggacttgtccatgcggcggcggtgcccatcgaaaacagcttgcagggcggcgttttgcaaaatctcgatcttttgcaggcgtcggaggatctgtacgccgtgaaggaacttattttgagaatcgatcatcgcctgatttacagggcgggcgcttcctatgaagagatcgggcgggtatattcccaccgtcaggcgctggatcagtgttccgtcttcctcgcgcaaaaaatgccgtttgcttccttgaaagaaacggaatcgacggctttcggcatttcccgggcggcggaagatttttcgggcaagagcgccgcgatcgcgggcgcccatacctcgcctctccccgaggggttcgagatgagcgaaaaatgcatttcggacgaacaaaacaattttacgcaatttttgctcgtgaaaaagggcagggaaagcctgccccgaaacagcgataagctcttcttttccgccgtttgcccgcatcgcccgggaagtcttctcgccctgctgcaaatcattgcggaatacggcatcaacatgacgaagatagagagccgccccgtcaaaaacaggccgggagattatcgatttttcgtggaagcggagggcgacgtcggcggcgaactcgtccgaaaagcgcttgccgaaatagccgccgatacgctggaatgtaaactcatcggcgcctataaacgggcttgaaaggcgaaaaggagtcccgtttgcggagcgtaaaggacgaatttcaaggcgggaaaagaacgatggaaagagcgttctgaaaagagaggctttgaggagaaacgcgccgcgtcacagggatacaaacaacagacagagaaagaaagctcccaatgcctgaacgagtttgacaaagaggaaaaagggaagcttgatgcctgcggagcgcagataggcgatctgctgaaagaggatgctcgcgccgcccaaagtgatgagaaaggcgcagcaaggtgcggcgagatttgtggacagtcccgccaaagcgaggcatcctcccgtcatttcgacgagtcccttcgtcactccttcggcgcatacggcgagggcagggatttgtttaagcaatttttgcaggggatacagcagtttgaaatccacgcacatggacgcgagtacgtaaaataccgcgatacatccgccgacggcgagcgcggagatcaccgagctttgcacgcattcggaaagggaaaaatctgaggcgggaggcgcggcggacgctgtccttcccgtttgccgggacgccgccgggtctttccttttccgcaaggagaggaaaaaacgcaccgcaacggcggagaggagaacggcgaggacgtgcgccgcgagaatgataaatcccgtgcgcttgtcgccgaacatccccgcgcccacgctgccgatgatgaacagggggccggaagtggaacaggcgcaggcgaggatttcggcgtccgatcgggagagcaagtcgtcctttctcatccccgctactagactcgcccccacgggatagcccgagagaacgctcatgaaaaaacaaaatcccccttcgccgcccgttccgaacagcgccttggaaaggggcgtgaaggcgcgcgaaaccttttccgctccgcccgtctgccgcaggagcgcggtgacgaagagaaagggaaatacggcgggcagcacgttgagcgcccatatcgtgatcccgtcaagacagacggggacgtagcgctcgggaaaaagcgcgaatatcaccgcaaaggcgagcaaaaacgcggtgagggcgcctcttttgagagaaaaggtcttggcttttttgcccggtaaaatattttcggcgcttctccgcgccgatgcgggagagattgttcgcataacgatttatccttatgaggacgagcgggaaaatatgaaataaaaaagagagaaaacgaaaaaaagatagtgaggtgaaaaaaatgagcaggaaaaagacactcggatttgctttgggcagcggcggcagtcgcggcgtttcgcacgtcggatttttacaggcgatggaagaagcgggaataaaacccgattttctgacgggctgttcgatgggctcggtggtgggcgcggcgtatgcggtggggatgacgcccgccgaaatgcgcgaggcgatatgcaagctgaaaccgctggatttgctcgacgtcacggcgaagccgggcggactgttcgacacccgcaaggtgcgcaagattttgaaaaaatatttcggcgacatcacgttcgatcagttgaaaatcccctttcgctgcgtggcggtggatatgcacacgcaatcggtggtgactttttccgaggggagcgttttggacgccgtggtggcttcctcgtgcattcccgctatcttcaagcccatcgaacgggacggataccgcctcgtggacggaggaattttggagcgcgtccccgcgagtcagctcaaagagatgggcgcggataagatcgtggcgatcgacgtgctggggcagaggcagtgcaccaaggacaagatcccgggtaccatcggtatgcttctcgaagtcatcgatttaatggacaattacaggacgaagcgccgccgcgaggagaacgaaaagatcatcgatctctggctggaacccgacctcgggaccatgagccaatacactttcaaaaccttccccttcgcatacgatcaaggctataagatgggcatagagtacgcggagaagatcaagagcctgaccgagtagaggcaaaagacaaaaatcgcggacgatcattatcgatttgaggaatttatggacttattcgactttaacaacaacgaagaaacggcaaaaccgcttgccgaaagaatgcgcgccaataatctcgacgagtttatcgggcagaagcatatcgtttcggaacattccctgttgcggcgcgccatcgccacggacaaactcggcagctgtattttctgggggcctcccggctgcggcaagacgacgctcgccaatatcatcgcgctacgcacgaacggggagtttatcaagctcaacgccgtcaattcgggcgtggcggacgtgaaaaaagcggtggataccgcgcggaataatctgaaaatgtacggcaagcgcacctatttgatgctggacgagtgccaccgcttcaataaaacgcagagcgattcgttgctccccgccatcgaacagggcaccattatttttatcggctccacgacggaaaatccctacgcgtccatgacgcccgccatcgtttccagatgtcgggtgttcgagttcaagcgattgacggaggaggatatttcgggcgcgctgtacgccgcgctcaaaaatcgtcataaagggctggggaagatgaacgtggaagccgacgaggaggcgatcgcccatatcgcccgtatggcgggcggggatctgcgttccgcctacaacgcgctggaactcgccgcgatgacgacttcgcccgaccaaagcggaaaggtgcacatcgccctcgccgacgcggaacagtccattcagagaaaggcgctcagttacaacgaggacgactattacgattttctttccgctttctgcaaatccctgcgcggaagcgacgcgaacgcggcgctctactacgcgatgcggctcatcgaaggcggatgcgatcccatgctgatcgcgcggcggctggtggcgcattcggcggaggacgtggggatggcggatccgcgggcgctgcagatagcgacttccgccatgtacgcctttgaaaagctgggttatcccgagggactcattcccctttcggaagggattatttacgtctgcgaggcggataagagctattcggtgaaaaacgcgatgctcgccgcgaaggacgacgcctctcgggtgcgcgacgacgccgttcctccctacttgaaggacaattctttcggaagcaaggaggataaggcgcaaagccgcaattataaattcccgcacgattacggcggctacgtggagcagcagtatctgcccgattccttaaagggcaggatctattatattcccggagagaacgggtacgaaaacaccgtaaaggagatccgcgcccgcaagggaaaaaagaactgaaagggcggcgttcccaaaccgtccttgaaaatagggcggaacgggaagaaaagtgttcggtttgccaagcgtgcgcggctttcgccgcaggaggcggagatgaaagaaaaaatcgcggtccgtttctatccggacgccgacgacgaaaaaatcagattcgtcgtcatcctctgccgcaaggagggaaaatggctgctcgtcaaacaccggcaaaggaacacttacgaatttcccggcggacatagggaagcgggagaaacttcggacgaagccgccaatagagaactgaaagaggaaacgggcgcttcgagttaccgtatcgagcggctttgcgcctattccgtgacgggcagaacgcccgtcaacgagagcggggaagaatcgttcggaatgctgtattatgcggaagtggaaaaagacggggagatcgtcagcgaaatcgaatgctcccgcctgttcgacgtttttccggagaaagagctgctcacctatcccgatattcagccgaaattcatagaatacataaacgggaggggcgcgccgtgattttaagaccttacgccaaggaggatcttccccaaatcctcgcgttattccgcgaaacggtgcacgccgtcaacgcggcggactatacgccccggcagctggaagcgtgggcgccgtcggaactcgacgtgaaaaaatgggaggcttccctcgccgcgcattacgctttgctggcgtgggagaaggaaaaattgctcggcttcggggacatcgacgagagcgggtatctcgaccgcttgtacgtcgccgcggacagtttgcgccggggaatcggcagggcgctgagcgaggcattggaagaatatgcgcgggcaaagggcgcccgtcggctgagcgtatacgcttcgattacggcaaagccgtttttcgaaaaaatggggtatcgggcgctgcgctcgcaagaggcggaaagaagaggcgttctgctgacgaatttctatatggaaaaaaatctttaaaacggcgggaaagaaaggcgctgtcaaatgccgcgccgagggataaaagaccgaaaaacgaaaagatgcaaaaagcagccggagcaagacggcagagaaaatcgcggaaaagaagtccgcctccctttgtctgcgcgggcgggcaatcgaaaaagtaaaatccgaaggaggtacgtttatgaaatgtttatattgcgactgtacggaaagcaaggtgatcgattcgcgctcggcggacgacgacaggacgatccgccgccgcagggagtgcgtcggctgcggcagacggtttactacctacgaaaccattgaagtcacccctgtgctcgtcgttaaaaacaacggcacgcggcagtctttcaacgccgaaaagatccgcaacggcatcatcaagtcctgcgaaaaaagacctgtgccgatggcggtcatcgacggtatggtaacggatatctccaaacaggtatacaacagcatggaaagcgaggtgacgtccaaacaaatcggcgagatggtgatggaacgcctgaaaaaagtagacgaggtcgcctacgtccgctatgcctccgtgtatcgctccttcaaggacatctcctccttcctctccgaactcaaagagatgatgaaggagggaaatcgggagcggagcaagatcgaaaaggcgggcagagaaataaaagagcttgggggcggcaagacggaaaatgagtaaacggaccaggcaggtaagcgtcggcggcgttttggtgggcggcggcgagcgcgtgaaagtccaatcgatgacgacgacgaaaacttcggacgtagaggggaccgtcagacaaatcggcgccctcgaagaagcgggatgcgaaatcgtgcgggtagcggtttcggacgaagcggatgcggcggcggtgcgcgccgtcaaggaaaggatccgcctgccgttggtggcggatattcacttttctccgaaattggcggctgcggcgatcgagaacggcgcggataaggtgcgcatcaatcccggaaacatcggcggggagaaagagataaaatacgtcgcggattgtatccgcgcccacggcattcccgtgcgtgtcggctccaatacgggcagtatagaagcgaactttttaaaaaagtacggcagaagcgcggaggcgctcgtcgaaagcgccctctataacgtgggcgttttggaaaaattcggcgtgacggacatcgtcatctccgtcaaggcgtcctccgtcccgctgacggtccgcgcttacacgctgttgagcgaaaggacggactatcccctgcacgtgggcgtcacggaagcgggcgccacggaagcgggcatcgtcaaaagcgccgtcgggataggcgcgctgcttttgaacggcatcggcgacaccgtccgcgtttctttgacggacgatcccgtgcgcgaggtgtacgcggcaaaacatatcctgcgcgcctgcggtttggaggaaaggtatgtggaagtcgtttcctgtcccacctgcggcaggtgtgcgtgggagagcatgagtttggcgcagaaagtggccgaatttgtcaaaccgtattccgtcaaggcgaagatagcggtgatggggtgcgtggtgaacggtccgggcgaagcgaaggacgcggatttgggaatcgcgggcgggcaggggtactgcctgttgttcaaaaagggagaaccctataaaaaaataagagcggaaaatgcggaagaggaatttttcgaggagttgaaaatatttttaaacgatggcaatcaataagacggaagaatacttaaacgagatccgtgcaatcgacggattacagaacgcgattttgaccggcatcacggtgtataagcgggagatggcggcggaatttaccctcatcaccgataaggcgtataccgctctgtcggaagaacgtgcaaaaaagacgacggtcaaatacctgcccccgtccttttctccgcgcatccggatcgtcaaacgggtgcccgatcgggaaattctcaaaaagcgcatctatgaattcatgaattcccgctttcccgcggcagccgcgtttttgaaggaagaggacatcgaagtggagatgctgcaaagcggcgccaatttttgtttcgacgtcgcttccggggagcaatccctgttcacttcgggcaggatattggacgaagtgagcgcatacctcaaaagcgtcttttgcggcagcttttacggcaacgtccgcatcgtggagaaggagcgcgaggaaatttccctggaagaggattattcggacagcgacgaggaatacgtgcagaccacccgctttttccccatcgtcaacttcaagcgactggacggcgcggacgaagtccccaaatacgccgcgtatatcgccgacgccgtaggggaggagaacgaggatctcacgctctgcgggacgatcgcttttattcaggaacgcgaatacacgaaaaagaacgaaaagacgggcgaggaagtgcaaaagctccgcttttctctgacgattgaggacggaacgggcagtatacgcgtcacttactttcccaaaaaggcgaccgtcgataagatccgcgagttgaagacgggggattgggtggtgctcagcggcgcgaacgaatcgtataacggcagcatttcctatactgccaagcgaattaattacggcactcagcccgaaggattccttcccgaagcgcgaaagggaagacccgttcccaaagcctatcacaccgtttttcccgagccgtatatcgactatacgcaggcgggatttttcgatcaactggaaaagcctgccgccctgaaaaataataccttcgtcgtgttcgacctggaaacgacgggactgaataatcaacccgccatgggaaaaatggaccgcatcatcgagatcggcgccgtgaagatagtggacggggacatcgcggaaaagttttcgacgttcgtcgcctgtcccacccgcctgccgccggaaatcgtttctctgacgggaattcacgacgaggatctcgtgggcgcgccgaccatcgacaaagtgattccggatttttataaattctgcgaggggtgttttctcgtcgggcacaacgtgcagttcgactatcggtttatccgttattacggcgaagaaaacagatatatgttcgatcagaaacaatacgataccctcacgcttgcgcaggaacttctgcgcggcgtcggtctgaacaattacaaattaaacaccatcgccgatcattacggtttcaccttcaatcatcatcgcgctttcgacgacgcgttgacgacggcgaaaatttttatcgaactcatcaaacagagaaaggcgcttccctgatcgcagacaagaaagatttatcggggaaagcgggcttgtcccgacgtaaataagcggtcccgaaaccataattcgtttcgggaccgcttggtcgagtgtatgcttttttagggcgctcgtccgtcaaaagggcgcgcttttttacgaaactttattctttttccgcaaaacggcagcagtgctttccttcccgtttcgcacgatacattgcggcgtccgcagcgcggaacaacgcctcgaaagaagctccgtcgcggggacataaggcgatgccgatgctcacggaaataggggaatcgtcgggggcggtctgttccgcgatgcgccgaagcagcgcctcggccttttccctcgcgtccgtttcgttcgcggtctgcggtgcaaacaccaccagttcgtcgccgccgacgcgcccgagcacgttcgcgtttccgaatacgtcccgtatgcgctttgcgagtccgcggagaattttatcgccgaggatatgcccgtaggtgtcgttgatttttttgaagtcgtccgcatctatcataaacaacgcgcccgcttgttctttttcgagctgtgcgcgtatctgatgttccgcgggcgccttgttgagaaaacccgtcagtccgtccgtttccgccatctccatcagtctgtcctcgcgctgctttaagtcgtctatatcgacgatttttccgaccacggacgtaagcactccctttttgtaaagatagaggaaatgcacgaggcaccaaaaataagcttccgtgtcggggtgggtaaacctgacgcgcgcctcgcgttgttcgctgagtcccgcgagcattgctttcatttcgtccatgtcccctgcgtaaatgtagccgcgctcgatatttttgaggaaagaagtctgcaccagcgcgtgcaccttgaataatttttccgcgttcggcgtaaaccgcatcgtgtcttttatacagtcgtaatcgaacagtacggtgtcggaaaattgctgtaacagcagatagcgcttgtcctccgaagtgagcttcccctgtaagcgtttggagatgaggaggaaaattgtacagacgagaatcatggcggcaagaagaatcgcggtcgccgcaacggaattggaaacgatggtttgagagcgcgccgcggcggcgtccgccgtgataaaaatcaacagattccagtcgttgtagggaaggctcgccaaagaggcgtaaataggggatgtggcgctttcctgcaaccttacactggcgacgtcggaggttctggcaaccccggtatgcccgtataattcacgcatcttttttctgccatatgcggaagaaggaaaatccaggatacagcctgtcgattccatatccgtttttgtcggcagaatatttccttgggaatcggtgagatagcagcctaagatttttccctgtgcggcggggaaaggcgaaatttgcgtcagcaccgacgcccggacgactgcccggagcgctccttcgaagctttcgttttgggaaaagacgggcacgcctaccgcaaaacagtaatagccgcccacgctttccgaataatagacgtccgaaacaaccgtttcacccgctttcaacgcgtttacgacctcctcgtcctgagggcgctgcaaaaggttggcttccaaatcctcaatcgtattatattgatacaccgtttcctcggaatcggcgttgagaagtcgcaaataagccgctatgagattttcgtcggaattgtcaccgatgacggcggcgagcgtttttaaagccccgatttgctggcggacgacagacagggaattcgttttttgctcggaggcataggcgctgaggctttccttcgtcatctgcgtaaattgctcttgtgtggagcgcctttgataagaaatggtgaagatgaccgaaaccgcgagaaatacggcgcagagcgtcatggcgagcacatggacgggaaagcgggcatagcgggaacgccgtttggaaacagaaggctggtcagttttttcctccgcttccgttctctgctttgtttcgataaaacgcagctcgtattttccttgaatcgtttgatacgtttcgtaaaatttttcgggcgggacgggtttggaaaaatagaatccctgcacgcgggtacaaccgagccgaagaaggtatcggcactgctcttccgtttccacgccctcacagagcaccgcggtctgcaagcgctgggagatgttgatgagattggggagcagcgcctcgttgcggcgttttaaatcgggattctccgacaaaaattttttatccagtttgagaacgtcgaaattcagttcctgccaaatattgattcccgcgtagcccgagccgaaatcgtctatggcgacgctgtatccgtaaaggcgaagtttgtcgatcaggttttttgcatcggtgaaatcgttgaggaatatcgtttccgtcagttcgaattgcagaagcttggggggaatggcgtattgcagcgcgatggcgtggagcttttccgcggcatcgggattttgcgtgtgcagtcgggagagattgacggacgtcctcacgacgggcagaccgcgctttatcctctctgccataaagcggcagacctggcggcacacgagcagatccaattcgacgatagagccgttgctctccatcatgggtagaaatttatcgggagaaatgagctccccgttttcgccctgttgtctgacgagcgcttcgacgccgtgtatctctcctgttttgaggtctaccttcggttgcagaaaaaaacaaaaacattcctgttggagagcgagatttaatttctcttccatcttccgctgggcggtgaccgaacagatatattcgctgtcgtagggaagcgttttgccgtgacccgttctcttggcttcctttctcgcaaaattggcttcctcgatggcttcctcgacggtcgaaagggaaacgcggctgaatccgcaagggaaattcagacggcaggcgggatatttctgctgttgcccgacgagaaattccgcggtgcgcagctgacgttccgcaatgattttttcggtgggcgttcccgcgggatagcgcatgagatagagaaaatggtcggaataaaagcgcgtgtgcgtaagaatttccggctgctgcgccataaactcgtctatggcgcgtaatagttcgtcccccgcttccaagccatagacgcggttgatgttgcggaagccgaatacgtccacgcagaaaatgaagaactctgcgccgtcggatgaagttgtcaaaattttttccgctctctctaaaaaatctctttgtgtatttttgataaagtcttctttgatattcactttgctccccttatttggccggcgtgaacaagctttttccgcagatagctctcctccaaacaagcgaaagcgagcggaaataaaaggtaagatatttgatcatacggcgcgtcggcaaggaacttttttaggctgacgctttacagcagtgtttctttggaagggaaaaacctcctttttatcgcgttttttgcggaaaaaatgtttagcggctgcattctaactccgcgtttctaaaaagaatgcgttttatattatttttccgtaatacgcgttcggctttttttcaaaaagattcttttcctatgtttttatctcgctttttttgaaagaacacatcaaaaaatagagtgttcccctttgggaatatacgacaaaccttcttaaaaattttgtcgcagcgcactcgcttcgactcttcgggaaaactattctttaattaaatacgagattttttgaattaattatatgttatattatatcacggggggggggtgctgtcaataccttttttgctaaaaaatgtcatttttttctcgctgtatttaataagggcgcgggagggacgcgtataaagaaatgcaaaaaaaatcaaaaaaattatcgtatgaggtacaaaacagttgcaaattgcgtaagataatggtataataaggatacttaataatcagatactgagtattgagagtggcttgccactctcaatattgctatgtagggagaaaaaatgaaaataaaacccttggaggagatacgggcattcttgcagccgctcgccggcgagatggacatcgagctggtggatatagagtttaagcagggacattctcccgcgctcaccgtatatatagatacggaaagcggcgtggatttgaacacctgcgagaaattccaccgcgccatagacgcggccctcgacgagctggatcccaccttcggcgcgccttataccctcaacgtatccagcccggggctggatcgtcccttgaagactatgcgggatttcgataaatgcatgggtcagaagacggaagtaaagctgtttgcgccgctccaagggaaaaagtatttcgaggcagtgctgaggggcttcgacggcaactgcgtcaccctggaagaagaggacgggacgcttttgaaactcgaattgaaccgcattgcgaaaatcaaccgcgccgtcgatttcgattcgctcgactgatctctttattcctttaaaggcgtaaagtattcaaggcccggcgcgtctataatttttaaagacgcgcgtgcgcggaaagggaaaagcgcaggcaaacgctttgaagaaacggcgaagggctttccttcccccgataaaatttgtccttaacggctcggcggtcggttaaacagcggccgcgcacgggcgaaacactattcaaggagatagatacaatgataaacaaggagttttttgcggcgcttgccgatttggtgaaagaaaaggggatcagtcaggaggcgttcatcgaaacgctccaaaacgcgcttgcgtccgcctataaaaagcagtacgacggcggcgcggaagtttccgtggagatagaccccgaagcgggcgtcatcgaattcaaagcgatccgtcacgtggtggcggaagtgacggacagggataaggagatctccgtcgaggaagcgcaggaactcaatcccgcctatcgggaaggggacgtgatcgtcaacagcttcgtgcctaaggatttcggccgtatcgcggcgcagaccgccaaacaggtgattctccaaaagctccacgaaacggaacgcgacaacaccttttccgcgttttccgataaggaaggggagcttatggacggcttcatccgcaagatcgacgacaggaacatttacgtggaactcggggaaaagaaaatcgagggcgtcatgcttcctcaggatcaatctcccaccgagcgctacgccatcggcgacagaatcaaggtctttgtcaagcgcgtgaaaaacagcggcaaaaattctcagatcctcgtttcgcgcgcggctcccggactcgtcaaaaagctgtttgaggagcaggtccccgaaatcgcgcagggcatcgtggagatcaagtccgtttcccgcgaacccggtcaccgtaccaagatggcgattttttccaacgattcgcgcgtggacgccgtgggcgcctgcgtcggcaataagggatccagggtcaacgcggtcgtcgaggaactcggcggcgaaaaaatagacatcattttgtggagcgaaaatcctctcgaattcatcgccaaagccctttcgcccgccacggtcatttccgtgacgcagatcagcgaaaagagcgccgtcgcggtagtgcccgacgacaaactttccctcgccatcgggcgcgacggtcaaaacgcccgcctcgcggcgcggctgacgggctggaagatagacgtcaagagccttactgccgccgaaaaactcaatctcaacgtcgaggaagacgaagaggagtacggtgaagagggatacgacgaggaaagctacgacgaggaggcgtttgaaaacgccgaagagccggcgcccgccgaggcggaggacgctcagccggcaggggaagcagaggaagccgaagacgaaaacagcggggaagaaagaggggaataatggcgaaaacaaagtccgtacctatgagaatgtgcatagcctgccgacaaatgattccgaaaaaggatatgctccgcgtggtaaagaatgcggaaggggtcatcggacttgatttttcgggaaaggcgccgggcaggggcgcgtatatctgcaataaagcggaatgtattttgaaactcaaccgacagaaactgctcaataagacgttttcggcggacgtccccaaggaagtgtacgcggggatagaggaggaattttttgggaagggataagatcgaaacatatctcggcttctgcatccgttcgggcaggatcgaattcggagtggacagggcggagagcctcaaaaagggcgtctatcttttgatggcgtcggcaagtctttcggaaaactcgatgaagaccctcgtgaaactgaaagagaaattttcctgtccgctgctgatcgcggagggcgtggaattaggcgatctgctgcatcgccccgccgtaaaagctgcggcagtaaaagacaaaaatcttgcctcggcgatacttaccgccgccgaaggcgatggaatttacaaattatattcgggaggaaacaactgaacctatggcaaaaaaatacgaaaatgtggaaaaagtaagggaattattagacgaaaagcagctggggcagctgcaaaagcgtatctcttccacagaaaaaagcctttcggaaatcttgaaaaagctttccgcattggaggccgataaaacggaaagggaagcggcgctcgcccgcgaggaagctttccgctccgaggcggccgaggtttccgcgcccgaatacgccgagggaggaacgccgcaaacggcgccgtccgcgcccgaaacgaaagcggaagaaacatcggagaaacaatctctctctcccgaaaaaacagagtcggaacaggaaacatccgccaagcccgctccccggaagggcgcggcggaaacggcgaccgcacccgcggcg

SEQ ID NO: 4418 - DNA, 6093 bp, Unknown
  16S sequences of unknown bacteria
cgcggtgagcctgaagcatccctcgcccatctcgccgaagcccgcgccgggcgtgccgacgacgttcgccttttcgagtagcaggtcgaagaagtcccagctcttcatgccgttcgggcactcgagccagatgtacggggagttgacgccgccggtgtatctgattccgattttgtcgagcgcgtcggttatcgtcttcgcgttcccgcggtagtagtcgaggttcgcctttatctgcgcgcgtccctcgggggagaagacggcggcggcggctttctgaaccgggtaggagacgccgttgaacttggtcgtctgacgtctgagccagagcttgttgagtatcgcgccgtcgcggacgagggtcttcggaacgactgtccagccgcatctcgttccggtgaatccggcggtcttcgagaaggagcagaactcgatcgcgcactccttcgcgcccgggatctcgtagatcgagcggacaaggtcgggcgacgacacgaaggtctcatacgcggcgtcgaagagtatgacggcgtcgcgcgctcccgcgtattcgacccatttcttgagtccggcgtggtcatacgcggcgccggtcgggttgttcggggagcagaggtagatgatgtcggcgtcgacgctgtcgtcggggagcgggaggaagccgttttcttttgtgccggcggcgaagattatctttctgccgtccattatgttggtgtcgacatagaccgggtagaccgggtcgggaacgaggacagtgttatcctttgagaagatgtcgaggatgttgccgatgtcgctcttggcgccgtccgagatgaagatttcgtcgctttcgagcgtgacgttgtcttcttccttataatagtcgcggatggcgtcgcggaggaaggcgtagccctgttcgggaccgtagcctttgaaggtttccttctttcccatttcgtcggcggcttcgtggaaggcctttataaccgcgtcgcagagcgggagggtgacgtcgccgatgccgagacggattatgtcggcgtccggatgagcggctttatacgcgttggcgcgcttcgcgacctcggagaagaggtagctctccttcaggtttctgtagttctggttgatcttcatatcttttccctttctcagaaaatgcactttaatttattatagcattttttaattggggtttctatagggaaaaattaataatgtataaagtttgagcaggagagggggtgcagggggagagggaggacttttcaaagtcctccctctccccctgcaagctatcaatttacatcctgcttttgtcattgattttcccgaccagagtatcgacttcgatatcgttgttcttaacgggaatttcggctttgttttcgccgtcgtcgagggtgagggtggtgacggcgcgtttgagtccggcgcaggttatttctttgtcttgggattttgccgtgacttttgccatgtcgaaggttatgtgtctggcttcggcggtgtcgtcggcggcgtttatgttgtagagtctgaggtctaaagtgtttgactttttgtctttgatgaagcggaggtcggcgtgggtgaagagttcgcttcttggctttccggcggagtcggttttggcgaatttatttccttcgaaggtgaattcgtcggaggtgtagtcgggggcggtttcgtatgagggttcggaggctttgagggcggtcactttgtcctggaagtaggcggcgtaggattggtcgctgactttcagggtgaagccgaggacgaggaggacggcgccgacggcgaggatgggggtgctgagcgcccatatttcccatgaatagtagtagatgatgagcccggcggcgaggaatactatcccggcgatcatgagcggcatggtgtttctgaaatagcgcatgagtttctgattctttggtttcatggtgatttttcctttcgttgttcaaaaaggttcaggaatgcgttcacaacctcattatatcatacgttcgtgcgattgtcaagtgaaaattcattttaaattattttttacatttcgccggagcacaggtactgccgtgtccggcgggaagggtcagagcgacgtgtcatttccgagttcctctgagcgttcgcggaattcgctcggggtcattccggtcatttcgcggaagacgcggttgaagtttctctgcgacatgaagccgcattcaaacgcgatatccgtgaccgttttgtcggtgaacatcaggagcagccttgcctgtcttatccgcagagcgtgaaggaactcggggaagctcgttttcatcattgaggacatgagccgtgagatctgactgcggctgagcccgacggcggctgtgagtttgttcattgacagctccgggtcgcttatgttgtccgcgcagcagttcacgattttctgtatgctgtagacgcccgcggagtcgcgcgggctgatgtccatcgcgccgagaagctcgccgatagccgcggagaggtacgcgagaaccgtttctctggtcgtcacggatccgatatagcggctgtcgagcatctcattttcgtaatttttcaccgcgctttcattccttttgttcagagccatccacatctgcgcgacgcgtacaagaccgtcgccgaatccgggcgggaactccgagatattcacgacagggcgtccggggcgtctcgtgcacagaagcctgccgaccgcgcccatgtgctccggcgcgaagatagcgagcatcgtcacgttgtcgccgatatcgacatagctgtgctcgtcaaacggaaagccgagccagatatccccctcgccgagatcatacgtgactccctttgagataacgcggtatccgccgcttacgacatagatgagctccgcctcgtagtgaaagtggctgtagaaggtgatctcgcgcttcatgagtattatcggctggctgtgcgtgaaaaacaccggcatgacgtatcgctcctttccggaataagcgctggttcgcggctgttttcatgaaaaacgtgccggttcagtgttccaccataaatataatatcatatccggcgggttttgtccagtgcttttcggaaaaaatgtccgcggatttttcgccaggcgcgacattctgtccatatcccgcgacaataatacttttcaggaaacgctttgtatggtataatatatacaaacctatgagttcggaggaattaaatatgaatataagcaagcgcgtatcccttcttctcgcggcgtttctcgccgtgtcgtctctcgcctcctgcggggacacctcagatcagggcggcgaaaccacgccctccggcgacacgacatccgccgaggtcaaagaggaatacagcttctcaagagcttacgacgggcaggagatcagggttctgaactgcgacgacatcttctcgatgcacgcccgcgtcgacactcaggagactaccggagacgccctcaacgacgcgcagtacaacgccgtcagaaagcttgagagtcttatgggcatcacatggaccgaaacaaacgtccatcttcagaacgagcttccggagatgaccacccagctgattctctcgggcgacgacgagtatgagatcatatatcagagcaactctcagaattattatcaattcgcggatcaggggtatttctacaatcttctcgactacacggaagctcagctcgacaaggactggtggcttgacaacttcaacagcctcatgacggttgacggcaagctctacgcgggtctcggctactcgcatctctgctgcgtcgactcgatcggtatgctctatttcaatcaggacatggcggagagcctgaatctcgatctcccgtacgaccttgtcagaaacggcacctggacaatcgacgttctcggtacttactgcaaggcggccgccaacttgaacggcgacgacagcttcacgtggaaggacgacggaagctgcgtatggggaatgagcgccgcttctaacgcgggcgcgggctggctccactatttcggcgaggatatcattacaaaccagaacggaaaagcggttctcaccggcggctccaccgacaggttctacaacgcctgtgaaaagatcgcctccaccatcggcgcgaaagacggctcaatctacctcggtcactactccggcgacgacaaccccggttcgtacataaactgctttgaggctcagcgcgcgctcttcggctgctccgaggtcgcgaaagccaacagaatgagaaacctcgacttcatgttcggcgcgcttccctatccgaagctcgacgagaagcaggagcgttactatgaaagtctgtccttcccggcgtccggcgtggcaattcctgtgacctgcaaggatcccgtccgctcggcggctgtcggcgacgctgtcaactatatctattataaggatgtctggccgaccttctccgaggtcaccctcaaggcgaagaacctccgaaacgacgattcgctcgagatgctcggcataatcctcgagtccgcggctccgaacctcgcggaagtatacaatataggcatcggctatacagacgccctctcggcaaagctccgcgccggcgactccgcggtcgcctccctcctcgcctcctacaaggacgcgatcgaggcggatctcgaaaaggtcaacaatcagtgataaaaatttcccgccgaacccccggcgggatttttttcttaagaaaacactgaataaatcggggttttcgcggaaaacggcgcacaagaaaaccggatccccatgcccgaagcatgagaatccggcgctttccggaatatactgattcgaccgatttccgcggaaataagctcccgtatctgcgggcttttttccgcgaaaacagccttgaatcaatacttttcctgtctttctgtctgatcatccgacatatcttttcccgctcagagcgcacgtctcgttccctccgatgagaggccgcagacgatctttctgatgctgtcggttgagagaaaatacagcctggcaagctcctctatcgaggcgctctccttgtatctctcgcgtatctcgtgattccgctcggcgtacttctgtctggctccgctgcggattccccattcggtcttttcggatttcgtggggatgtagagaaggtcgccgtcgatgtatttctgtatctctctgataagttcgtcgggaagtacgtctttcgcgttcttgtaggacattttttgttctcctcgcttggaacacccggtgccgcctgaagcgcgtggtgattccttgtcatatatacatgatggtcccgacggacagccctgagacctgacagccccgacgctgtccgcgggtcgcttatcagatatacaacacgcggatcacaaattctccgaaaggagatccgaacccggagttatactctgatcacctttgtattcatagtcatttgacaccactcctttcgtgaattatttacaggtctggtgagcccctgcataaccattatacaccatcagcggaaaaaaatcaatagagaattcacttttaatagttttttccgcagattttttttcgcgcgcgcgaagaaatcagtaaaatgcacttgacaatcagctgaacgtatggtataatagtcttacaaaaacagaaaggacgcggcagcatgaacattcaggaactcggtaattcaatccttcagaacatcggaaaggtgatatacggcaaggagcgggagattcgtctcatgctcgcggcgatgctggcgggcggtcacgtcctgctcgacgacatacccggcacgggaaaaaccagcatggcgagggcgctcgcggtctcagtcggcggaacggcgaagcgcgtgcagttcacacccgacctgctccccggcgatatcaccggaataaatatcttcgaccggaagagggacgatttcgtgttcagacccggaccggtcttctcggatatcctcatcgcggacgagataaaccgcacgaccccgcgcacccagtcggcgcttctcgaggctatggaggagagacaggtgtcggtcgacggagtgacatatccgctctccgacctgttcttcgtcgtcgcgaccgagaaccc

SEQ ID NO: 4419 - DNA, 9147 bp, Unknown
  16S sequences of unknown bacteria
cagccgccagccgcccagctttttgcaggccgtgcccttcttgtgaccctttttatatggaaggttcttccgcgaattacaaaccgcgtcacatccaccgccgagggtgccgccataaattatattaccgccgtaaaggacagggattttgaccttctttgtaaaagcgtcattcccgaaatttccgacagcataaaagaaaatgccgagcaaaacggcgggggagatactgtttttgacacaatctacgacgccatggaaagcaatgccgaaaaaatcgatttcggcgaaaacatatcaatcgaaatagacgaaagctcgctgaaatccgaggaacagcagtttgaaaacggaaaatacaacggtcaggatatgaccgatatgaatgtgagcgccgtcaccatcgtaaagggcgacgttgtcacaaaaggctcccttaacgaatcgacccaaaacatcacctttgtgtgcgtcaaaatcgaaaaaaaatggtatattctgaccatggctcaaacggccgacgacacgtcgtgggagcaaaacacaatttcaaagtaaagtgagaataatatgaaaaacgaacccatacgacttcaaaaatatctgtccgaatgcggattttgttcccgccgcaaggccgaggaatttatcgaacgcggtaaggtgaaggtcaacggccacccggctcatatcggcgacaaggttcgtcccaaaggcgacattgtcacgataggcggtaaaaaaatcgttcacggccaaaacgagcgtgtttatatcatgctcaacaagccgagaggctatgtcaccaccatgaatgacgagcttggaagaaaatgcgttgctgatcttgtggacgacgcacccgaaagggtctttcccgccggccgtcttgataaggatagtgagggacttttgcttttttcaaacgacggagaatttatcaacatgatgacccatccgtcgggccacgttcaaaagctttatcgggtcaccgtccgtccgccggtttcggatgaacagctatatgagatgtcaaacggaattgttatcgacggcaaaaaaaccgccaaatgcaatattgtccctctcgtggacgacgacgaccgagtggtactcgaatttgagcttaacgagggcagaaacaggcagataagaaagatgtgcgagtcggtgggtcttgaggtggcgagacttaaacgcgtcgccgtgggaaacctgcgcctcggacggcttcccgttggaaaatggcggctgctcgaaaagcaggaaatcagggatcttattaccctttcaaaggcacaggggaggaaataacatgagtgtaaaggaacaaatttcaaagcttaaagatttaagcggttcgtccgccgcaaagcagaggatattaagtctttgcgacgagggaagcttttcggaaatcggagagttttacaaaagccgtgacgggctttgcgaggccgtttgcggatttgcgactgtcggcggcgagggaatatacgtttttgcccaaagccccgacgtttcggacggagcaatgagccttgcgcaggctaaaaaaataaaaaccatttatgacctcgcggcaaaaaacggccgtcccgttgtgggaatatttgattcaaagggcgttcgtatcgacgacggtgccgacgctatgaacgcattttccgaggttataaattcggcgtcgcttctttcgggagtggttcctcaaatcgccgttgttgcgggagaatgcacgggtcaaagcgcggttctttgcgcccagttcgacgttgttataatggataaaacagccaagctttctctttatccctcttccgtatataaaaagggagaagaaatcggtacagccgactttgcgcttaaaaacggtacggctcacattgcctgcgacgggctttcggcttgctttgaacaggtcggcgcggttctttcgattttgccccaaaacaatcttgccccgtcaaaaaggctggacggcggaacgcctaccgtttgcccggtcataaaaaacgagcttcttgacagcgaggataaaatacatcttgctgacaatttcggtgagacagccgaaactctgcttgcgagaatcgacggaaagccttgcggcgccgtcctcacaaagcaaagaaagcttgacgccgcttcggttaaaaaaatcagccgatttgtccgtatgtgcgacgctttttccattccgctcgtcaccataatcgacgccgacggattttccgtttgcaaggataacgaaatttcaaacggagccaaacttgcggccgagctttcaagcgtatactgcgaggcgacaaccgccaaaatatcgctgattttcggaagagcctgcggcggaatttacacagcccttgccgcaaaaggaacctcggcggacatagttctttccaccgaaaaaggcgttgtatcgcctctttctcccgaggctgccgcaatcgttatgtttggcgaacgcataaaggcgggggagagcattgacgctctttcgaaagaatatgaagaaaaattcggttcggctctttatgccgccgaaaaaggatatatagacgaaataatttccgaaagcgaaataagagttaaattgtccgccgctctcgacgcactcgactcaaagcgcgaatcaagaccggcaaaaaaacacactgattttcctttctgatttttgggggtataaaaaatgaaaaatttaagagtaaccgttaacggcaaagcctatgatgttcaagttgaagagttgtccgaaacttccgctcccgcagccgcacctgcaccggccgctgcgcccgttgccgccgttcctgctgcggctcccgctgttcctgcggacggggagacaatttcctgcccaatgcccggaaccattttaagcgttagggtcaaggcgggagacaagcttaaaaccggcgatgttatggtggttttcgaagccatgaaaatggaaaatgaaatcaaggctcccagagactgcaccgtcatttcggtcaacgtttccaaggatgacgttgtggaaaccggcgcgcccgtcgtcacaatcggttaaggaggagtttttatgcctaaaatcggtataaccgaaacggtgcttcgcgacgctcaccaatcgcttatcgcaacgcgaatgaccaccgaggaaatgcttcccatccttcctttgctcgataaaatcggttttcactctctcgaatgctggggcggcgcaacctttgacgcttgcctgcgctttctcgacgaggacccgtgggaaagacttcgaataataagggataaatgcaaaaacaccaagctgcaaatgcttttccgcgggcagaatatgctcggctaccgtcactatgccgatgatgtcgtggaatattttgtgcaaaaatcggtggcaaacggtatcgacattatccgtattttcgatgcccttaacgacatcagaaatcttcaaaccgccattaacgccgcaaaaaaagaaaaggctcacgctcaggtcgccatatcctacacaacaggccccgtgtttgaccttgaatattataaaaattatgccaaacagattgaagaggcgggagccgattccatttgcataaaggatatggcgggactccttactccgtatttcacttttgaccttgtcaaagccattaaacaaacggttaaaattcccgttcagctccactcccactacacctcgggtcttgcatccatggtaatgctcaagggaatcgaggcgggcgcggatgttatcgacaccgccatgtcgccccttgccctcggaacctcacatcccgccaccgagtctatggttgcggctcttaaaggcaccgaatacgacacaggtcttgatcttgtcgctcttgacgagattgcaaaatatgtcacaactctccgcgagaaatatctcaaatcaggacttctcaatcccaaacttctttcttccgacgcaaaggcgctcatatatcaggtgcccggcggtatgctttcaaatcttgtttcccagctcaaaagtgcgggcaaggaggacaagctttcggaggttcttgccgaggttccgaaggttcgcgccgactgcggatttccgcctcttgtcactccgacgtcgcaaatcgtcggaacccaagcggttttcaacgtcattctcggcgagcggtataagacggtcaccaaggaatttaaaggcatcgtaaggggcgaatacggtaaaactcccgtggaaatcgaccccgaattccgcaaaaaaataatcggcgacgagcagcccataacctgccgtcccgccgacctgttaaagcccgagcttgaaaagctcagggaagaggcaaaaccctttaccgaacaggaagaggacgttctttcctacgcccagttcggggcggttgccgaaaaattcttcgagagaagaagaaaccgccgttacggagtcgattccgacgccgattttcaaaacaaaatacactccatgtgataaaaaaacatccgtcagactttgacggatgtttttatgttcatttgtttttttcaagccaaatgagaagaaccgaaatgtcggcaggcgtcacaccggaaatgcgtgcggcctgaccgatgcttaccggtgaaattttattaagcttttccaccgcctcaagtctcaaacctttaacggcattataatcaaagttttcgggaagctttctaacctcaaggcgtttttgctcgtcaatttgagcctgctgccgtttgatatatccctcatacttaatttcaatttcggcctgctcaaatattttctcgggataatttgggcgggaggtgtcgatcggcgaaagaattttgtagcaaagctcgggacgtcgtataaggtcggcaagctttgcaccggtactaagaacgggggaaccgcagctttccaaaatttcattaagcttctgcgacggagcgacgcttgtcttttttgcacgggcaatttcccgttccttcatatccttttcggccaaaaatctctcatatctttcctttgataccataccgatttcatatcctctcggcatgagccgttcctcggcgttgtcctgccttagaacaagacggtattccgaacgcgacgtcatcatacggtatgggtcggagcagccctttgtcaccaaatcgtcgataagtgttccgatatagctttcagagcgccttattataaagggttccttgccctgaaccttttttgcggcatttattccggcaatcagcccctgtgcggcggcctcctcatatccggacgagccgttaaactgacccgcaccgtacagcccgtcaaagcccttgatttcaagggtgggtttaagataaagcggatcgatgcaatcatactcaatggcatatgcgggacgcattataacaacgttttcaagcccctctatggtgcggtacatctcaacctgaacatcttcgggaagggaagtggaaagtccctgaagatacatttcctcggtattaagtccgcagggctcgacaaaggtctgatgccgtaatttgtcgggaaagcgaacgattttgtcctcaatgctcgggcaatagcgcggtcccacgccttcgattttgtgcccgtacatggccgaacggtgaagatttttcagaataacttcctttgtcctgtcgttcgtataagcaatatagcaggcggccttgttgctcagagaatctttatccgtgtcaaaggaaaagggaactatattttcatccccgtcctggcgctcaagctttgaaaaatcaatcgaacggcggtgaacccttgcgggggtgccggttttaaaacggcgcagaggaacgccgagagccttaagacagagcgaaaggcttgttgcgggaaacattccgtcgggtccgctttcataatccacgtcgcccacaaaaacctttcctccgagaaatgttcccgtggcaaacaccaccgttttgcaggtgtatacggcatggagcttggtttcgatattccaaaaatctccgtttttttcgaccgaaagaatctcggcctgtttaaccgtcagattttcctcaagctcaagacggtgtttcatataaccgctgtattcacgtcggtcgatctgcccgcgtaaggaatgaacggcgggaccctttccgcggttaagcattctgctttgaatcagatttttatcggccgcacggcccatttccccgccgagtgcgtcgatttctctgacaaggtgtccctttgcggtacctccgatggaagggttgcatggcatatttcccacccaatcgagagaaatggtaaaaaccgcggtgttgcacccgagatgggaggcggcaagtgcggcttcgataccggcgtggcctgctccgataaccgcgacatcaaaatttccggctttaaaactcatttttacactccaaaaatcaacatttgctttatttaaatcattataccgcttttttgcgggtttgtcacttcttttttacgtaacaaaacagatttttttcatagtatgtatcaaaaacatatgagggtgaagccatgctgtcattaaaaaggggagacaaaatatttttggtgggtatcggcggtgccggaatgaccgctctcgcatattttcttaaaagcgcgggatatagtgttttcggctcggatattctttgcggtcagaacgtgaaaaagcttgaaaaagacggattcaagattttcgggcaacattcgtcggaaaacataaaaggagcaaagcttgtaatatacacgtccgccgtgaaaaaggacaacgccgaaataaaagcggcaagaaaatcgagaataaaaacgctttctcgcgcaaaggcttgtcagctcatttcaaaggagtttaaaaatgtcattgccgtttccggaacccacggtaaaacaaccgtttcttcaatgatatatcacattttaaagtcctccggataccgtccctcgtcgcttatcggcggcgactttgacggaaacggcggcggaatttttgacggaaaggattttcttgtcatcgaagcctgcgagtatgcaaaaaattttcttcttctccgcccgaccgtcggagttgttcttaacatagacaacgatcatcttgaggtatacaagaccgaaaaaaagcttaagggtgctttcgaaaaattcgccgcacggtcgaaaaaggcaatcgtttgttccgatttcggcttaaaaagctctaaaaacacccttttcttcggcactaaagcaaaggacaaataccgtgccgttaaaataaccgagagcgagggttcttgctactttgacctttatgaaaaagacaaatttttaagcagggtgaagcttaaaatatcgggaaaacataatgctttaaatgcccttgcggcaatttcggtatgtcttgaatataatttggatttcaaaaatgtcaaatcggcaatcggggatttctcgggtgtaaaaagaagatttgaaaaaatatacgaatgtgaaaaattcacgctttatgacgactacggtcaccatccctcggagatacaaacggttattgacaccgcaaaatcaaagggatataaacatctcacacttgttttccagccctttaccttttcccgaacggctattctgttcaacgattttataaaggttttaaaaaaggccgattgcgtaattgtttgtcccataatgggcggacgggaggataacatctacggcgttaactcaaaacagcttgtaaaaaggcttgaaaatgccttttatgccgatgatttcgacacggccgcaagttgttgtcgaaatatttgcaaagagggagaatgtattgtaaccgtcggttgcggaaacgtttatgaggtcggtaaaaaaataatttcaaactatgaaaaatcagaatagaaaaaaaccttttgtcatatctttttatgactggaggtattaaaatgagccaagaaatgcaatcggtcaaaagacccaacaatctgattgtagaaagcagaaagaaaatgtccgtcagcggggtaaaggacgttgcaagctttgacgacaacaccgtcattgcgctgacagacctcggtgagctcaccgtaaggggagaaaatcttcgcgtcgactgtctttcggtggaaacgggagagcttgaaatatcgggaacaataaacggcgtcatgtataccgatgacaaaaaggtccaaagcggatttttcgcgaggtttcttaaatgagcctgacggaatttcccgtcgaaaaaagtctcgaccaatgtaaatggctgttttatgcggtgattttgggttttttcctttgcgcaatatatgaaatattccgcgcatttcgctcggaaatacgacacaaaaatttcgcggtttttttagaggatgtatttttcttcgtaatatgcgcttttgttttcttttgtttttcgattatcagcgaggacggaaaaatcagaatatattgccttgtcggctgctttgcgggcagcgtcatttgccgcatgaccgcaggaaaatatataaaaaagtttttttcgttgataatcggtttatttacgaggatttataggtttgcggcagaaaaaataagcgttcttataaaaaagggaagagcatggtcggcaaagcaaaaaataaatcttaaaaagaaagataaaaaagtaaaaaaagccttgaaaaaagaagtaaaggtgtagtataattcaaataacaatatctgcgtttcggaggaaaaaccgatgacggcaaaaaataaaattcttatcaaggcggtgcttctgctttttgtaataataagtgtcgtcaatatcgttgtaacccaagttaaatacagccgcgacaaagcgacgcttgattcggcaaaatccgaagaggccgcattgagccaacgtgtggaagcacttaagcagaaggtcgaaaacggttccgccgacggaatgatcgaagaagctctccgggaaagaggttatataaaatccggagaaaaggagtatgttgatattgcaggaaactgattttcggttttttgcattgtattttaattcaggaggaaaaagttaaatttatggcgcttgagattgggacagtgtatgagggaactgtcacgggaattacaaaattcggagcatttgtgtcgcttcccgagggaaaatccggaatggttcacatttccgaagttgccgacgtgtatgtcaatgaaatcag

SEQ ID NO: 4420 - DNA, 3331 bp, Unknown
  16S sequences of unknown bacteria
cgaccgcgagaagctgctgttcgagtcgtgccccacggttcccgtctgcggggggcgcgatgtcacgatcggcattccccgtgtgctcgagttctgggacaccatgccgttctggtcgacgttcttcagcacgctcggctttaaggtgcgcgtctcgggacgcagcaccaaggcgatgtacgagcgcggtctggcgcacgtcacatccgacaccgtgtgcttcccggccaagctcgtccacgggcacatccgcaatctcgtcgacgccggcgtcgaccgcatcttcatgcccatcatcacgacggtgcccaccgaaaacaccgcctctaccagcgagtggatgtgcgccgtcgtaaagggatacccctacgtgatgcgcaattccgataacccggaggaacgtttcggcgttccgttcgatacgccgctgttccactggtacgacgagggcgaccgaaaccgccagctcaaggcgtggtgcaaggagaccttcgatatcgatgccgacctggttgccaaggcgaccgagcaggcggaccgcgcgcagcagacgtttgagagccagctgcagctgcgcggcaggcaggtgctcgagaacgtgcgcgaggacggcggctacgcggtggtgatcgcttcgcgcccgtaccacaacgacccgctggtcaaccacgggctgcccaagctcttctctgagcgcggcatccccgtgctgacgcccgatgcggtgccgggggtctgcaacgtcgatctttccaacagccgcatcgacatcgtgaacaactaccatgcgcgcatgctgtcgtgcgcggtcatcgtcgcatcgacgcccgagctcgagctcgtgcagatgggcagcttcggctgcggccacgatgcgtatctcaccgacgagatcgcgcgcatgatgggcgagatgggctccaaggttccgatgatgatcaagctcgatgagagcgacgtcgccggtcccatgggcattcgcgtgcgttcgtttatcgagtcggtcaaccgtcgtcgcgcggaggagcgtgccgagggcgcccgggtgcacgcggtccatccgctcgacgacccgtataaggtcaagtacaccaagcgcgaccggtacgacaagatcgcgctggtccccaacacctcccatgcgttctgcaggctcatgaccgcggcgatgcgcaatcagggcgtgcgcgccgaggcccttgatatcgggcgcgaggatgccatccgcctgggcaaacgctatgtgcacaacgacatctgcttccccgcgcaaatcgtgatcggcgaggcgctcgcggcactcgagagcggtaagtacgacccgcacgacgtcgccgtggtgactggcaagtatatcggcgactgccgcctgacgcactacatgcccctgctgcgccgcgcgctcgacgacgcgggatacgactatgtcccggtgctcaccaacgacgacgtcgatgcccacaatgcgcatccgggcttcaagctcggccttggcccgagcatccagatcgcctacggtcttcccatgatcgatgccctcgaggccatgcttaggcgcatccgtccctacgagctcgagaagggcgcggcggacgctgcgttcgaccgcgcgctcgatgaggttatcgagggcatggagcgctccgggctgagaggccaggcgacgggctttaaacgcgcgcttgcgatcatggacgccgttccgtacgaccgctcgaacccgcatccgaccgttctcatcgtgggcgagtacctgctcaatttccatctcggcgccaaccacgagatcgagcgctacctcgaggacaacgggctcgaggtcatcgaggcgcgcatgaccgacgtgatccgcaagacctatttctacaagcatgcgcagtcgcgcgagttccacgtcgacctgtcgctgcccgaaaaggcctggtacgccacagcggacaacctgttcgagctcgcgcacgaccgttgcgaccgcctgggcgcggcgagcccgctctacgagccgccgacgcgcatgcccgagctcgtgcgcgcgagcgataagatcctgcaccatacgttcgatgcgggcgagggcgtgctgattccggcggagatcctcgagcacgccaagcgcggctgccgcaacttcgtgatcctacagccgttcgggtgtctgcccaaccatgtcgtggggcgcgggctcatccatgcgctcaaggagcagtatcccacggcgcagttcctgccgctcgactacgatcccgacgtgagcttcgccaacgtggagaaccgtcttcagatgctcatcatgaacgccaaggcgcaggggtgcggtgaggcgcatggcgagaccgcgtaaggacgccgatgcgcccgatgcacgcacccgtatcatcgaggcgttttgggagctcatcgagaacaacagcatcttcgagctgtcggttggcgaggtgacccgcgccgcccagtgcaatcgcggaacgttttactactattttcacgatttcgatgaactcgtcgccatcgccatagcccagctgctgcaggataacgagctcatcaccgatgccctctggcatttttcgagcgagggcgacctttcggcgttcgaccggcgcgacgtccgctgcctgctgcggcgcatcgtcatcaccatgagggcgggtgccgccgagcaggtcgtgcagggcatccatacgatcatcatcgaccgcgtgagagagatcgtccaccccgacggagaagagctcaaggcagattcgagctttgcggtgggctttctggtctcgggcatcatgggctttgtgatggcggtcggctttgcccgggagggcggcgaggagatagacctcgagcggctgggggacagcgcgtgcgcgtacctgagggcggtcgccatgcagacggtggaaacggtcgcgcaagtcgagggcgtcgatacatccgaactgctcgaacgcgtctccaaggaggccgatgcctatcgcgcatcgcgtgcgacgagtcccgacgtggtgaaagacgcctagggtttctcttgcggggcgcctgtcgcgcatcgcgcggtgagtcccgcgatgcggtcataacctgcattcatgtgagccgggtttatagatattcctccagctgttaacatagacaacctgtgggtaaagagacaaaagcgccgccgacgggcgggcttttgatttcgatgaactcatgtaaggaaacgagcatgttagatagatttaccgatcgagcgcgcaaggtcatgtcgatggccaaacaggaggcgctcgatctgcactcaaataaggtgggcaccgagcacctgctgctcgcgcttgccaaggaggacgag

SEQ ID NO: 4421 - DNA, 2188 bp, Unknown
  16S sequences of unknown bacteria
ggttgcgatagagacccgcgggtaaaattcccatccgcgccaggtccagtgcctggggcaggaacgtgatgcggtccacctgcagggtgatctgcacgtcgctgccctgggccatctcgtaggtatggcccagcatcccaaagccggtgatatccgtgcaggcatgcacccggtagcggaccataacatcccgggccgccttgttcagcgtctgcatcatggtcagcgccagctgctccgcctccggctcgaccagatcgaccttggccgccgtcgtcacaatgccgatgcccaagggcttggtgtaaaacagcacatcgccgggcttggccccggagttggtcaacattttcttcgggtcgacaaagccggtgacggctaggccgtatttgggctcgtcgtcatggatgctgtgcccgccggtgatgagggcgcccgcctcataaaccttatcgtagccgccgcgcagcagctcatggactgcctccttcggcattttttccggcacggccataatattcagcgccagcttcggctcgccgcccatggcgtagacatccgaaagcgcattggtcgcggcaatggccccgaaggtatacgggtcatccgcgatcggcgggaagaaatccaccgtctgcaccagggccagatcgtcggtgatttggtagaccgaggcgtcatcgctcttatcgaagcccaccagcagcttcgggtcgtggtgcaccttgatatcatccaacagctgggccagcacacccgcgccgacttttgcgccgcacccggcgcatttggcaagctttgtcagcttaatattctcttccatggcttatttctcctttaatactcccgtcagctgcaggcaggcctgcaggacgccgccgccgacggcaatggctttatccgacgcgcaatagcagtgcgccagctcgcagcgcgggtcgacatcgccgctcttcatacctttgaaaactggcgtctcgtccggcaagatcccccgcagcacccccgcgatagtgcaccgcatgggaacgccctcaacctctccggcgatatcccccgcctggaccattgcgccaatctccaacttctggcggaatatgccatccgccggagcccgcaggacccgctccccggcgtagccgccgatgaggcccgggatattcgtattgggaatcggttctccgtccaggatcacacggcccagatagtgcccgcgcatcgtctccacgacagcatggcaatcccgcccggcgtaaaaccccggaccgacgccgatgaccaccggggcgtccgtgatctttgtcccaaggtttttcttggccagaatggcatccaccagcacatccggcttcaaaatagggatgctctccccttccgggtccgccagaacaggaatacagccctgggccagaatttccggcacctgcgccgtcgatgttgccttcttagccgtcacatcctcgaccttctgtgtcccaaagcgaagcgccggggaaaagcagaccgtccggcggatggctgtcggattcggcaggtccagcatcgccacctgcatcccgctgcgccacagccgcagggcgatgcccgttgcgatatcccccgcgccgcgaatcaaaacaaacattgtgtcccctcctgccgcatgcagccaaatacaggtgcgaagcggcgctttagttatttcagctaaaggataacacttattttcgtctaggtcaagttcaggattgacatttgcgctgccccggtggtaaactagctttatgaacgatacactacaccccgtcctgcggattcaattctacgccaaggaaaaaagctttggcccgggcatcgcaaaattactgcagcgagtggaagatcggcactccctgcgtgctgccgccatgtcgatggacatggcctactcaaaagcgtggacgatggtccgcagctgcgaggctgccttggatatgaagcttttaaactactccaccggcggaaaaaacggcggcggcgccgttctgacttccgaggcaaagcagcttctgcaaatgtatacgacttattgccaggagctcaacgcctacgcgctgcaaaaattcgacgaagaatttggccccctgctgaaataatttgatctgcacacacaagcggcagctgcaaaacgcagctgcctcctttgttgttgtgacgaatcatacacctg

SEQ ID NO: 4422 - DNA, 1800 bp, Unknown
  16S sequences of unknown bacteria
tcggtcgatcctcctttttgtttttcgtttatttcgcgtattccggcggagcggggcgcacggtgtctccgtggggaagcttgtcctcacgctgctcgacccacttgttccatgcctcatcgtctaatttctcatacatatagagcttcggccatgtgaaggattcaagattgtatccggcatttttcagccgctccatcgcaagggaataacggccgcggagcacgccgagacgcgcttcgtctccgtcgtcgtatgccttgaagaaggacgaatagcatccctgatagtacacggacgcggagaggatctcgcagcgcatgcgctgatctttgaataccgccgtctcgatcgcacgctcgataagctcggtcgtgcagtcgaacatctccgccatgtaataaggatcgtagtcgccgtttgagcttgcatagccccagcagtcccagcatgcgttatcgagatcctgcgccttttgcagaatatcgatgtattcttcaacgtacatccagccgtcgccgtaatagagctcaagcgatttttcggcaagtctgtcgtactcctcgcgggtcatgtccggattccagaacatctcatatgcaagctgctgattaaggtgattgaagctcaatgcctggttgtcgctgttgaagaagataccctgaacgccgagttcaaagaagaacttcatgtcatcgtacagattgtcaagcaccgtgtatgtctgaagattttgctcgagcaggtagtaccatacatagacattgtcgcagatgtcgcaccagcccctgagccagtcggcaaaggtgttgttatcgactatcttaagatcggtcactgcgtacagatcgtgcttttcaacacattctccgcctctgaacttgtgggcggagcagttgccgttcggagcatatgtcacgcgcacgtcgtggtttaagcgagtcttgcagggcggctgggttcccatgtatgcgtatatcagatacgcaagtccttcgtattcttcgttttcgcttatttcgtcgtccatgcggtttgcaaagcgcacgacggcaccggaggtcgcaccgttttcctccttggcgaccttcaggcattccgtgcagcggcagtatccgccgttgtctccctgagcaatatcaacctcaagaaaatcccatccgatgacggagccggaagcaagtctgtcgtcgatgtatcttattatgctgtcttttacgttgtagaatatatcctcgttcgtgtagcagatctgaatgtatgaaacattgtacccgccccaattgtaattctgaaagccgtgattagctttcggaatggatccgtaggaattctgcgcaagggacggagaatttcggtcgacggtgaaacgtgctgccggaggagtctgatcctgatgcatgatttctatgaattggaacgcgagcgtttcggacttgttgatatctgcgggaacgtcaatatgatcggattcgagaagcatggtctgtccgtagccgccgagcgcgagccagccgcactcgttctggaggaaacgccacacaccgtacatgcatccgcgcttcaccgcgccttcgattacgaatctgtcgccctcgaagaagtagcggtaaccgtcgtcctttagctcggcgtcggtcgaatggcggaattcgatgaccttggcggcggaggtgatcccctcggatgcggcaaggtcagcgccgcatgcctgcttgacgaggcgcgtgaactcggagatcgcaaacatcatgttttcgttgtgctctgcggggtattcgatcttgtactcggagatgt

SEQ ID NO: 4423 - DNA, 32759 bp, Unknown
  16S sequences of unknown bacteria
ctcatagaacaagggggcccgaggcccccggggaccggttgggcgcggggctgaaaaaatgcagcaaccccaagcctcggggccgcagccccttttttgtatataggcgggttcgggcgtccgccctcccgccggctttcctaaagagaactccggaccggcccctgaagggctctctgcaccggcaagctttggggccggccaccgccattgtggagtcccacaatggccctaaaaatcaaagcatcaggtgttccaagtggctcccccttggcacgtctttgccttctttcttcgtgcgaagaaagaaggtggccgacaggccagacttttgttgcggtttgtccgcgctttagctcgtagccacataaggaagcaaaaacgccgccgggagcttcgcccctggactcacagggaatgcagagccgccactcacgcaccggagcccgtttttccggacgccctcacggtaaaccatttgccgttgatctcggaaggcatgctgatctttttgatctggatgtcgttggcctcaccaaaccattcaatgacccaatcctctccgatccggcgcagacggagcgcataataccgcgtctcgtccccggccgccagcttatacatcagatagcgggggttgttgtcctccacgtcctcgaccgtcgcgaagccttcggctccattccagtatttcggggtatattccttgctgatctggaaccggacctcgtcgcagctgctggctggctccggaatctcatccaaaccttctccaaccccgtccgatccattttccaggacaaaggctttgaaatcgtcccaggactggtcgccgaccagcacccggctgtgctccgtcgcgaccctctcgagaaaaatctcgaaacggtttttcatcgtcatctgataagagacggtcagaaaggtgccgatgaacaggcagatcaccaggatgacaccgaaccggacgggtttgaaccggatgggatccggcgggcgcctgacccagattttccggatgttgaaggcgaccagggggacgatagagagcacacccaacaggatatagataaacagcgcggttttcatgccctgtccccctttataatactttggaaaggaactctttggtccgggcatgctgcggatgtccgaacagctcgccgggggttcctttttccgtgatgatgccgccgtcgataaagaagatggtgtcccccacctctctggcaaagcccatctcatgggtgaccaccaccatggtggcgttgttcttggccagctgcttcataacctcgagaacctcgcccaccatttcaggatccagtgcggaggtcggctcgtcgaacagcagcacgtctggatccatcgcgagggcgcgggcgatggcgacccgctgcttctgcccaccggacaggcggctcgggtattccatcgccttgtccgacagcccgaccttgttcagcagctccatcgcgagctcattcgcttcgttctggggcatctttttgagcttggtcggggccagggtgatgttgcgcatcacggtcatgtgtggaaacaggttgaactgctgaaacaccatccccaccttctgccgcagcttatcgatctggcgcaggttctgcatcaccgagatcccctcgatgacgatatcccccttcgtcgggacctcgaggaggttgatgcagcgcaggaaggtggatttgccgccgccggacgggccgatcacgcagacacactcgcccttgtccacatgggcgtcgatccccttgaggacctcgagttccccgaaatacttgtggagattctgtacgtcaatcacttctacgcatccgcctttccagagtattcagcccggtggagagcacggtagtcatcaggaaatagatatacgccgcgcagagcagggggacgatatagttgtaggtcacgctgcccaccgactgggcgcccttggtcaggtcggcgatgccgatatagcccgcgaccgaggtttccttgagcaggacgatgaattcgtttccgagggccggcagcacgttcttgaccgcctgggggatgacgatgtggatcatcgtcgatccgcccgacaagccgagggagcggccggcctcggtctgtcccttgtccacggccaggatgccggcgcggatgatctccgcgacgtaggcactcgagttgatgccgaaggcaatggacgcgataacgacatcggagaccccgctgaacagcgggagcttgttgaggacgcggagatagaggatgaaatagatgaccatcagctggacgacggccggggtcccgcggataaccgatatgtacccattggcaaagcccgccaccattttgcggatccagatcaccaccggattgccggtgagattatccacatcctgcagcttggcgatggcgagcagcaggccgaggatcacgccgatcaccgcggcgatcgccgtcagctccagcgattttccgagtccgcggagcagctgcttgtactgatcctcttgaatcagtgtcacataaatggcgttggcaaacgaatccgccagattttcaaaccagtgtacgacagcccccaagaccgcccctcctttttctcctgtcccgacaaaacggggaaaagccggccgttgggacacagccggcttttcgcgtcaatgttttatttgctcgggatgtatttctcgacgattttgtcgaaggtaccgtcggccttgatgtccttcagcgcctggttgatcgcgtcgagaagttccttgtttcccttcttgacggccagcgcatattcttcttcgtcaaacaggccctcgagcagcttgacggcgtcgccatgctgatccttataggccatagcggggtttttgtcgatgatgacggcatcgatctggccgctgaccagtgcctcgacggcgagagagccgttattgtactgggtgaccttggccgcgtccgtgacttcctcagccttgtcttttcccgtggtaccggactggacgccgatcttcttgcccttgaggtcgtccagggtggcaatggtgctgtccgccttcaggataacggtctgggtggcgttgaagtatttatccgagaaatcacaggtttcttccctggtcggatcgatcgtaaagccggcggcgatgacgtcgatcttgccaaaggactaggtcagggactcgaacgccatgtcctcaatttcaagcttcagttccagcttgtcggcgatggccttcatgatgtccacgtcgataccggcaaagccggtgccctctttatattcaaagggcgggaactcggcgttggtccccataatcagggtgccttccttaacgaggctcagtttcgttccccctgcggaggctccattcgaagcaggagccgacgtaccggcgcccgtatcggcgccgcaggcggacagggatacagccgtcaggacggcggccaggccaacagcggccaatttcagcagctttttcacacaaatctcctccaatagtccaaaatgggacgttcaccacatgatcgtcgtttattatataggatacgaagctgaaaatcaagagaaaaccggcgcttttgcaggaaagtgccgtgaaatggggcgcatatcagggcagatgctgcaaaaccaggctcatcacctgtctggcggccacaagccgtgcatccccttcgtccggcaaaccgaccgccacccccagcatatagggttcgcggtacaccaccagcatcgccgcgtcggcgctccaatagcccgcctcccccaggttcggcgcctcggtgaggtcggcatatccctccttcatctcgtcaaactcggcccggctcgcgtccgcgaccatgatatcgacgaaatgccgcccgtcctcagaggcaaagcggatcatcggggcgtcctggtagtacgcctcagggccggtgacggtctcccccaaagcctccgacacctccgccgccgtcagaagggtttcgatatcaacgctgacaaaggtcgggttggtgatctccggcagggtttcggacacctccgagctgcccgcgtccggcggctcctgcttgcaggcggcgaggagcagcagcggcaccagcagcaccggcaggatccggcaaatccgtttcatagatactctcctttgcggaaaaatggccgaagccgtcgaaaatcagtataccataaatgcagcggtcccgcaaccgccctcgcgggacaaagggcccgatccgccatctgcggccggcgggcacgatgtcctcagccttccgtcggtgcgaactgggaattatagagggtccagtagaatccccgccttttcagcagctcctcatgggaccccgcctcgaccacatcgcccttgttcagcaccaggatgatatccgcgtcccggatggtggaaaggcggtgagcgatgatgaacgtcgtcttgccgcgcatcatgttgcggaaagcccgctggatccgcatttcggtcaggatatccaccgagctggtcgcttcgtcgaggatcagcatgggcgcgtcgagcagcatggccctggcgatggtcaggagctgtttctgcccctgggacaggttgccgccgtcctcggtgatcggggtgtcgtatccctcgggcaaacggcggatgaagctgtgggcgtgggctgccctggcggcggcctcgatctcctcgtcggtggcatcggggcggccgtacgccagattctcccggatagttccggcaaacagccaggtctcctgcagcaccatgccgaagctgcggcgcagggaatcccgtgtgaaggtcacaatcccacggccgtccacctcgattgtcccgccgtccacctcataaaaccgcatgagcagattgacgagggtggtcttgcctgccccggtggggccgacgatcgccacggtggtgccgggctccaccttcaggttgaaatccgaaatcaagggtcggtcgggggaatacgcgaaccgcacatgggaaaacgcgacggcccccgcagcgttttccagcactgcggcgccctccgcctccggttcttgttccggttcatccatgacggcgaaaacgcggcgggccgacgccatggcgagctggagctgcatggtgatggctgtgatctcgttgaacggcttggaaaactgcacggtataggttaaaaagctcgctacgccgccgatatccaggctcccccgcagcaccgcgaggatgccgaataccccgacgaggacatacgcgatattggtgacgaaacgggtggacggattgaccagcgccgaagcgaactgggcccggtagccgcactcgtacagctcggcattgatttcacggaaccgctcgaacgaacggccttcatatccgaacgccttcaccgtctgctgcccggtgatcatctcctcggcatagccgcccagacggccgagcacccggctctgttcccggaaacggcggctgccgtaacgggtgatcgcaaacccgaccaaaaagcagagcggcgtgacaaacaccgccaccagggtgacgagcgggttgagggacagcatgaacacgagacagagcagtaccgtcagtacacccgaaaccaactgcacgattccctggttgaggccgtccgaaatcgcgtcgatatcgttggaaaaccggctgatgatgtcgccgcgggaatgggtatcgaagtatttgagcggcaggcggccgagtttggcgaagagatcgtcccgcagcgcgcggaccgtccggttggccaccaggttcgcgcacagagcggtcagccagttgaacaaacagcctacggccaccacggcggcgatgaggaggagggtgcggatcagggccgcccagtcggtcgggccgccttgaggcatgatcagattgatggcccggccgacgagcttcggcgcgatcaggatccccgtattgcccaaaacagcgcagaagaacacaccggcgagcggccatttgttcctcccgaccacccccagcaaacggcggagggggtcggttttcgtttttgatgctttcactgcccattccccctttcctgagaatggcagatctcccgatagggttcgcaggaggcgagcagctcgtcgtgagtccctgccccggccaatatcccgtcgtcgagcaccaggatccggtcggcgtttttgacggcgctgacccgctgggaaacgaggaacaccgtcatcccctccgccccggcgacggcacggcggagagcggcgtcggtcgcatagtccagcgcactggtggaatcatccagaatcaggatctccgggcggcgaacaagggccctggcgatggttaatcgctgacgctgcccgcccgaaagattcgccccgccccgttcgaccggggcgtcatacccctccggccggctttcgatgaattctgccgcctgagccatggccgcggcggcgcggatctcgtcttcgctggcgtcttcccggccccagcggatgttgtccgcgacggttccggaaaacagctccacccgctgcggaacgaggccgatttttcggcgcagggccgcaacggaatacgcccgcacatccacaccgccgagcagcacggtccccttcgtggcgtcgtaaaaccggacgataagcgccatcaaggtggactttccggagcccgttccgccgatgacccccaccgtagcaccccgggggacagaaaatgaaatgttttccagggcgctttcccccgtgctgtaagcgaaatcgacatcccggaactccaccgccggagcggcaggatcctccaccgcggtatcctccccgtcccggatggagggctcggtatccagcacctcggccacccggccggccgaggcaaacgccctcgcaaacgtaatcaccagattggccactacgatcagggcaacgaggatctgattgacataattgataaacgcgatgatctcccctgtggtcatcccgcccgcttcgaccctcaccccgccaaaccagacgatgaacagtacggcgaggttcatgatgaactgagtcagcggattgaggacggcggagagcttccccacccgtaccgccgcatcggtatgggatctggtcgcctcgccgaagcgggcctcttcttctcctgtgcgggcaaaggcgcggatgacccgcacccccgacagattttcccgcaggatccgtgtcagcgtgtccaggcgtccttgtactttctgatggagcggcacggttttgcgcatgatgaaaacgatgaccagcacgaacaaggggatcgccaagatgatgaccaaggccagcttgaggtcgatgatcatggccatgacaatgccgccgacacataaaaagggcgcccggatcaccaaacggataagcatggccacagcgtattgcagctgattgacatcactggtaacccggttaatcagggagggagtaccgaaacggtccagctccgcgtgggaaaaagcggatatccgccggaacagggtgttgcgcagctcggtgccgaagccctgcgaggtgaccgaggcgacatactggcaaaccagggcgcagagcaggccgaccgtgacgattccgagcatcgccccgcccatccgcagaatatagccggtgtcccccttgaccacgccttcatcgatgacacgggccatcagcagcggcagatagagctcaagcaccgcctccgccagcttggcgagcggccccacgatgcactgccaggtatagggtttcaggaatttcgccagtttaccaatggccaaggacagccacctccggtaatcgccccgacgggcgcgtttgagggttattgtaccacgtttgcgcggtttatacaaccaaccgcccttcctcccttttttccatacgtgttgccggggtttaagcccgccgatttcctcaataaccgcagacgaaagcctctatgcctgttctggatgaaatcgtcacacaagaacagatggaagaaaagcggattgggctgtctcgtgaggagcggacggttttgggagagagccgggcagccgaacatatagagtgattgcgtcccgctctgcggcagagacgcacagacggccttctgggatcctgcaggaaaacgtctcttcaaccgattggtctcacatcataaaattccacacctcgtttcgaacaaaaacagcaattcgtgaccatttgtgtgtttatcacacaaaaaccggcatccccatttggtgtacttggcgacgtgtttcccatatatttccacaaccgacatatgccgacacatttctcttgccaaatagccgttttttcgatacaattattttatgtctctcctggaaccgtcgacgcctctctgccctcacagacggggagagggttgaagtgccgaattttctgcctatttgccatatgaatcccaggtcacggatcgtcttgagtgacccggatgtgttgctcattggaaggagcggtgcccgacatgctgtggattatgctcggatgcgccgctttcgttctgtttttcttttacgatatcgccggcgcgaccggccgtttctatccgttccggatcggctttgccgccgggtgcctgctgctcctctcctccaccgccggccttgtctggcagggactgtgggggaggcatatcgtctggccggtttttttcattttcacccttttggcctttctttttttagtactgctggtttataccctttttttcgccctgcccttccatgacacctatatccatgggacaaccgccccgtctctatgccgcagcggcgtatacgccttgtgccgccatcccggcgtgctctggctgtcggggttttatctatgcctgtacgccgccctggggactcggatgcttctggcggcgtttgttgtctttactttgttcgacatcgcgtatgtcgtgtttcaggaccgctggtccttccccaaacagttccccgaatacgacgactaccgccaatccaccccttttttactaccgaacgtccggagcatacggcaatgcgtccggacatggcgcggaacgggagacggttcgcatgaagtttgaagaaaaactgaaaaaacgccagtacgaccagatgtggagcgaatattgcggttttctagatctggatatcgacggctatatgcgcatccagacccgtctgatggaagagcagatcgccctgtggagcggcagcgccctggggcggcggatcctggatgacaagcatccgcggaccatcgaggaattccgccgggccgtcaagctgacctcctatgaggactatgcggacattctcctgcaaaaacggggggatatgctgcccgacacccctattgtctggattcagaccacctgggagggcggacgccatcccgtgaaggtcgccccatatacgagcggcatgctggatacctaccgcaacaacatactggcctgcctgatgctgtccaccagcaacggacggggcaaattcaatgtccgcgccaccgataagatcctgtacgccctagcaccccttccctacgcgaccgggctcttcccgctcgcgcttggcgaagagatcggcatggaattcctccccccagtcaaggacgcggtcaagatgaccttcagcgaacggaacaagctgggctttaaaatggggctgaagcgagggatcgagttcttcttcggagtggggagcgtcgccacctacgtcagccacagcctgtcctccatgggcggcaaatcctcctccggttcttccggcagccggctggctggcctatcccccctgcgcctgctccgccttgccgccgccaaataccgctgcaagcaggaagggcgcgagctcaagccccgcgatctgttcaagctcaagggctttatgtgcgccggcaccgacaacgcctgctacaaggacgagctcgaggagctctggggcgtgcggcccatggagcttttcgcggggaccgagccctcctgcatcgggaccgagacctggacgagggacggcatgtactttttccccgacacctgcttttatgaattcatcccggaagacgagatggagaaaagcttcgacgatccctcttatgagccccgtacctatctgatggacgaggtgcggccgggcgagaaatatgagctggtgatctcggtgctaaagggcggcgccttcatgcggtatcgggtgggggatgtctatcgctgcatgggcctggaaaacagcggggacgggaccagaatccctcgcttctcctatatcgaccgcgttcccaccatcatcgatatcgcttccttcacccggatttcagaggcgaccatccagtccgtcatcaccctgtcgggactgaagatccgggactggatcgccatgaaggaatatggcgcgcgcaagcgcccgtatatgcatctgtatgttgagctcgaccccgatgccctggccagcagcgccgtcacaaaggagattctgcgggagcatctggggatttacttcaaatacttggacaacgactacaaggacctcaaacggctgctcggtatggagccgctcgagatcaccatcctaaaatgcggcagctttgcggcctacacggcaaaaacgggtaagcggctgcggcatgtcaatccctcggcacacgatctgaaagatctggttgggtaaattccgcccgccggcaaggaggtgaacaggaaccatgggcgactatattgcagtcccgattaccgcgctgttctgctacatattcctgttcatgaccatgctggccgcgcagaaaaaccgcatcatcaactcctttttgctgatcctggtcgccctgcttttctggaccggcggctccttcttcatgcggatgcagttctggccctccatcaaggtctggttcgatatttccattctgggcctgctcctgctgggcttcgcgttgttcaatttcgcctaccagtacgtcggatgcaaaaacagggccgtccagctcttctggttcatgaccaccgtggtcatcaacctaatcaacatctgcaccggcgtctttctgcgggagcccgagctggttgagacggccagcgggcagacctctttcgtttacaataccacctggcccgtggtggccttcttcatcttctgtacggccatcatcgcccacatgttcgtccttcttttccgttatttcaaggaccacgaggtcgcccgccgccagttccatccggttttggtggggatcgggttcatgttcctcggccatatcgcctttatcttcccctttttcaaaggcattcccaccgatatcatcgcgggggtccccttcgcgttctgtattttctatgctctgtaccgccggcgtctgttccgcctgaccctcctggcctcccgcggaagctgctacgccctgtcggcggggctgtcggtgatcgtgttcatcaacctcctgcgtccgctggccgatttcatccacgcccaattccccatgctcggagaatacgacaccctcatcatcgctttgaccttcacggtgttcacctgtttggtctacttctgtatgaagaaatttatcgacaatgtgttcgtcaaagaggaaatcgtgcaggcggagaacctcaaggcgttcagcctcgcggtctcccgcagcctccaaatcgacgagatcctgaacggcctggtcgatatcattcagaaaaccatcgcggtggaacgggtctatgtctgcgtccctgcaccggacaagcagtcctaccgcatcatccgcagctccagcccactggaccgccccgccttttcactggggcgtgacaatccggtcgtgttgtggctcaaggagcacgatgaatgcctcctgctcagcgagttccgcaggaccaccgcctataaatcgatgtgggaagccgaaaaaagggcgctcgaggaccttggcatcgaatgcctctcccctctcaaggacaaggattcccttgtggggatcgttctgctcgccaccaaggataaagggcgccggtacagctatgaggatctcaacttcctcgcgtcggtgaactcgatcagctccatcgcggtgaaaaattcccgcctttatgaacgtgcctatctagaagcccggaccgacgaactgaccgggctgctcaaccgcaaatatttctatgagaccttgcaaaacgcctatgacgagcatcgggatgagggtctctccctcatcatcctcaatctcgacgatttcaagctgtacaatcagctctacggcaacaaggaaggcgacatcgccctgcagaaagtagcccgcctgatccaggcgagtgtgggagagcacggccatgtcgcccgttacagcgggaaagaatttgcgatcatcctgccaggctatgacctcctctccgccaaggagctggccgagaacatccggcagcaaatcctcgatatgaacaaggccgccaccgactacaccctcaaggtcctgaccgtcagcggaggggtttgcgcgatccctcacgcggccagcacggtcaaggagctcatcgataacgcggacatggcggtgtatcacgtcaaacacaacggaaaaaacgccatcctcgcgtatacgaccggggattaccgctttgaaaaagcatcgccggaaacagcggaccggcacagtgcctattcggaatatgaaagtacgatttacgccctgaccgccaccatcgacaccaaggatcactataccttcaaccattccaacaatgtcgcccattacgccacggagctcgcacgcgccatccacctgaatgcggaccatgtggaaatgatccgggaagcggcgctgctccacgacatcggcaaaatcggcattcccgaacatatcctcaacaagcccggccgcctgaccgaggaggaatacgaggtcatgaaatcccacgtggaaaattccattgggatcatccgccatctcccctccctcgactacgtcattccctctgtgatcgggcatcatgagcattacgacggaaagggttatccccgtcggatcgccggcgaggatattcctctcggggcccgcatcctctgcatcgcggattccttcgacgccatgatctcgcagcgttcctacaaacagccctaccccctcgagaaggcgctccatatcctgctggaggaagccggccggcagttcgatccgcagcttgtccctgtgtttgtggagcttgtccgcagcggccgcgtacaggtgccggaaaatggaacggagccctcctgagatgcataacggataaagtaaaaagcgctttcggaaaaccgaaagcgctttttatcggctctcaagcggttatctgtcatggttacgcccgccttcgcctgcaccggcctcttgaaaccctgtcggggctttctctatctcgagtcgttaaaaatccggcgccggatccgaagacccgacaccggaacgtgaaatgggaggcgtaatcaagcggcggccctgttcaggcgcctcgattcgagtgcgcgcagtttggcgcgcgcggcccgggcgcgtttgtcgctcttggcacgggcaagggcggcgtcacgccgcaccgccaagacgcagcacaccgccaccgccgcacgggccagtaccaacaggacacccaaaaccggaaacgccaacgtatccaaaaccccggccaaaaaaatctccataccgcacatggccagcggaaccagggacagccgccgggtggccgcacagcgggagccgcgcagtgtatacagaaacaggagtcccagaagggccacatgaaatagattgatcaacattcgtctcatcctttcagcatttccatgcagaacaaacgtttaccacgccatcattatatcaggatgaacggcaaaaagcaagaggaaatcgaatatttgttcgatattttttgtcccactttgcaggaaaaagcaggagacggcccccgtaaggaccgtctcctgttcttttgtctttatggctctttcccctcatcgctttcgggggcggattctcttgtgggatcctcagattcagccgtttccggatcggatccagcctcttcttccatcatcgaggcgtcctctgccgccgcatcgggcgcctcagcgggcgacgcatcggacgcttgttccgtttcatccccatcctccccggctgccagcggggcagtgggcgccggctcctcgacgaacaaatctttgggtgaacgctgctccatggcccggaagacaaaaagcaggatcacaccgccgatgaccgaaaggatcgcgaggagctgcgacacccgcatagttccgagcatcaggctgtcggtccggagcccttcgatccaggcccggcccagcccgtaccagatgatgtaggaggcaaaaatctgtccccggaatttatagtatctcttggacagaatatggagcagcaggaaccccgccagacaccacagggactcgtacaaaaacgtggggtggaccggctgagacagtatatagcctgacccgttcgctcccgattggatgatgtcccccgtcatcccccagggcagactcgtgttggcgccgaaggcctcctggttgaaaaaattgccccagcgaccgattccctgtccgatcaggaacccgatagacgcgaggtcgaacatccgcagggtgtcgaccttccgcaccctgcacatccacagggcggtcaggaacgcgaagatcaccccgccgtaaatcccgagcccgccttcccaaaccgcgaaaatcgacagcggatccgcaaaatattgggcccgttcgtcagagaacaggacgtaatacagccgggcgccaataaaggcgaaaatcgcggagacgagcacgacgtcgatcatccggtcgggatcgatcccaaagggctttgcacgcttgagcccataaatcattgccagaaggaaccccagtgcgatgaggaccccgtaccacttgacggtgatcccgccgccgatcgggatggtgaagatgtccggggagatcgggagccgccatcccagacccggaaattcaatgaaatgttgttccatcggagcgtgacatcctttcctatgtaatgggaagccgctgggggctccccctttcagccatccatcggacggatgaccgacagcgtgctggcctcgtcgtcgaaatcctcccgcagccgccgatagattgattgtatatcaagatgggcggccgcgtcaagcagatcaaaggggttgcgcccataaaaatgcccacttgccagcatttcgccgcaattttccacactgtcgagccgcgcgaccaggctcccatacagagcgctgcgcgcggcgagaaagtccttttctgccacgccgccgtccgccatacggcgcacctgtgcacggaacgcctcacagacggcatcgggatcccgcgactctccgccgatcagccaggcggcaaagccgggcccgtcgaaataatccacgtcgaaggaggtgttgaccagcccctcgtccatcagccgcgcgtaaagtgcgctcgaccggccgccgagcagctccgcgagcaccgcagcggacacggtttcctccggtgtggagcagcgaacgccgctttcggacggcatcggcaccttataccccagataaaacaggggggcggccaccagcatccggtcttccacccgggaagagacggcttcgcgcggctccgaaaagggggcccgttccacccgacggtccgggccgggtctcagcatccggtcggccacccgcagcacctgctctggtgtcacattaccggataccgccagcaccatattgtgcaggttatagaaggtctcgtagcatccgtacagcagttccggcgtgatctcggcaatagactccaccgttcccgcgatatcgaggcgcaccggatgcaccgcatacagacccctcagaagattgaacagcacccgcctctcaggattgtcctcgcacatccggatctcctgcccgatgatcccctgctcctttttcaccgtctcctcggtgaaatagggggactggacaaaatcgagcaggatttccagggattcctcgaagcggtcggtacaggaaaacagatacgccgtacggtcgaaactggtgtaggcgttggcagacgccccggttttggcataacgggaaaaggcgtcgccgtcctcactctcgaacagcttgtgttcgagataatgggcgattccggccggcacgacggtcggcgcggcgtccccctggcgcatgaaggccgtgtcgatcgaaccgtaacgggcggcgaaggtcgcgtagcaggccttgtagccgggttttggccatacgtagatcgaaagccctgacggatgccgcagacggtaacactgctcccccacccgggcgttcgtcagttttgtccattcaggcattgtccgatccctcccctcccggctcctgcgtgagcagatagacgctctcgagcgtcacccgctccgccgcggcgaccacccgctccctggttacggctgccagggccttcgacgcttcctccggcgtggatacgccgggaaggaggcattgccccagataccaggatgcctgcgcgccctgtgagtcccccaccgaaccaaacgcctggcaggcgctgcgccgggcagattcgaggtcctcttcggtaaaatctcctgttttgagggcgtcgagctgccggaggatttcctccttcgcccggccggcgttctgcccgtccaccccgctgtccaccaggaggatccccttgaggcggtcataagacgaggcgcaataataacaaaggctcaatttttcccggacattccggaaaagcagggaatgaggggtcccgccgagcagcgcattcatcagccgggccgcggccacatcaccgtccggttcggctgtccccgcccggaaacccaacaccagcttcgagccccggacctccatccgctccacccgctcccgcacggccgggtaagacgccgcggtaaccgtcgggcaatcgaggggtttgcgtccaggcacaccggccagtgcctcgcgcagaggcccggccgcatgcatcaccgcggcgccaccctgcagtatcagctgaaccctggcccccgccaaaacacggcgccaagtcccggtcagcgattccggagtcagggcggccgcggcttccggggaaccataccggtcgactgcgtacgcttcgttttcacacagcagctcttcacagcggcggcgggcataccaccgtttgtcgttgatttcggcttccatccgttcgatcaggcagcgcttctccgtccgaacgtcggaggcgcggaagcagccattttccaaaaccggctcaaacagcatctggcgcaacagggccgcgcagctttccgcgaccggttcccccgccagggcaaagcggtcgtcaatggccgcggcggtcagaaccagtgcttgtgcctccccgatccgggcgacctctgccgtgatcgaggcgccgtacagctcgttgagacggcgctgcagcgcggtgaaatccggataagcagcgcaggagcgccgcagcagatagggcagcagtgcgccggccgacgcggtctcttttttcaagggcagaagcagcgcgactgtcagccggcttgttttgaagcggctatccggcagcgacaggcagcggaccccttccgccaaaacttcattgatgagctgcacgtccattccccctattgcggattccgtcgatagacggatatcttagtataccaaactttggcaaaaaagaaaaggcggaaaatgttatccttcccggcgcagggcctcgaccgggcgcagacgggaagccttgaccgcgggatatacaccgaatacgcagccgatccccaccgcgaccaaaatcaacacgccgaagctgcccgccggcagggataccggccagccgagcagcgccgataccaccgccatcaacccgcctcccagtgtcaatccggccaggctgccgatcagggaaatcaccgcggcctccatcagaaattcggataggatccgccttcgggtcgcgccgatcgcttttttgatgccgatttcctttgtgcgttcattgaccgatacgagcataatggtcatgatccccaggcccgacacaaccaaggagaccccgccgatcgcggtcagcagcatggtcaccagatccatcagcccgcccagccgttctttttgaacagcgaggttatccgtccggtatccatccgcatttccggatgaacgttccagcgattccaggatgcggatttccgcagtatccacgtcggcctccgctttgacccgcaccgcgatctggtcgaacccgtcccgggcggtcatggcctgcatggtggtgtaggggatatagaccattcccgggatcatctcggtcaggttttggagcaggctgctccctgtctcggtcacgccgacgatttcaaagtcctcgtccacgccccctaaattcagggagatggatttgcccacgatattcccgcgtttatagcctgcgagcgcaatcgactcgtcgacgacgcagacgcgggcctgagccttgacatctccccggctgatcagacggccatgcttgagggtcagggaaatcgcctgggtagcacccgcgtcaatcccgcaaatcagcgatttgtcggacttgtcccgcaaggtactccccgaaaattccactaaaaggggcatcgccgtctccacggcggagaggccgcggatggtttccagatcgcgcgcggacagcatcgtcccgtcgcccgccgtactcaccgacagcccgcttacgccgaggctgtcgagctctgcgttaaccgcggcgcgtcccagggaggcgatcatcgaaatgatcgccaccatagccacccccaccgtgatcccactgacggtcaggagggtacgggaccattttcgcgaaaggctcttgaacgcacaaaccagtacatccctcatgcgtcgccctcctcccggacaacgacggccgtcccgtcccgggcgatcttcccgggatcgaggatgaccgtatcccccgcctgcagcccggacaccacatggaaaccggtgctccattcctccccggacacgatatcccgccggacagcccggccggccgtataggcatacacatattcgttcccctcctcatcctgcaatacacattcataggggaccaccagcgcgtcgggggtggaggagacccggaccgccgccttggcgttcaggcccacccgcagcgagggatccatctggtcctggtcgaacatgaccaccgcatccaccacggtatcggtgaccgtcccgacgatctgctgccgggcggaggaggccagttcggtgagcacaccggtgtaagagggcttccggaatccggatcccgtaatggtcacccgctggccgatcgccaccttctgcagatcctgctcccggaccgcgatcttcacccgcagcatatcgctcgacgcgatgacggcacagggcttggaggtgtccgtcaacgaacccgaaacgacatttagggtggaaataatgcccgaggccgtcgccgtcacctcttttgtgatcaggtcgtcggtaatctgagacgcggccagtccccccgcctgcgccagcacctgcttcgtcgcgcccacgtcgaccgtgaagaggacgtccccctgcctgacctcctgcccagcctgcacgtaaacctcccccgccacgcagggcatgtccagatacacgttctggcttttcgccgcctccaccttgcccgaacagctcaccgtctgctcgacgagctggggctggagcgtgatagccgtcacttccacaggcggttgctttgcaaagcgcccgccgagcagaatccccgctatggccgtcagcgtcagggagaacagccagatatactttttcttcatttttccaaccacgcctttccagcatccgtcacacacctcgcgcaggcaccgggagaaacggcgtccgcgcgtcctatttagtctttgatggaagtggaaaaatatgaggggcagaaactgggaagacgaatttttctgaatacggatatttactattttcgcgttctgccgggcaacctaaaatacccgcctaagcggttgcagaatccgccccggtgcggtataataagcgggacttcaaaaatgtggaaaaggatgccggtcggcatcctgtgggaggaatcagcatgttgagggacgagtggaaaaggctcaaaagcggaaccgatatacgaggtgtggcgatggacggcgtcgagggacagcccgttcagctcaccgacgagacggtcaggcggatcgccgcggcattcgccgcgtggctgtcggacaaaaccggaacgccctgccgggagctgactgtctcggtcggacgggacagccgcctgtcgggaccccgtatccggaacgcggcggtggcagcactctcggcgtcggggatccgggtgctggactgcggcctggcatccacccccgccatgtttatgaccacggtcgatctgggctgcgacgctgcgctgcagatcacggcaagccatcatccctggcaccgaaacgggcttaaattctttctgccgtcaggcgggctggaaggctccgacatcggggccatcctggcctatgcccaggatggccgccgtcccgccggatttgaggaaggagcgcccggccgggtggaagaatccccgtatatgacacgatacgccgcccgcctgcgccgtttgatcgtggatggagtaggagatggggagaggccgctggagggctttcatatcgtggtggacgccggcaatggagcgggcggcttttatgccagagcggtgctcgagcctctcggggcggatatttccggcagccagtttctggatccggacggccgtttccccaaccatattccgaatccggaaaacgaagaggcgatggcttcggtttcggcagcggtcgtgcgcgcaggggcggatctgggtgtgatcttcgataccgatgtggaccgggcgggctgtgtggatgcgcaggggcgcgaaatcaaccgcaaccgcctggtggcgctggcagcggtgatcgcgctggaggatcatccgggcggcaccatcgtgaccgactcaatcacgtcgaccgggctgaagacctttatcgagcaggagctgggcgggcatcactggcggttcaagcggggctacaaaaacgtcatcaatgaggccatccgtcttggaaacgacggggtaaacgccccgctcgccattgaaacgtcgggccatgccgccctaatcgacaactattttctcgacgacggggcctatctcgtcacccggatcattatcaaggcggcccagctgcggaaggaaggcaagaccctcgacagcctcatcgccgccctgcaggagccggccgaaagcgtggagctgcgcttttccatcaccgaaccggatttccgcacctgcggggaacggattttggccgcactggaatcccatgcggaggagcagggatggacgctggccgatgacagccgggagggagtgcgcgtctccttcggccccggacaagggaatggatggttccttctccgcttgagcgtacacgatccggtcatgccgctgaatattgagagcgacgaggccggcggctgccggaccatcgccgcgcagctggcggctttcctgaaagggcaggcgggattggagctggacgccatcaacacctatctgggcaacggctgaacgaacgccgtatcggggaaggaggaaccatatggactggaccgaactgtgcgttacggtcgctgccgccgacaccgaccgtgcggccgccattgccgctatggcggcgcctcacgggctgtatatcgaggattaccgtgatctggaggagggcgcgcgccagatcgcgcacagcgacctgatcgacgaggagctgctcgcccgggaccgcacccgcacccggatccatctgtatttagagccgggccgggcgcccgccgaggcggcggcgtaccttcgtgaacggctgccggcggagggtatcccgttcgagctgttagaggataccgtccgggaagaggattgggcggataactggaagcagtatttcaagcccctgccggtcgggcggcggcttctcattcgtcccacgtgggaaacggcggatccgctcccgggcagggagaccctgtccatcgatccgggcatggcgttcggcaccggcgggcatgaaaccacccgcctggtgctggaagcattggaaagtcagatccggccggggacgcgctttttagatgtgggctgcggcagcgggatcctgtccattgccgccttgctgttgggggcgtcatccgccgtcggggtggacattgatcccctggcagtccgcaccgccagggaaaatggggaactcaacgggttttccgaaccccgtctgacggtcctggaaggcgatctggtggataaggtgtcgggccgatatgccgttgtggcggccaatatcgtggccgatgcgatcatcgccctgtcgaagaacatacccccgtttttagagccgggcggcgcctatatcgtctcgggtatcatcgacacacgggaaggggatgtcctgtcggccctggcagcctgcggttttaccgtcgagacccggctggagcagggcggctggctctgtatggtctgccgtcatacgggcggactttaaaacaggaggtgacggcctatgccgcgttttttcattccggcgggagaccgccctcccgccgatggcggacaggtacggatcacaggaccggatgcggtccacatccggcgttcgctgcggatgcgggagggagagacccttttcctgtgcgacggggaggggaccgactatttctgtgagctcgccggcttcgagggggagggtgtattgttccgtgtcctgtaccataccccgaccgcgctggagccggatacggccgtcaccctgtaccaggggcttccaaagggcgagaaaatggattggatcctgcaaaaagcggtagagctcggggcaggggaaatcgttccagtcgtcaccgcccggagcatcgtccgcttaaagccgggcgaaggggagaagaaacgggagcggtggcagcggatcgccgccgaggcggctgggcaatgcgggcgggggcggattccgctggtatcccagcccctgcccttcgcagaagctgccgcgcggctggccggggaacccgccctggtcttctatgagggcggcggacgcccccttggtgagctggtcggacgggactgccgccgcctctccatcgtggttgggccggagggaggctttgaaaaagaagaggtcacacggctgctccggaacggggcggaagccgccaccctcggcaaacgcatcctgcgctgcgagacggctcctctggccgccctgtcggtcatcatgcatctgacgggaaatcttgaataaatcgaccttcctcttttccccgtctttgtctgcattccatgcacttgacgggccgttccctcctagccatccaaatacctaagagtcccggggggactgaatccgctggcctggaattcctatgtgtccagagcaaacctctcatcaactgtcgcgggattgctttacggaggctaaagacgccgataacctcgattacgaggaaattttcaccttcgggaagaacggaagcgattatataacggtatacaaacagaggggattccggccgcagccggaatcccctctcgattgtctcatggcaaaagcccgccgagccgcatcgcccactccaccgcgaacaccatggcggtggacgcgagcgcgacggggagtaaggataacccaaaccaggagagcagcagcgccaccgcgaagccggccagagccgaccagggtgtggcggtcgcgtacaggatggccgggaaggtcatagcccccagaacggcaaaaggcatgtagtaaaggaaggagcgcagaaaccggcttttcaccggacggcgcaggagggtcagcggcagggccctgggcagataggtcaccacagccatcacgagaaccgccgccgcccaatacagtgtccggctcaatccgttccgcccccttcctgcgagtcttccaccgggaagcggagcgccgcaaacgccgccgcggcgaccgccgccaggatcagcgcccatcccgacgggatgagacgcagccccggcagataccggaacagacaggcgagccctaccgccacgagagccgtgacggcgaccgctttcgaacggcgggagggcgggacgacgatggcgatgaacatggcgtacagggcaatgcccagggccgaagacaatgcagcgggcaacacaccgcccgccagtgccccgagcagggtgccgagcacccatccgccgtaagggcccgccgccaacccggcgacaaaccagccggaaagccgaccgtccttttgcatggcgaggaaaaaaatctcatccgttaccccgttcgccaacagcagccgtttcagcaccggcatcccttcgagcttctgggacaaggataaggacatgagcatataccggatgttgatgacgaagaccgtcaccccaatctccggaaggggggccgacgcctggatcaggtcagcaccggccgcctgcccggcggaagtgaaattggtcatggaaatcagcaccaccaccggccagggaatcccatttgctacggcagcgaccgcgaacgcaaaggataccggcaaatatccaagagtcaccggcaacccataccggaacccctgtgcaaaatgccgccggcgcggcaccgtttcgtccatccccggatcgtcctttcctatcgcaagtccccacccctgcaaaatgcaggacgcctccggccgcgggcaggaagcccgttagcggccgatccggcgccctgcgcatcttgggaccgtcttttcatcgttcaggcacccagataagcttccttgacctgctcgttatccagcagatcggcggcccggccctccagtacgaccgagccggtctcgaggacataggcacggtcggacaccgtcagggccattttcgcgttctgttccaccagaaggatggtggtgccgccccggttgacctcggtgatacaggagaagatctcctgcaccaggatgggggacagccccatcgacggctcgtcgaggagcagcatccggggccgggacatcagcgcccggccgatcgcgagcatctgctgctcgccgcccgatagagtgccggcaacctgcttgcggcgttccttgagccggggaaagcgggtaaacaccatctcgaggtcttcgtctataccttttttggaggccgcagtgcggatatacgcgcccatctcgagattttccagcaccgacatgctcgcgaacacgcgccgcccctccgggacttgcgccaaccccattttgacgatccggtggggctcggttttggtgatattggtatccataaactcgaccgagcccgtccgggagcggagcaggccggacaccgtatgcatggccgtcgtcttgccggcgccgttagcaccgatgagggagacgatctcaccttccccgacctcgaaggacaggcctttaagggcgtggatggcaccataatatacattcaggtcggtgactttcaacaacatatcttcatcccctccttcagccgccgagataggccttgatgaccctctcatccttccgcacctcatccggggtgccggtggcgatgagggtgccgtagtcgagcacgtacagacgctcgcagacctccataaccaggctcatgtcgtgttcaatgaggagaatggcgaccccgaacctgtcccggattccacggatgacctccatgagttccttggtttcggtcgggttcatccccgccgcaggctcgtcgaggagaaggagcttgggctcagaggcgagcgcccgcaggatctccagcttgcgctgctggccgtacggcagattgccggcctgctgctcacccacgtcctccatgtcgaacagccgcagcagctcccgggccttcccccccaccgctttctcctgcttccagtaagagggcaggcggaacattcccgacaccaccgagtaggacatgttctggttcatggccaccttgatattgtccagaaccgtcatgtttttgaacaggcggatattctgaaaggtccgggcgatccccaggcggttaatctgatagggttttttgccgatgatgctctgcccctcaaagcggatggcccctttggtcggggtatacacaccggtgagcagattgaacaccgtcgtctttcccgcgccgttcgggccgatgaggcccacgatctccttctcgtcgatccggatgtacacgtcgtccagggccttcagaccgccgaaagtgatgccgaggtctttggtttcgagtaccgtcatggttaagcctcccctttcggcgcttttccggaccggcggttccggacaaagtgcaggcatttccgggccaggccgggaatggagatttcataccgtcccagcaggccggtgggcttgaacagcatgaccaggatcaggatgacggaatacaccagcatccggtattggttgaagtcgcggagcatctcgggcagcagggtcagcaccgaggcggaaatcaccgacccggtgatggaacccatcccccccagcacgaccatgatcaggatttccaccgaccggttgaaatcgtatttggagggatcgatcataccggtctgatgggcggccaggccgccggccacgccggcgaagaaggccgccagcacaaaggcgaacaatttgtaataggtggtattgatgcccatggactccgaggcgatctcatcctcccggatggagatgacggcccgtccgtggcgggaacgcccgaaagtgaagcttaagaaaatcagcagcgccgcgatgatgaaggcatagatgaacatgcccgccgggttgtcccgggactgaagggagccgatccccccgagacccatggcgccgttggtgattttcagattgatggacaccacccggatgatctcaccgaagcccagggtgatgatcgccagatagtccccccgcaggcgcagggcggggatgccgatgacaacaccgaacaccgccgccagcaggccgcccagcacaaggccgataggcaggctgatactgaggggcaggccgatgtttttggtaaacagagcggcggcataggcccccgccagcatgaagccggcatgtccgagcaccagctggcccaggatgcccgtgaccaggttcaggctcaccgccagaatcacgttgatgcacagattcgtaatgatggtggtgttatagcggttgagcgtgccgctgtcgatcaggaccagcagcaccacaaacaaaatcaccacaaggacggcgttcacagcataggcaacgccggtttttttcttcagcgctcccatggcttacaccttctcctttctgtttttgcccatcaggccggtgggtttgagcagcaaaaccaggatcaggataccgaataccaccgcgtccttcaggttggcgctgacatagccgatggtcaggctctccgccacgcccaggatatagccgcccagcatggcgcccgggatggagccgatgccgccgagcactgcggccacaaaggccttgaggcccagcaggttgcccatatcgggacggatctggggataggtgttgcagtagagcaccgcgccgaccgccgccagggcggagccgacggcaaaggtgaaggctacgacatagttggtgttgatgcccatcagcttggcggccccggtgtcttccgacgtggcctgcatggcctttccgatcttggttttgttgaccagcagctgcaatcccaccatcatgaccaccgacacgccgatgttcaggatggtcttggagggcagcgccaggtcgccccagtgcagggttccgaaatcgatcagggtggggaccgaaatcggattggacgaaaacaggatcataaacaggttttggaggaagatgctgacccccagggccgtgatcagcagggagatgcgcgccgcgttgtggaccagcaggcggtgataagccacccgctggatcaccacccccgccacggcgcaggccaaaatggccgcggcaatggccagccacagcggcagtcccaggttgaccaggaccagatagagcacatagccgcccaccatgatgatgtcgccatgggcaaagttgatcagctgcacgatgccgtacaccatgctgtatcccagagccaccagggcatagatactccccagccccagcccgttgagtgtctgcgtgataaaatccattgccgcaccttccaacctttatgaaatccggtctgacaatccaaaaagagggtgtgttgccaccctctttttgaaccgtataatgcctttgcctcagctcatggagtagctttccaccactttatagttcagcccgtcaaaagaggtgatgatcgcctcgcggaccggattgcgcttgtcgtcaaaggtggtggtgccggtcaggcccttgtagttggtttcccttagcgccttgatgacggcagcgctgtcggtggtgccggccttttcgatagcggcggccatgatctgcatggcatcatagcccaggacagcaaacatgttgggctcctcgttgtatttctctttataggtcttcaggaaattctgcagggccggatcgctgctcgaagcggaatactggctgcagaaataggcattcttaaccacgtcggcgctggcggcgtccaactgggcggcgacaccgtcccagccgtcggcacccagcagggtggcggtcaggccctgatccttggcctgtttggcgatgagcaccacgtcgttgtaatacaccggcaggagcagcacatcgggattgccggccttgatcttggtcagctgggagttgaagtcagtgctcttggaggcatagccctctttattggtgatggtcatgcccaatgctttggcggccgcttcaaaagcgtccgcgataccggaggaataggggtcgccgttatcaaagaggatagcggcggtcttggcgttcagcttcttggacgcataggaggccatgagctggccctgatacgggtcgatgaagcaggcgcggaacacgttttcgccgtaggtggtgatggcctcggaggtgcccgaaggggtgatcatgggcaatttgtcccgggcggcctgctgggccaccgcctcgcagggggcggaggtcacgtcgccgatcagggccacgatcttgtcctgatccaccaggcgggtataggcattggtcgcctcggtgggatcgcccttctcatcatacgatatatacttgatccgtttacccaagaggccgcccttggcattgatgtcgtccaccgccattttcacggcattgtccaccgccacaccatattgggccacactgccggtcaggggcgccaggccgccgatcacgatctcgtcgccgctgccgccggatgtattgccgcagcccgccagcggaacggtgagcagggcggccaccagtaccatcgaaagaacacgcgattttttcatacaattccctcctatgtaggatacgcggccgtccgccgcgcaggatatccaattcggatcggactgttttattatacgcgatggagcacctggttttcaaggcctttttgcaattttggtaaaaagaaacaccaaaaacaggcgattcgtgccgaaagaacgggccgaaacggccattttgttcaaaagaccgtccgcctcccgccctttttcctgcatgacgggccggcagcgggttcgggcattccggttcagcggtcgttcatgtgggtgtggtggtagacgccccggaagcgccccggccccatacccgtatgataacggaagtaatggatgaaggcgttttcgctctcccaccccagttcttcggcaagctccttgatcggcttatcggtggtcagaagcaggctttgggcgaatttgacccgctcaccgccgatataggcctttaaagacatccccagggatttccggaagaggacacacagataatcaggatgatagccgaaccgggcggccacctctcccaccgtcagcttctcccggctatggatccggacccactccgcgattttcgagaccagtggtcccccgccgctctctccatccctgccggcggccgtcagctcggcaagcagaagccccagggcggcgtcgggggcgtaggcgggatagccgggtgtgttggcaatgtgaagaagctgcttgagcagcagcgaaaaacgataggaatccggcaccgacagcaagccggttcccagccccggccagccgtctgtgacgaaatggacccaataaaacgaggtctttccccggctgatgcggtatcccccatggcggcagtccggccggaggagatacacgtcccctgccttgagggaaaagcgttccccttcttcctccaggtacacctcgccggccaccacatacaggatttcatagctgtcgatgacgcgatggggatggctccactcctcctgcgtctcaaacaggccgctgtacagataggacacgctcaccgcgggatcgctcgaaagctggatcatgtcggattttctccctcaattcctcttttttatccttgtgaagccggtgcgggtcttgctaagatattaccagaagacgcgggatattgcaaatctttgaaaaggagagatgtctctgtgaaaccgaaccggaacctccccttctccgccgtggagctggataacggattttggcatgataggcaggaactcaaccgcaacgtaaccatccgcaacgtctggaaacgctttgaagaaactggccgtttcgcctccttccgctttgactggaaagaggggatgccccacaaaccccacattttttacgattccgacgtggccaaatggatggaatccgccgcctatatcctgcaaatgcatccggatccctggctggaggaacggatggaggagttggtcgggctcatcgtggcccatcagcaggaggacggctatttcaatgtctattttactgtcgtagaaccggaaaaccggtttcggcagcggtttgcccatgaactttactgtgcgggccatctgatcgaggccgccgtagcatatcagaacgccaccggccgggaccggtttctccgggccatgtgccggtatgcggactgcattgcccgtgttttcatggaggaacaggctcctcccttcgccacgccgggccacgaggaaatcgagctggcgcttgtcaagctgtaccgctgcaccggtgaggagcgttatctccgccttgcccgctggttcctggaccagcggggaaacaacgacaaggatccggcctgcatgggagagtgggaaaacccccgctatacccaaagccatctgcctgtccgccgccaattcaccgccgaagggcacgcggtgcgggccggatacctgtacagcgcgatggcggacgtggcgtatgagaccggggacccggaattgcgcaccgcctgtcagtctctgttcgaaaacatcaccgaacggcggatgtatatcaccggcgggatgggctcctcccggacaggcgaggcgttcaccaaggatttcgatcttccgaacgcaacggcctacgcggagacctgcgcggcgatttctctgatcctgttcgcccagcggatgctcctcctggatatcgacggccgctacgccgacgtggtggagcgggcgctttacaacggctttctatccggcctctcgctggacggaagaagcttcttttacgagaatcccctggagatcgatctggaccgctatggccgcgatacctcgatcaagggaggggaggtcctgcccattcctcagcgggtcgaggttttcgaatgctcctgctgccctcccaacgtcacccgcctcatcgcctccgtcggggaatatctggccacctacgacgaccacacggtcttcatccaccagtacatgtccggcactgcccgctggcagatcgggaatcaggccgtgaccctccgccaggagacccggtatccggctgacggacacatccgcctcaccattgagggggcccgtggcatgaaagccgccctgcgcatccccggatggtgccggcggtataccctgctgtgcggcggtcagccggtacaggccgccccggaaaaaggatatgtggccgtgaactgcctcggcgacatggttacgctggagctggagctggatatgtcccccgtgctgctggaggccgatccccggatccatgccgacgccggacgggctgccttgcagcggggccctgtggtatattgcgtggagggggcggatcacgaaggggcggtccatgatctgctggtggacggttggctcaaggcccgtacagaggagctcccaggcatgccgctgccggtggtcagggctgcgggctggaggcggccccggccggagcccggctgtccgtaccgcccgctaagggaaaacttacagccgctcgaactgacgtatatcccctactttgcctttgccaaccggggcgagagcgacatgctggtgtgggtgccggtccggcggtagccgcagcgccggcgggaacccctcttgcttgtattttgcgatgcaaaaacggcctgaacacgaatgttgaggccgtttttgtgtgtcattcggtttttaagcccataaaatgatgaccacccagacacccgggggcctcgggcccccttgttgtatgaacatcggttcaggaaaacccggctgaccatctggggtccgggggaaccccgggggcgtttttgcatccttttgtcgctacg

SEQ ID NO: 4424 - DNA, 23361 bp, Unknown
  16S sequences of unknown bacteria
cattggacttccgcttcgcctgtttcgcgcactgcgcgcggcgaagctccgtccctctcgtgttctcccttggtttttttgccagcgggcggcgcgcatatgacatggtgtggcggatatctatgagcgaaagcggaatgtctgcggcgcgcggcgcgcggcccagaagagcagcgccgtcacgagcgcgcaaaagcccgacaggggcagcagaagaatgctgatatccccgcgcaggaacaatatgccataggtaatgaggccttccacggagctgatcagcgtgaaggcggggctttttgctgtgttgtcggcagagtagggttgcaggagatagtacacggccaaatgcagcgtttcaaaacccaaaaggagcagcgcgaaaattcccgcgatcgccagcagcttgtctgctgggagccacgtgccagccgccagcaggaggatggcgagatccaatagcgcaaagccgaagaggtacaaagcgttcttcatgagataccggtagcgcgcccacaggctgccgcggatggtggccgcatcgtagaagtggtggtagaggagcggcgcgtccatgttgcggtagcacagctccagaaacgtgtgcgaccaggtcataccgatcactgtggtgatcgcaaaggatgaatagttcagcagattgctggcctgcaggccaaagagctgatagcgaaacaagaggcccgcaaaaagggccagcgccccgttcagcactgcgatttgcacgaagtggtcgcggcggattttgcggaagcggattttcagcattcggtcgaagtaggcccaggcatccagcgagccgtattgcgcgaattgcgcggcgtttttttccggcggcgcgtccttcaaataaaggtcgtcaatttccgcgccggataccgcctggatgagcagcacgggccggttggccgaggcatattctgccgccaccgccttatagcctttatagcggaacagcgcggcgcagcacgcgccacaggcggccagcaaaagagaaccggcgcaccagagcgccgcctggggtggaaccggaaagcggatccagccgcaaagcgcatagaagaacaggctggccagcgtacacagcagcatgcgcattttgcggctgggcacgcgggcttttttgtcaaagagctttaagtagaaaaggtcgctcgcggcaatggcgcaaaggtttgcacagagcagaaaatacgccatggcggcgtctttaaagaggaaaatgagcgcgggtaaggttcccagcgcggccgtgcagagatttgttagcaacttttggcggtaccaggtttggggatggagcataaaatggttcaaaaagagggaatcctcccgcgtggaacgcagcagcttgctttgctgcgctgcgccggcggcgcagtagatggtgaaaaagcagaacgcataggttcctgcgctcgcggctcttccagagatgcgcaggatgagttgcggtgcataaaacgttagaatcagtgtgaataggttgccgggcagcgcgactttgaagaggccagacgcgcagccaaacaggcagcacagaagcttgggcagcgcatagcggtaaacggttggcggcaggaaagctcggagcacgggcagcttggaaacataatgcagaaaagcgttcgtttggatggcaaactggatacggagggttaataaagcggttttcacggtttgtcacccgccttcagcgcctcgataacggcggcttcaaattgctcgtcctgcatgttggcggcatctaggtaggaaagttgcccgtcgcgcagcaaaacgatgtcgtcgctcacatcccttgccagttgcaaaatgtgcgtggacatcaggatgatgtgctcgcttttcatggaaatcagcaattccttgatgtcgtgggataccagaatgtcgaaggaggaaagcggctcatccagcaagatgaccttgggcttgcgaattaggcagcacagaagctgcaatttgtttttcatgccataggaataggatttgatgagcttgaaatagtccgctggttcaatccgcacgagctgcagccattcctccacgctgcgctccgttcttccgtgcagctttaggaaaaagtggatgaattcgtatcccgttagatattccgggagcacaggggaggcggaaaccatgcccacttcctcaaattgcagcggatgggcggcttcgccatccaggagcgcaatctcgcccgcctcatagggcaaatcgccatggatgcagttgaacagcgtggttttccccgcgccgttccggcccaggatgctgtagatccggccctcttcgaaaatcatgctggcgccggcaagcacagtttgctgcccgtaagctttgcggaggtggccgatcaaaagccgcgccatggaattctcccctttgcatatttttgaaatatgaattgtacattttttttgtgttacatagaatagtataacacaaatcgacattgtttgcaagcactttttttccatcgtaaaaggcgttgtttgcgcataggcatatccggctcgtcagaggcatatcctatggtgtaaatacatgatacgaggtgatacgatggaaaatcccaacaaccacatgctggcggcggggcggctggaacggccgctggaactgagccatgaagtgatgaacgagccgtttttcgcgggcgtgctgcaggtgaagcgcctttctggcgcgatcgaccggattcccatcacggttccgggcaagttgctggcgcaggatggcttgcccacggatcagcttttgatgattggcgggcaggtgcgttcgtacaacaaggtggtggaaaacgcgggccggctgatggtgacgctgttcgcgcagagcatctcctttggctgcgacaacgacacgctcaaccgcgtggaactggcaggcgcgctgtgcaagccgccggtgtaccgctccacgccgtttggccgggaaatctgcgatatgatgctggcggtgaaccgggcgtttggcaaatcggattatattccctgcatcgcctggggccgaaacgcgcaatacgcctcgcgtttccaggtgggcgaccgcgtgcgcatcggcgggcggctgcaatcgcgtgaataccagaagctgatggaaaacggcgaatatatggtgcgcaatgccttcgaggtttcagccttcacgctggaagccgatacgccccatcccccgatgctggatgccgagccgcaggcggatccgtttgcggcgcgcatgaagccgagcgaaaatttggcttgacacgatgcgcgacaatcgctataatagaaactacaggcgatgatggaaagagtagcgcgcgaggccgccttcagagagccggggtaggtgcaagccggcggtgggcagcgcgggaacatggctccggagccgtccgcgcgaatggtgagcgcgggacggggcgtcccgttacaggcgcagccggtatcggccggtggagaaccaagcagggtggtaccgcgtatcataacgcccctcgcagtgcgaggggctttctattttggtttggagggaaagacatgcaaaagaaaacgtactacatcaccacgcccatctactatcccagcggcaatttgcacattggcaacacgtacaccaccgtcgcggcggacgcgatggcccgctttaagaagcaaacgggatacgacgtgtttttcctcacgggcaccgatgagcacggccagaagatcgagcgcaaagccatggaagcgggcaaaacgcccatcgaattcgtggatgaaatcgtggcgggcatcaaagacctgtggaagatgatggacatcgaatacagcgactacatccgcactaccgaggcgcgccatgtgaaggtcgtgcagaagatcttcaagcagctctacgaccagggcgacatctacaagagcgaatatgagggcctgtattgcacgccctgcgaatccttctggacgcccacgcaggtggtggacggttgctgccccgattgcggccgccccgtggaactggtaaaggaagaaagctatttcctgcgcatgagcaaataccaggattggctgatcgattacatcgagaagcacccggaattcatccagccggtttcccgcgccaatgaaatgctgaacaacttcctgcgccccggcctgcaggatctgtgcgtgtcgcgcacgtcgttcacctggggcattcccgtggaattcgaccccaagcatgtagtctatgtgtggatcgacgcgctctccaactatatcaccgccctgggctacgggtcggacgatgattcgctctaccgcaaatactggccggcggacgtgcatctcgtgggcaaggacatcattcgcttccacacgatctattggcccatcatgctgcacgcgttgggcttgcccctgcccaagcaggtgttcgcccacggctggctgctctttggcaacgataagatgagcaaatccaagggcaatgtggtgtatcccgagccgattgtgaagcgctatggcgtggacgcgctgcgctattacctgctgcgcgaaatgccctttggatcggatggcaactgcacgctggaaaccatcctgggccgcatcaattccgatttggcgaacgatctgggcaacctggtcagccgcacggtggccatgatcgaaaagtactttggcggcgtgctgcccgcgcccggcgaggaacaggagccggacgccaagttgcgcgagcattgtgaggccctgcccgcgctggtggaaaagcacatgaacgcctttgagttctcgctggcgctgggcgaaatctggaagctgatcggcgattgcaaccgctatatcgacatcacccagccctggatcctcggcaagagcgaggagggcaagccgcgcctggcgacggtgatgtattacctggccgagtgcgtgcgcgccatcgccgttttgatcgcgcccaccatgacccgcacgcctgcgcgcatctttgagcagatcggcgtaaccgatcccgcactgatgacctgggagagcctgggcaaattcggcgcgttgcccaccggcacggtggtgaagaagggcgcggcgctgttcccgcggctggacatcgaaaaggaactggccttcttccacggcgaaaaggaagccgcggcggaaacgcccaaggccgaaaaaccggcccaggccaaggaggaaaagcccgccgagcccgcgaaggaggaagaggcgcccgcggaaatcaccatcgacgatttcgccaaggtgaagctgatttccgccaaggtgctcgcctgtgagcgcgtgcccaaggcggataagctgctcaaatccacgctcgacgtgggcaatgggcaaacccgtaccgtggtttcgggcatcgccaaggcgtacacgcccgaggaaatggtcggcaaaaccgtgatcctggtggccaacctgaagcctgccaagctgcgcggcatcctgtccgagggcatgatcctctgcgcctcggacgagcagggcaacctcaagctcgtgacccatgagggcgatctgcccgccggagcggaggttcgctaaattggttctgttcgatacgcacacgcacatcaacgacgagcggttcgatgcggatcgctccgaggtgatcgagaatatgcagcgcgcgggcgtgcagctcgccgtggtggtgggggacgcggcggcgcagcccgagagcgccttcgccctggcggacgcctatccgttcttgtacgccgctgcgggcgtgcatccgcacgacgctgccaagtataacgacgccatccaggctcagatcgaaacctggatggcgcattccaaggccgtggcgctgggagaaatcggcctggactaccactacgacctttccccgcgcgacgtgcaaaaggacgtgttcgcgcgccagctcgcgctggccaagcggctgaacaagcctgtgatcatccacattcgcgaggcgcatggcgacgcgatggacatcctgcgcaccgccgaccgccccgcgggcgtgctgcattgctacacgggcagctgggagagcgcgaaagcctatctcgatatggggttttatatctcgctgtccggcgctgttacgttcaaaaacgcgcccaagctcgcgcaggtggcgcaaaatgtgccgctcgaccggctgctggtggagaccgattgcccctatatggcaccggtacccatgcgcggccatcggaatgaacccgcttttgtggcttacactgcgcaaaaggtggccgaactgcgcggcatggatgcagaggaattcgccctcgccgcctatgagaacggcaagcgattgtttggcatctgagaagagcgaaaatccattttgtggcaagagccattgcggcttttgcgcggcgccatggagcaacaagatttgtgtttggtggagcgccgggtggtcagcaaggccggagtgcgggaatgaactcgggcgagcacgccggcatgggatatggatgacaaaaaccgctcgcggacgagtgacgtccgcgggcggtttgcgcaagcgttattccagtcctttttctttgaggtacgcttcccaccagggattgactttgcccaccgattcttcgcgttcgcaaggaagcagccaggagggctttttgtaaaacggctcttcgaaggtattttcgatgcggtgggtcttttccagcgtatccatgcaggcgcggatgcagccgcgcgcgccgcaaacggcaaaatagccgccggaaacctgggagaggaacggatattcgttgatgactttgccatcgcgattgtagggcgttttcgcccagttcgcacccatcagtgcgtagcagatcttgtacgcttcttcttctgtggcgttggaggagcacacgtcgtattccaaattggggaagtcctttttcataaagggcgagatgcggttgttaaagccgtggtgcgtgaaagtgcagcggcccatgtccacatctgcgtaggtgatttttttgccgccaatttcgatggtgatggttttgccgtccttaaagccggggacggcattggcggggcattcgcggatgcaagcgccgcagcgcgtgcagatggtgcccggttcaatcatctcgtccggctccagttccgcgtcggtgatgatgctgcccaggcgcacgcgcgggccgaattttttggtgaggaacaccttcgaccaacccagttcgcccagacccgcacccacggcgaggaagcggacgctggctaccacgtccgaaggtacgcggccaggttccacgctttcgcgcacggggttgcgctccggcaccgcgggatagcacggcacggcttcccagccgtgatcctcgataaactgcgatagcgcgtaggtcaggcgcggccgtatgtattggttgaggcgggaataggaataaaaggtatagttgttccagtgcgtgccctcttcaatgccgcgatagctgccgcgggggatgcgcatcatggtgacgatcacgctcttcgcgtccgggaaataggttttggggttcatcagcggcggcgctttttcgaaccggtcgatggaggcgatgcccacgccgtccagccccaattccatgccgcgctgcttgatcatagcgcttgtcagcttcatgcccggccctccttattcctgaggctccacgtttttgcccctgatgtcgatggcccacgttttgcggcggcggaaagcgttttcaaaggtgttttcaatcaagcccgcttcttccaggtggatcatgcaattgcgcccacacagcgccgcgcagcggtcaggctcgccgcggctggatacgcggttgcccatcgcgccgtttttgcacatgcggcacaagctggcatccacttcggccacgggcattttcaggccgcacacatccaggagggtggtttcctgggaaatcgcgcccagcgggcaaccgcgctggcaactgccgcactggtcgcagatggtctgcgtgaccagcggatcgctttcgaattccgcgtctgtgatgatcatttgcaatttctggcgcgggccgtattttttggagagaaacaggccgttcacgccgatgacgcccagcccgcaggccacggctgcgtagttgaaatccgggatcacgtccggcacgggcgcgccgtcgcgcacgggtacgccatagcccgccacggcgctggggttagaaaacaccggcacggcctcccaaccgcgatcttcgatatagcgcaccaggttatagcagccttccgccacatagtccatatccagccactggatgccgaaaaggttgtaatcgctgaaattggtgccctcttccgtgccgcgcagggttccgcgcgtgatgcgcttgcccatcacgatgaccgtttttgcctccggcgcaatggaaaagggattgatttccgccggaacgtccgcgaaccggtcgcgcgccgcaaagccgatgagatccacgccgatttgcgccgcaaaatcgcgcaattcctgtttggtaatctgcatgggataattgctcctttcgaaagtactttggctgattccatcatcgccggttttgccgtttctgtcaacaaatttcacaatatgaaataaataagaggcgacgacgcgaaattgcgctttgcaagggcggaaaattgtgctatactgcaagcaatggtttgctggaaagtggggaaaacgagaatgattcgctcagtagaaaaggccatggcaattgtgaattttgtggcggagcaggcggaaccggtttcgttggggcggattgccgccgcgttgcaatgccctagcgccacttgcgcacatctggtggaaacgctgtgcgcgggccattatttggaaaagatttcgcgcaaggacggctatgcgctcggcccgcgcatgtatctgaacacctccggccggttttatcgggaggaattggtgcgcgtcgccgcgccggtaatgacccagctgtgccgcaatgtgagcgaatgcgtttccctgaactgctttgccaatggcaggatgtacgtcctgtacacggtgctttgtcaggacgagggattgatgcgcgtgggactgcagggcggcatgctatatagctccgcggcgggccgcctgtttttggcggccatgaacgagcgcgaagtggacgcggttgtgcaggagaatgggctgccggatggcggcgattgggaaggcgtgaatacgcgcaccgccttggacgccgagctgaagaaaattcgcgcctgcggctatgccattcgcgaaacggcggatcttgtggccgtgagttgccccgtgcaccagggcggcgcgctggccgcgggaatcggcgtgtacctgccgccggagcgctttacgggcgcgcataggatgcagatcatcaacctcaccaatgaggcgggcattttgatcacaagacggctatacaaccgcgaaaaatgcaagagcgatctggcgaagatggagggcgggcaataaggttgttgcgaaagcagatgctcctctagagagtatagacaatccaataaaatgatagtataatttctctagaggtgatggaaatggagcgatgggaagaatccatggccgcttggttggcggaggaagccgcgcaatgcgaggagcgccgggccgcgctggaggcggatggccggttagacgaggcggtgtttgaaaagacgcgcgccaacgtatatggcgccttccgcaccgtgttgctggccgcggggcatactcgggcgcagggggaagaggcgcggcgcttttttatggagcggcttgagcaaattcccaagcggtggtcggaagcctacgaagaaggaaagcgccatggcgacatcgcccgcatggcgctggagagcatgaagcttgatacggtgcgcaaaatccgcgagaagctgcggcaggtttgggagcgggagtagctcggggtgtggggcagcgcgctagcttggcaaacccggtcgcgattttttgaagacggatggtattttcggcatatggaattcgcggcggcaaggcgggcggcgtatgaggtaacccctcagccggctagcgccggcagctcccctggaaccgggggagcctttgggaagcgatacaacctaggaagcagcacttccccagagcccaccttgcataggggaagcttttggaaaaccgcgcgacacgcgaaacagcgcgcaaagcgccgccgcggaatttgcttccgcggcggcgcttttgcaggagttgatccgataaggatcgatttgacttattgcgcgtattcgggcacttcgcagccgaggcattcggcggtctgttcaatgatcgcctggccgccgcgagagagccactcattggcgaagtcttcgtattcatcgaggctgcgcgcgccggtgacgaattcgaattccgtggcgttgatccagtcgcccagggtgatggaggcttccgccgcgtcgccggtgagcgtcacgttcaggccatagttcggccagcggtcgacggccgcgatggccttgatggcttcgttggtgatggcgttggcgttatcgatgaccgggtcacccgtatccgggtcgctgagctgccaggacacgttcaggccgaagttctgccagctggcgagcgccagtccgccgtagctgccctggtcgtaggggaactgctcgccgccattttcgtccaggttggtctggcggatgtagaacatgccgtcatcggtgtagatgaattcctggctgccgatgcgctcgatgccgaactgatcgtacacgatgtcatccgcgccctgagcggtgtgcgagaagttctcgccgcccacgcacatggtgtcgatcatgtgcagcacgcgcagcagcttgccttcctggccttcgaagcagggagcgctgaacgcccacatatagcccgggttgccggccgccgagtatttgccgccctcgatcgggtactgctccaggaacttccacacggccatggtttcctcattcgagttgccctgggccatggtgtattcggtgtagagcgagccagccgggtagtacagcaggccgatcttgtcgttcagggtgtagctcttggcggtctcccagtcgatggtgtaccagtcgggcgcgagcacgccgaggtcatacagctctttgcagaaggtgaggaattccttgcgcacgccgttgaagtacggatgcgaaagttcgccgttctcgtccacataggcctggttggagccagccatggtgccgaagatgttgtccagcatgcccaggctgttgccgccgcccgccgccgtcatgaaccaggtgtcgtcctggccgttgccgtcggggtcgttaaaggtgcaagccttggcgtattcgatgatttcttcgcgggtggtaggcatttccatgccaaaggcttccagccagtccgtgcggatcgccgcggcccagatgccatcctggatgccgtacttggtgacgaaggcgatctcatcgttgctggcgttggtggaaaaatcgatcatgccctgcgtgacgtacttctggtgcaggggcaggtaggggtacagctcgcgcgcgtcgatcagcaggcccgcgtcggagagctggaaggcgaattcccggctgggcagcacgaacacgtccggatagtcgcccgccgcgatgcgcgtggaaaggtgggtctccaagtcctcggcgttgaccacggtgaaggtgatgtcgaggttgaaggcgttgttcagatactggagaatggggtcttcatcgttgggcaggtgcggcacgccatagccctgggagacgatttccacttcgtaagtttccgtcatgtcatcgtagctgtaatccaggctttgcgcgtccttataatagccagtgggcatggtttcggggaacacgatgtcctcgaacgcaggcacgctggccgcgtcttccgccaaagcggcagccgacaggccgagcaggacgcaggcgagcaacagggacaagaattttttcacgacaaaccctcctacagttttgtatttggggccacagcccctatggtaactgcacgcggcagttaacacctcttttagcccttcacagagcccgtgtacatgccaaagataaagtacttttgcaggaacggatacacgcacaggatcggcaccatgcccacgatcacacacgccatcttcacgccttcgggcgtcatcttttcgaaggccgtgagggagaggttctgcgtgtcgctggggctggcgagcatcagcgagcggatgatgaactgcactgggtgcagggcactatcgcgcacgtagagcagcgcgtcgaaccagctattccaatgggccaccgcggcgaacagggagagcgcgcacagcgtgggcaccaggagcggcacggcgattttgagcatcttctgaatttccgaagcgccgtccagatccgcggactcgatgatgtccttggggatgttctccacaaagagcttcacgatgagcatgttgtaggtgttgccgaacgcgggcacgatgtacacccagaaggtgttgagcagcttgagatcgcgcatgagcagatagcccgggatcagcccgccgccgatgagcatcgtgatgatgaagaagatcatgatgccgcgctggccaggcatttcccgcttggccatgatgtacccgcctggaatcacgaacaccagcatggccgccacgcccaaaatggtgcgcgccacggaaatgcccatggagttccagaaattgaattggttgaacacgtattcatacgccttcagcgtgggttgctcgggaatgatgacgaaataattcttctggatcatttcgccctcggacgtaagcgacatgccgatgacgtacaacagcgggatcacgcagcagatggtaaacagcgtgacaatcgtgtaaatcacaacctgataaacgacgtccgcccgcgtcatgcggatgcggttgcgcttgtgcgcctggcgctcctgcagcttggcttctctcgtcatggttccacctcctaccacatgccccggcccgcgaccttgcgcgagaaggcatttgcgccgatgatcagcaccatcgagatgatggctttcagcagggagaccgcgctgcccacgctatattgcattttgcccaggcccacgcgatacacccaggtttcgatgatatcgcccacgctgtacaccgccgagttgtagaacatgagcacctgctcgaaatcgttgttcaaaatcgagcccagcgacataatcagcgaaaacgtcaccaccggcatcatggcgggcaacgtcaccgcgcgcgtgcgggcgacggggcccgcgccgtcgatcttggcggcttcgtacagctcggggttcacgttcgtcagggccgcgaagtagaggatcgtgccccagcccgtgcccttccacacctgcgagccgaccagcagcgagcggaacagcccggaattcatcagaaaatcctgctttctcccgcccagcgcggcgatgatgttgttgatcatgccgttgccggagaagaaggcgaacacaatgccgtacatgatgacccaggagaagaaatgcgggatgtacacaaacgtctggcatacgcgcttgtatttggcgctggtcaaatcgaaaatcataatcgccagcacaatcggcggccagaacgtccagaacaggcgcagcacgctcagaatcagcgtgttcttcgtcacgcgcagaatctcgctgtcgtggaaaatgtaatcaaagttttccacgcccacccatggcgcgttgaacaccgacatgccgagcttgacctctttgaaggccatcatcacgcccatcacgatgggccagtagtaaaacagcagataatacgccatgatgacgccgacgatcgcatacagcccccaatagcgcgaaaaagccaatcgaaatggcatctttccttcggcccgtacagggcctctggacggggatttggaaatggttttcgtcatctgtttcccacctttgatagtttgctttgtgcagaatactgaactcatagaatatgttaatattataaagcatagctaaccctccgtgtcggcaaaaacgatttggaaaaacatacatttcaatttgctttttctgaattgtgtatatttcactttttgtggcttgtaaaacgacaacgtgatatgtaatatgaaaaatgcatttaagaacaaaggcgaatggttgggggtgttgcaatggccattgtggcgaaagacgcgagcaagaacatccttttacaaatcgtcacttcccagattggcgtggaaagaaataccatgccggtgcgggtggaaccgcacgcgcatttgttttatgaggtggttttcctggtgaagggcgttttgcgccaccacattcggattcagggcgaattgtgcgagcgcgaacagatcgtgggcgatattttcgccatcgcgcccaacgaagagcattggtatgacgatagcgcggacgtggcgttttataacctgtacatttcgccgggcgtctttgcggaaatgcagcagaggctgcacagcgatggcggcttcaattccctggccatgcagaatgtgttttaccggcacgcgcatgggttccaaacgctgcatgtggaagggcgggaatacaaacagatcgaggtgctttgccaggaagcggcgcaggaatatgagaatgtgcgcgcgggtacgcccctggttttgcaagcgttggtcagcgcgatcctcaccttgctgtgccgccattgggaaaagacgcgggccagccgcctggaaggggaggccaattccaacgccctgatcatcatgcacgcgctggaatacatccaggagcactatgccgagcccatcaacatcgacgcgctggccaagagcctgttcgtgagcagcgaccatttccgcaagaatttcaagcgcgtaacgggcacgtcccccgtgaagtatatcaacaatttgcgcgtgcggcacgccatggatttgctcaagaaccccagcctgcgcattgccagcatcgcggcgcaaaccggctttggcgatatcaacaatttcacccgctgctttacccgcatcaatcgcatatcgccctcggcctttcgcaagcaggtgctcagccgaagctatgaagaatcgccgcgcggcgtataacgaagctccggggcgccaaagcccatgcttatttgaaattgcggggcttttattttccatctcgcgatttcgcgcacggttacatagcggttggagaggatgcaacactcgccgcgctggaagacaagcttgccacgggttcgctggccgcgcctatgcggcgcagggcgactgtgctgaactgcggagtcgcttcattgctctatcaacaaagcggaccggtgggttacaagctcaaaaaccgcaagattgcgccatttaaaaataaaatcttgcaatttcgaataaagtatcgactttgtcaatgctctgagggcgtcatggctttttggccatggcgcccttgtggttacccaattgcttttttggatttatgaaaacaggtgatcgccctccgaggagaatagaaaagctccattttccagcatccacccgcctcctatggtagggttcaattctgtccacaatccatcgttggcgacggtgtgcacaaattcctcccctttcaggctctgccatacgccatctttggccacgagaacgagcatatcggaagaactatgataggcaatgccgcctatgagattggctatgctcggaaaaatcacaggttttccgcttccaccatgcgcattttggtggaaagttccgccaggaagccgtccagggaggaaaggccgctggcgtatttttcgcaggcgtcccgcatcaactggtaggtgctggtgccctcctcgcacaggaacggggattccgcatgcaaatggagcgggtattcccgcaccatctggcggaattcctcgatggtttcgcgcttgatttgccagcggttgccctcgtcggccagccagtcctcgtaaaattgcacgcgcgtttccagcgaggggttgtattcttcgttcgcgtctttggcctgctggatggcttcttcatattcggccttttgccgggtgtagctgtcgcggatttgttcatagtttgctcggggatacggttcgttttcatctggatggatcgcgtaatagagcctgctgtttgcttccacctgggccatgcattcgaggaagcgaatggccgcgtcgattttggtcgagtatggattcacgacaaatacgtacatgcgggcgttcgtgtagggaacggtttcctcctcaaaaaccaggggcagctctgtgatgctgctcttggaaacgccatagagatagctatccggggtttggttgggcgtgggattgcgatcgctcatggcgatgtaggtggtgatatgaaaaatgcagcccgggccagtttcggattgtaccatgagctgggtatccggctcatccggcgaggtgctccttcccttggcgaggcgaatttcgtaaacttcctgcagcttttgcagcacgcttttcagctcgggcgaatcgaaatccacagagccttccgcatcgtgctgcatgacgtagagattcataaacgtttccaggagatacgcgtagtcaaattcccagttcataaagcccaccccgggataatcctgcgccaggttgcgctcccagtcgatccaggcgtccaacacttcgccgaacgtcttgggcagcgggcggtccggccagaacatttcccagtatccttcgttgatgccatattcccaaatgctcagttcatgcggccaggccacgagggctccgctttcgtccaggagcacctgtgcgatggattcgtccatttccgccagggaagcggtcagcgcctgcgaagcatccaggggcgcggcgtagcccttgcgcttgagttgggtgaaattgtaatcggccttcacgacgaagatatcgatggaagcatcttgcgtggttatgtagcgcgcgaggtcatccgcggtgagcggatcggcaaattccagcggcgcttctggatgggcggcttcgtagaaatgcagggcatctacgggtatgccgctcgatagaattagcccctggccgttttccgcctccgccagcccagcgctggcaagcagaaatgccatccaaattcccagcaaacgctttcccttcataggaatccccctctctatgcaggattttgcctgcatacccttttctaaatggcaaccggcgttgttcctttaaaaacaagcgggtagcccaaacgtagcggctcacttttctaggacgcgcttctatgcccctctataatattaaacgaataagcagggcaatatttgacgcagaaattattatttaatgcaatattatatatgccaaatttgtatgagtaaatttatttcaaaagtataaatgacctgctgagggcaggaggttttgaatatatatgccatataattatacaaatattaatataaaatatatattttagtaatgaaacagaacgaaccaaaacggggaataaaactggcaatcgctgaatttttgtgctatgatttttgtgttacggaaggggtgatttcatgtctcagcaggattggttccacaagatgtacaagtgctatgcggcgggtctgctttcttatgcgcggcatcttctgcgggatgcaagcgatttgcaatcgtgcgcggaggactatgtgcaagtggcatttgtaaaattgtattcgaaccaacaaacgctgatggagcatgaaaaccttgaggcctggctaaagcgcgtggtgagaaaccagattgcggatgatgtgcgcaagatgcaaatgcgcaatggaaagttgggcgccccgatagacatggaggaattcgccaagcaagaggcgcggtaccggcagaatgtaggcgatgaggtgcagacggaaaaggcatttgaagtgaacgatttgctcaagcgcgaacttgacgatgcggaatacctcctgttttccctgctctatttgcttgaatggccccgcgaccggattgcgcgggagctgaatgtatcgccagctgcgctgaaaaagcgcatttttcgcctgcagaagaaaatacgacggctttgtcaggataatttatgttaaattttatatatgatgtccacttggttgggagttattcgtttattataataggggggtggcgctgatgaaggatccccatgcgcagaggacgccagaagaaacggaccggaaaaacctgacttcccatggggcggcatttgagcagggagaagatgcgtcgccggagctggaaaggatatggaacgcgatgcagcccaagttggccatcatcgaccagacactggaggcccttgcgcgctaccaggcgcgtagcgccatgcggcgcaaagtcaagcgcaccctcctattggtggcttgcgcattgctggtgtgcggatgcgcgctggccatgggcatcaagctgtgggatttgaaagtgggggtgatagacggcacgctggccatcttcgttcagcgcaaccagaacgagagcacgttgcaaagggaagcgggtacgggctggggcgacgcgctggaccaggcgctggtggaacacgatgtccgcgtcgctatgccaaagtggattcccgaagggtttgagctggcagacatcatagtagatgacgcgtacgaagttgtacgcatcaatgcgtggtatgaaaaaggcgaggatatgatcgttttctccatcattcagacgcaagaaggcggcatgattgacgcgttttacgagatgaacgaggagagcctgcgcacggaaatcgttggagaacgggaagtatatttctttgccaacaacgcgcgaaacggcgcggcatggcatgaggacgaatacctcgtgtacttttcgggggacatttcggagcaggaagtggagaaaatggtgcagtccatttttgaggatgaaggaggagaaccatgagaggcacaaggggaatgcggtgcgctttggcggttttgctgattttggcgctgagcgttggctggggcgccgccctggcggcaacccggcggagcagcgacttgatctccaactacacgataacgagcagagccggggacgatggaaaagtgtatttcacggcggaggtggtcgcgtatgaggaggctgatcggataggcttttccgccatttacatttacgacgcggcggggaacatcgtgaaatccgtctattccaagtatgcgtcgaatgcccggtcgcattcgtatacgacctcgtacgatggcacgccgggccaggactaccgggcgtatgtgaccttttatgtcaaagacggttccattgtggaaaatgataaaacgcgctggagcacttatgtaacggcgcaataaccctgtaatcttcccctttgaaggcggcgttatgtttgttcaaacgccgccttcaattttttggcgcggttttgctggaagccgcgttctgccggtatttcgtcaacgctctgggccgctggcattctgctggcggctttttttgtattccaagggggttacgccctgcacttttttgaatgccacgcggaaggtatgcgtcagcgcgtagccggaggcgagggctacttcattgatgctcagctgcgtggtatccagcagatggcaggcgtgggcaatgcgcttttcctcgatgcacgcgctgattttgccattggtctgctcccgaaacagttgcgagagatatttgtcggaaaggtgcagcgtatccgcgatgccgctgacgctgagcgtgggctccgcgtagtgcttatcgatgtagtctttcaccgcctccacgatgtgcgcgtttcccgcgtgcgggttttggttctgctcgcaggcgcgcaaacagaacgagcggatttccgcgaagaaggcgtcgaacccccgggggtcctccatcacggaatccagcatgccctgcaggcggtggagaaaggccttttgcgcttcggcctctccgcccacgccgaggtggttgaccaggcggtacaaatcgtaagcgaagaaacgcagcacatgatcggaacgcacgctgctttgcaggcttttttcatagagttcctccaatatggtctgcacgccctgcgaattgcccgcggcaatgttgttgcgcaggcgggtttcgctgtacacggtgtattcaaaattgtacagggcgtcgtcctggtacagatcgtcgtaccagtgcagggggccgttttccagcgccagccgccccatcacgcgcacctgccgccaagcctggggaatatcgacccgcgcaaaaacagtcgtgctggcataggtgaccgtttggagccgctgggaaagggtttcggccacggcttcaatgctttcgcgcaggtcggaaccatcgcccagcaacaggcaggcgaaattgcccggttccatctccaccagatattgccggtccgaaccgaattccgccgccaggacatgcgcgatttctggcagagcgttctgcgcctccgccgcgggacgcattagcaacaccacaaaggacacggcctccagattgatcccggccaacggctgttcgcgcaggatatcggattccaggggcaattcgccctgcagcaagcggcgcaggaacaagctgcggaataggttgcgctgctcatccgcccaggcggaaagctgcgcttctttttgctgcgaggagcggatggcttcctgcatgtattcaaaaacggtggtggcgctggccgattggttttgcggggcgatggcgtcgatcacgtcttgcacagaggcgagattccgccgggtggaaagagccgcgacgacgatgcccagcaaaaggaggcccgctgtgagcgcgagcatgcccgtgcggtattcctgcaggccgctgaaggcgttggctgccggttggatgctggccacggtacccgtgctgcccgtggctacggcaaccaggcagtctgtgccgtcgctcgcgcgcaaatggtatacgccgctgggcatgttttgcagctggaactggaaatccgcgatggcggcatcgctccagcggcgcgatgcgccctgggctgccaccattttgccgccgctcaggaacaggcacagggaatccgcgtcggtcatcccttcgccgaggcgttggcgcatcgtggcggaatccagggtgaaaaggatcacgcccgtgggcggcacgctgggatcggtggggatgctttgcgcaacgacccaagcggtataggattcgtccatatagccgatttccacctctggcaggagcgccccagaataaaaggaagaagtgaaacgttccttgaaatccgcataagatccattaaacagccggaaataattgttgtatagctccatgccctcatgcagcgtgctgctctgggaaatggcctggtcctcctggaacaggaacacgtatccgcggttcaccaggggattgagcaggctttccgtgttgatctggagataggtcatttggccgatggtgctgcgatacagggccagctgatacgctgtgccggtatccaccttatcgatttgtatggccaggttggccgcgtttaggcgcacctgctcgatcagggtgtcgatattggcggctacgctttgcgctacgctcagacggctgccttccacgtcgttgcgcatggcctgcatgccttttccatgggaaaagaaagtgagccaaatggccaagcaaaggatgatcaaaaaagggaagaacaaaacggcaaaataccggcgctgcattttctgccgcaatttctccactcctcccgttttctctttcgcaaaatgcgccgcattgcgcaattcttggcgaaatggcgcaaacatcttccaaaatattgccgggcaattgcatagggcaagccaaaaacgctgagcgaatgcctgcctgggaaactgctccgcgccgcattctggattctctgccctgtagttaccatgaaaccaggcgtcaaagcaataaaaaagcgaatttttgtccgcaagctgggaatttgtcccctgtaaagctgggaaaaccgcttagtatacagaaattttgtacttgcggcgcgctgccgcatggcttaaaatagcggcaacgcaacccaagccaggatgggaggaaagctgtgccgcaacctctatgagcagggcgcgatccatccggaatttgccattcgcgagcgcgcggattatgaagcggactttatcaatggcaaggccggcagctattgggacgttagcacggtgatttcgggcaaccagagccgtatgaccgatgaaaatgccgttctccacgccagcaaccttttcgccaatgaagatggcgaatatttcaccagcgctggccgcggcaacaatggcgtgctgctgttcagcaaaaaggccattccggatgaagaaacgctggaaaaggtgatcaacatcttcgatcgcctggccgatgaggaaatgtgcaacctgctggcactgggtgtggaaggcatcaattacgaagtgattgatggcgtggcgcacatgattccggaaaacgatacctattggcaggaaatgatttacaacccctattctattccgctggcggttcgctggcccaatctgcgcaccatgcccgtggaatacgactatggcgcccagcgcaacctggagatcattgaagagaacgagccctacgccgtggccgaccccacgctgggcctgatttcggaactgtacaacgagatcggcggcgatttggatacgctcctgagcgatgcggcgaccctgtatatcatgggcgaaatcgatatggaagaatatgaaaaccgcatgcagcagtggcgcgaccagggcggcgacgacatcgcggcggaatacgctgagctgtatgaggccgcgcagcaggcgtaagccaacgttagaagaatttggatttttgaggctgccgaaaaatatcggcagcctcaaaccgtttgtgccccgtgatttgccaagacaaaaatccgccgtgaagaaaaccctcgcggcggattggcttatgcaagaatcaatcgtgcaccagggaatagttcggggattccttggtgatggaaatatcgtgcggatggctttccttcaggcccgcgcccgtgatgcggatgaactcggcgttttcgtgcagggcggcgatgttcttcgcgccgcaatagcccatgccgctgcgcaagccgcccatgagctggaacacggtttcggagagcaggcccttgtagggcacgcggccctctacgccttcgggcaccagcttcttggcgtcctcctggaaatagcggtccttgctgccttccgccatggccgcgagggaacccatgccgcggtacaccttgaaggagcggccctggtagatttccatggctcccgggctttcgtccgtgccggcgaacaggctgccgatcatggcggcggccggaaaccgcagccttctggcaatct

SEQ ID NO: 4425 - DNA, 6925 bp, Unknown
  16S sequences of unknown bacteria
gcggtctcacagagccgcggtgcgggcgataaagtaattgcatatataaaatatttgaattgaatatttactttaaggaggtgtttcatacattgttagatgtaataataagtataattgtttcagtcgtcgtgtgtatcccggtcggcttcgtactcggcatgacatacagaaaaaaggtcggtgaggcggagatcggcagcgccgaggaacaggcgaagaagatcatcgaggaaggccagcgcgccgccgagagcaagaaaaaggaagctctcatagcggcgggcgaggagatcctccgccagaggaacgacgccgaaaaggagatcaaggaccgcagaagcgagctctcaaggctcgaggcgcgcgtctcaaagaaagaagagcagatcgaccgcaagatcgagaacctcgaacgcaaggacgatcagctcacgaaaaagctcaaggagtgctcggatacccgcgaggagatcgaggcaatcaaggtccagcatctcgagacactcgagaagatcgccggtctcaccgccgaggaggcgaaagagcagatcgtctcgagaatagacgacgaggtcaagcatgagaccgctcagcgtcttatcgagtatgagcagcagttcaaggaagaggccgacgtcaaggcgaagaacatactgtcacttgccattcagcgctgcgcttccgagacggtcgcggagaccacggtttcggtcgtcgctctgccgaacgacgaaatgaagggtcgcataatcggccgcgagggaagaaatatccacgctatcgaggctatgaccggggtcgacctgatcatcgacgatacgcccgaggctataaccctttctagctttgatccggtccgccgggaggtggcgcgcatcgcgctcgagaagcttatctcggacggacgcattcatccggcgcgcatcgaggagacggtagagaaggctcgccgcgaggtcgacacgatgatcaagcaggcgggcgagagagctacctacgaggtcggtatccacgggctggcgcctgagatgataaagcttctcggacggctgagattccgtacgagctacgggcagaatgtgctcaaccattcgattgaggtcgcgctgctgtccggcatgatcgcggacgagctcggcgtcgacagcacgctggcaaagcgcgcgggactgcttcacgatatcggcaaggcgctgactcaggagatcgagggatcccacgttcagctcggagtcgacatcgcgaagaagttcaaggagtcgaaggaagtcatccacgcgatcgaggcgcaccacaacgacgtcgagccgcagaccataacggctgtcatcgtacaggcggcggacgccatctcagcggcgagacccggagcgagacgcgaggacctcgagaactacatcaagaggctccagaagatcgaggagatcacctacagcttcccgggcgtcgacaaggcttacgccatccaggcgggcagagaagtccgcatagcggtgaagccggaggaggtcaacgacgagcagatggtggtcatcgcgcacgagatcgtcaagaagctcgagagcgagctccagtacccgggtcagatcaaggtccaccttatccgcgagagccgggctatcgactacgcgaagtaaaacagatcgaaactcagagattctttatattttataactttccgacacggcgtggtccggtcgatcaacatatattttataaagacgaaaacataagctttgagcttttgatatacacgggagagactgtcatgcagatggcggtctcttttttacatgagaccggcgaagcgcctgacggcgtcgcttccgcctgacagaatggcggaaagcggcgggacagacttcccacggagacgcttcagatatccggacgatattttctccgctaagattttttcaagtatgtccgcggcgacataaagtttctccgcggtggcgctgcggtcggggaagaagccgagcctgtccgcgctctcgggcgacagcggcacggtcgggaacggcgagcctgcaacaagtgagagaatggcgtgctcatagcagagctgcccgaggctcagcatatctccggcgggatgcgcgagctcactcaagtacctgttccacagttcaccggtcatctccggcgggaaggcgttcacaaaatccgcctcggacgtcagctcctcgaggatatgtataaggctgaaaatgccgcgcacggagcggttcacggtcggcatactgtagtcgacgcaggaatagttccgccgcgcgtcgaaatacatatcatagccgcgtatgtacttctcaagatcgcgggagacgaggtcgttatagtagacgcacatcacgtttattttcgtccgcttcagtttgcggagcgtcgagagcgctttcagaacgtattcgcggtttattttcagtccctcgagataaatattctgaaggcgcaccgaaaatatcacgactgccgccgcctcgggtgacagccttgacagcgcgaggtcggtgttgtacaggatcgagctgagaagctccgccgctgtgccgccctcgacagaatccgattctccgcgggtgtatttcgttatgagccgcgcgagctcgtcgaagatttccgactcaaagcgcgagtagtccgcgtcggtcacaagcccgcagcggagagcttcggcggcggttgagagggtcagatttccgcggtcgattctttcgcggtcgaaatctttgtatataagtttgtcgttcattctgtttcatcctcctggttttccggcattccttcaaaatccccgttgcttcctccggcgagagaggttatcagcccctcgcactgggaggtcagcagctctgtcgagccggcgcatatggcctcgaagcggtcatacatgaagtcggcgaggtcggcgtcgctgatgccgtcacgcgtctcggtcttgatgaaatagaacagctcggcgagatacccgatgagttccgcgaagccgtccggcggcacatatgaggataagcggaacttttttatcagccgcccgacggcgccgattccgatttctatcctctgattgtcaacgagcgcgcgcgagcgtatctccgcgagtcccatcgcttcctctcttgaaagggtgtgtccgccgtcggcggaattcccggcgatatcaagtattgccgccgcgtcaccgtcgacgttcgtccgcgcggcaaaagcgcggttcaataatgtcagctcattcatgaaaacatctcctttgaaaaaatgtgaactgcgtgtaaataatagccgaaagtacttgacttttgctcttgaatatgctatactattttcggataatgagaagtgtataatttggtataggagcgcagacatagaataattatagcatttggcgggagatctgtcaagtgctttttgatttttgcgagaaaattcacatttacggggtcgaaaaacggaccgcgggggcgacctccgctttcgctgcaggatacgtcactcaggcggtgatctgcgtgatcttctttttcgcgaaccgccgaggaacgtcatatgtatgaccatacctttcgtactaacttacagttttgaggcggttttgaaagacggcttgtccgtatttcaaaattcacgacccaatgtcgtggaagtctcaaaactgtttggtctgaaaatttattttcagactttgtccgcccggtgccggacaaggtcttgcttgagatcccgagttcttcagccgcttgtcgtccgcctttctccctggcaggttttaccgcctgagctttgtattcttcatcgtaattcttctgtttcccattttctcttctccttattgaggggaggtatttttattatatctcacttggagactggttgtcaacttttattgtaccagatcaccgctttccgcgacgctctgatgtgacagtccggcggatatgtcgacgtcgaaggtcagggttgtctcgccgtcgccgatcatgtttgttctcgcggtcatgtacacgcggtcaaggcggtcgatcgtgttcagaaccttgtcgagaacggcgctcttcgggtcagtgatattctcggctgaagtgtccggttcggacgggtcggtcagacgcactgccgcgttcttgtagtctgtcggctcgcgcgtgaagatctccgttttggtcggataaagcgcgcagaccgagaccgcgagcgccgccagcgggacgacggacagtgttcttatatgctttttcatgatgatctccttttctgtgatttggagtggcgaaccgcttctgccctatataacgtcggagcacgcgttttcctgccgcggaaattccgggcagaatgaaaaatcagcgttatcaacaaatcacatggctgaagtttgtatactgtgacaatcagtatccgtttatccgacagattccgcgatgcggataacatcctagggtacaggtctcgctgtctatccactgggaattgtcagacttgtattcctgagaataggacatgaccttcacgccgtcgaccttccagacgagggcgtagattgccgatgaatccgtctttacggtttcggcgtaatcttccggaacccatgacgggcggcgcttcgtgaattctcaggttacagacgatgtttcaacgaaatcgtcgaagccgatctggatatggtcggaaaaccatgaggcgaccgtgttccatatgttcgcgcggatagtctcgtttccgagtgccgcggcgtacagcttcttttcgtatttcaggaagatattctcgacgaatccgcgctcgtccggggccagaacggcgagcgccgcgagtgagagcatgacgttatccccatttccgcatacagcgttatcgtgtatatttcatcacaacaatactgtatttgtcaacatgtaccggtgaaaaacacgcggatggctatattgcacaaaaatgaacagctattttctacggtgtgaagcgctgaatactctttacaaatctgtcggtcggtggtataattaaatgagtggtaaatacagagccggagcgctcaacagaaacgaaaaggagaacaatcatgccacgaaagcaccgaatcctctcacttgtcctgctcgcgcttatcctttcccagaccgcctgcggagcggaacagcagggaaccgcggacacagacgcgcaaacctcagccgatgataccggaacgaccgacgagactacaacggtcgggttcgaatacccggacgtcaattacgacggagccgaattccgcatactcaatttcgatcagctctggaatatgtacatacacctcgattcgccggagatagacggtgaggttctgaacgacgccgtttacgcccgcaaccgcaaggtagaacagaagctcggctgcaagacaagatagtcgagaagactttcgaaaacgacaccgcgaacaccttatccagaataaccgaccatgcgaagacgtcgataatgtccggtgaggacgagtatgacgtcatgatgctgccggtcagtgaggctcccgaccttatcaccggcgggtatcttcaggatctcaaatcaatgcccgagttcaaatttgacggcgagtggtgggatcaggagataatcggcgcgactacattcgataacaggctgtatttcgcgtccggcgcggctaacctcatggcgtttgacagtatgtggtgcctgttcttcaacgagaatatggcggagaatcaccagcttgatatgccctacgacctcgtccgcgagggcaaatggacgatcgacgaggcgacgaagtacgcgaaggcggtcgccaacctgaacggcgacgagtcctggaagtggtcgaaggacgggaagtgtgtctacggcatatcgtcgcatcagaactcgccggagcatttctggttctctgcgggagagttcactcttgatgttgacaagaaaggcgaaccgaaattcattcttggcagtgatcgcttctacggcgtcatggataagctcgcggtactgctcgacggcaaggagggcaccacgctgaaggcgaacaacaccgacttcgacgcggacaacggcggatatgtctatgtcttcacgaccggccgctccttcttcatgaccggtgagataaaggcggcgcagctcatgcgcgacatgaccgacaccttcggcatagttccgttcccgaaatacgacgagagccagccgcagtactacacgagccttgtctcacagctcttctatatgacgatcccgtcgacgaacacgaacacatcgagaaccgcgacgatatacgaggcgttgacgcacgagagctatctgagtgtcataccgacctactacagcaatgtcgtcgagcagaaagggctcagaaacgaggattctatagatatgctcgagataatgagacagacccgtgccgtagacgtcgcgacgatattcaactggagttcgaatctgcgctccacgctcaacacgaagctgttcaacggaaactcacaggttgcgtccgacatagccgcacagcagaccaaggtcgaggcgtcgatgcagaaattctttgacttcctcgcggaacagaacggctgatatataaatatcaaaacgaaaaaaacttaaaatacccgtaccggcacgtttctgggcgggtattttcgcttgctttggcgccgggtcgacaatttcagaaaaaactctttttttcacgggaataatttcggcattgttgctattttctttcggacgattttgtgatataatatatgtttgtatactgctgcttcaagcggcggatatcgttttataaaacaggcaaaaataatattcaaataaactatcaagggagttttcagattgatccgagaagatttacgcaacatcgcaataatcgcccacgttgaccatggcaagaccacgctcgtcgacgaaatgctcaagcagg

SEQ ID NO: 4426 - DNA, 26883 bp, Unknown
  16S sequences of unknown bacteria
ctgcgggcgcttcgcgtggagctgcccgacgcgtcgcccgcctcgggcctttggatggcatggcccccgcggcgatacgacgtgtgcgcgcggtagtgctcggacgaccttctgaaatcgctcgcggattgcgcgcggtacctgccctcggtgccgtattcgcggtgttccccgttctttccgtgctgctgcgccatgcgcccgtctcctcgcccgttgcccttgcgttggcgagagtataggccatgggcgcagactttgcgccccgcgcctgcgccgcagcgcgcctatctggtgcatttgccgggaagctggcgggatgccgcttcccgatgacgtacaatcaaggtttcgtaacaataattcaacgccgctgtcgaaaaactatgacgctatagcactctactgtgatagagtagtcgccatcgattcagacgcggtaaggagaagacataccatgattccaaagacgccacgcggttttcgcgacgtgctgcccaccgaggcggcatggcggctttccattaaagaggcgatcaacgagcgcttcaagctgtgggggtacctccccgtcgagacgcccgcggtcgagctgctcgacgtgctcgagatgggcggcgagctgtccaacaccccgtttcggttcttcgacagcgacaacgacctgctcgtcttgcgccccgatgtgacgcttcccgtcgcgcgcatgaccgcgctgcgactcgacgggcacgaggggccgttccgcctgtgctatgcccagcacgtcttcaccgagaacgactccacctacggccaggaccgccaggtcatgcaggcgggcatcgagttcatcggcaggcgcggcgccgtggccgacgccgaggtgctctgtctgctgttcgaggcgctcgaggccacgggcatagaggacttcaccgtcgccatcggcacggtcggcgtgctcaacgccctcgtgagcgaggcgagcgacgaccccgcgtgggcggcgcaggtcttcgcggcgttccacagctcggatctggtggccgtcgaccgcctcgcgtccgataggcgcgccaagcccatctacgccgaggccatctccaagctcgcgcgcatccgcgggggcgaggaggcgttcgagcagtgccgctccttggtcgtgccgcttggctgcgaggacggtctcgacgacctgcagcgcacctacgaactcgtcaccgccaacgccgagtcgggcaagctcatggtcgacttctccatcatctcgtcgttcgactactacacgggcatggtctttcgagccttcgcgcccgatgtgccgaccgccctggcaagcggcggccgttacgaccacacgctcgagtcgttcgggcgcaacgagcccgcggccggcttcgccatcgtcatcgagcaggtcatgcaggcgctcgaggcgcagggcgtgcgcccgccgcatgtcgggcccgaacaagagatagcgtgcgacgacgccaacgagatgttcgcgcgcgccaaggagctcaggcgcgagggcaagcgcgtcgtgttgggagggggttcgcgatgacgcagcgcaatctcaagatagcggtccccaaggggtcgctgttcaacgataccgtcgccctgctgggcgaggcggggctcgacacgacgggcctcgacaaccccggcaggcaccttattatctcgaacccgggcgtcgatttcatcatcgtacgcccgaccgatgccccggtcttcaccacctacggcggagccgactgcggcatctgcggcaaggacacgctcgtcgaggcagacctcgacgtgctcgagatggtcgacctcaagtacggctactgccgcttcgtcgtggcggagcccgaggcggcggccggaaaggccgaggcatcctacgagcgcctcggcgtgctgcgcgtcgctaccaaatacccgcgcatcacgcgctcgtactacgagggcaaaggcgtgcaggtcgacatcatcaagatgcacggcaacatcgagctcgggcccatcgtcgggatggccgaccgcatcgtcgacatcacggcaaccggaacgacgctgcgcgagaaccacctgcgggtggtgagcgaggtgctcggctccacggcgcgcttcatcgccaacccggccgctgtgcgcaccgacccgcgcgtcatcgagctcgcctcgaggctcgaggagctgacgcgagacaacgacgtcacgatgagctgacggacgcaaccgatataaacccgaccacgcaaggttatcttggataggagcatcatgagaaagatcgttttggaagagggccaggtgttcgacgcctccctgctcgagcgcgattccgcattcgacgcgaacgcgctcaaggccgcaaccgacatcgtcgccaccgtgcgcgaggaaggcgacgcggcgttgcgtgcgtactccgagaagttcgaccacgtcacgctcgacgcgctcgaggtcaccgacgaggaaatcgaagacgcgctcaaggccgtcgacgaggacttcgcgcgctcggtcgagtacgcggcggacaacatctccgagttccacaagcgccagctgcagcagtcctggttcaacacccgctccgacggcgccatcaccggccagcgcttcacgccgcttcagcgcgtgggcatctacgtgccgggcgggcgtgcccagtacccctcgaccgtcctcatgaacgccatccccgcggcggtcgcgggcgtcgacgagatcatcatgtgcacgcccccgtccaaggacggcacggtcaacccctacacgctcgttgccgccaacgccgcgggcgtcgaccgcatcttcaaggtgggcggcgcgcaggccatcgcagccatggcgtacggcaccgagaccatcccggccgtcaacaaggtgaccggccccggcaacgcgtttgtcgccgcggcgaaaaaactcgtgaacggcgacgtcggcatcgacatgatcgccgggccgtccgaggtgtgcgtgctcgccgacgagaccgccatccccgagttcgtcgccatcgacctcatggcgcaggcggagcacgatcccaaggcgacctgctatctcgtgacgaccgaagagggcctgctgcccgaaatcgaagacgcgctcgacgagctgctcgagcagaccgcacgccgcgagatcaccgaagcgtccctcgagcacggcctcgtcgtcgtgtgcaagacgctcacgcaggccttcgacgccgtgaacgtcatcgcgtccgagcacctcgagatcaacatgtccgacccgtgggagctgctcggcaaggtgcgtaacgccggcgccatcttcctcggcccctggacgcccgaggccgtgggcgattacgtcgccggccccaaccacacgctcccgactggcggcaccgcggcgttctccagcccgctttccgtcgacgacttcatgaagaagagctcggttctgagctactcgttcgacgcgctcgagaccgacgccgacgccgtcgagaccatggcggcgcgcgagggtctgtggtcgcacggcaagagcgtggacctgcgcctgcagttcatgaagtacgtgcaggaagagctcgccggcatggacgacgaggacgaatgcggctgtggccacgagcatggcgacggccacgagtgcggctgcggccacgaccacgagtagcagccgagaagacgccacgtcggaccaacaacagcggaggagaaatgaagcaggtacgccagtcagcgccagcgctgcagggcatgattccctacgatcccaagtacatgaaggcagacgtcctcatctcggccaacgagagcccacttgacgtcccgcccgaggtcaaggacgcggttctcgcgcgtatcgggaagctcgcgttcaatcgctaccccgatccgctcgccaacaggctgcgcaaggccatcgcgacgcactggggcgtgcaggtgcaaaacgtgctgtgcggcaacggcggcgacgagctgctctacgacatcatggtcgcctggggcggaccgggccgcaagatgctcaacttcccgccgaccttctcggtctacgagacgaacgccgagctcacgggcaccgaggtcgtcaactgcccacgcgtcggcgacgacttccacatcgacgtcgacaaggcggtcgagcgcctttccgcaggcgacatcgacgtcgtcgtgctcacgagccccaacaatccgaccggcatgacgaccggcgtcgacgacatcaggcgcatcctggacgcgagcgacgcgctcgtgctggtcgatgaggcctacggcgagtttgccgagggcggctgcctcgagctgctcggcgagtacgagaacctcatcatcttgcacaccttctccaaggcgtaccgctgcgccggggtgcgcctgggctactacctcgccaaccccacggtcatcaacgagttcaagaaggtgcgccagccgtactccgtcgacgcgctcagccagatcgtcgcagaagaggtcatggcgcatgcggacctgttcgaagacggcatcgagacgacgaagcgcgaacgcgagcgcgtgctttcggcgctggacgccatggagggcgtgcgcgtgcacccgagcgaggccaacttcatcctgttccacgtctcgggggcaacgggggtctgggagcgcctgcaccagcagcattccgtactggtgcgcaacgtgtccggcgacacgcgcctgccgggctgcctgcgcgtctccattggcacgccggaagaaaacgacgcgtttctggcagcgctcgacgacgtgctcaagaactgggcgcttggctagggtgtaatgcccgggcaaggtacgagaagacgacacgggaggatctcatgggcagaacagccgagatgacgcgcacgaccaaggagaccgacatctccatcgcgctcgacctcgatggaacgggaaagaccgatatcgacacgggcgtgccgtttttcgaccacatgctcgacgccttcggcaggcacggcctgttcgacctgacggtgcacgcgaaaggcgatatcgaagtcgacgcgcaccacacggtcgaggactgcggcatcgtgctcgggacctgctttgccagggcgctcggcgacatgaagggcatcacgcgctacgggtcgatccttctgcccatggacgagacgctcgtcgcggcggtagtcgacatctccggacgtggccagctccactacaaggtggacgtgcccgcagggatactcggcacgttcgacacgtcgctttccgaggagttctggatcgcgttcgcctccaacatgggcgtgacgctgcacctccgctcgatcgaggggcgcaacgcgcaccacatcatcgaggcgcttttcaaggcggccgccaaggcgctcatgcaggccgtggcgcccaatccgcgcatcgcggggcaggtgccgtccacgaagggggtcctgtagatgggcgcccgcatcgcagtcgtcgactaccacaagggaaacctcgcctcggtgcagcgcgggctgtcggatgcgggcttcaacgcggtcattaccgatgacgccgcggccatccgcagcgcagacggcatcgtcttgccgggcgtcggggcgtttgccgatgccatggccatgccatccgcgcggccgtcgccgccggcgcgccgtttctagggatctgcctgggcctgcacctgctgttcgagtggggcgacgagggctgccccgcgggcacgcgcatggagggtctcggcatcctgcccggccacgtcatgcgcgtcgagtcgttcgaccccgcgggcaacaagctgaaggtgccgcacgtgggctggaacacggtcgacttcacgcagaccgtccagatcgacggccaggcggcaagtcccgtcccgctgttcgcgggcgtgcccgaccacagccacttctacttcacgcattcctacaacgtcgtcgccgatagcgcggacgacgtcatcgccacgaccacgcatgcgcgccccttcgactcggcagtcgcgcacgggctcgtgttcggcgttcagtttcatccggagaagtcctccgcgctcggccttagggtgctcagcaacttcggcacgatcgtcgagagcttcggctagccacaaggagggttcgaaagaccatgatcaacggttcctacgatgtcgtcgtccaaggtcccaagcgctatgggcgcgggacggtctcgctcaagtcagatggcgacgcgctttccatccacttcgacgtcgagaacatcggaacgttcgatgcgacgggcacggatgatggcacgaaggtcgccttcgagggcgatgtcgcgctatctggcgagctcgggacggtgcacgtcgaggcgacgggggacacctggggcaattcgctcgacgcgaaggcgcagacgagcctgggcgaggtctccatcttcggtacgcgcatctcggcggcgaccggggactttggcaccaatccagacccgatgtacgcgggacgctggtcagacgcgtactagcgcgcgacggcaggtcctatctatcacgaaggagggggcatacatgattctcgtgcccgcaatcgacatcctcggcggcaaggtggtccgtctcgcaaaaggcgactacgcccaggtcaccgtctacagcgatgaccccgtggagaaggtcaaggaattcgaggcggccggtgccgagcgcgtccacatcgtcgatctggacggcgcgcgcgacggcacgcccaccaacatgaacgtcatttccaagatcgcctgccagacgcagatgaccgtggaggtcggcggcggcatccgcacgatggagacgctcgagcgctacctcgactcgggcgccacgcgcctcgtgctgggctcgacgctcgtcaccaatcccgagttcgcccgcgaggcggcaaagcggtactccgactgcatcgtggccggcatcgacgccaaagacggaatggtcgcgatcgaggggtggcgcgagggcacgggcacgccggcggccgacctcgtcgccgagctcaaggacttcggcatccacgagctcatctacaccgacatctcgcgcgatggcatgcagacgggcgtcgacgcggccgcctacgggcgcctggcccaggcggcgggtttccccatcaccgcgtcgggcggcatcgccacgctcgacgacctgcgcgcgctcggggcgctgccggcgcccggcatcgacggcgtcatcaccggacgcgccatctacgagggcgccttcagcgtcgaagagggcgtgcgcgtgtgcaggcaggccacggaagcgaaaggcgagtagatgctgacgaaacgcgtgataccgtgcctggacgtcaaagacgggcgcgtcgtaaagggcgtgaacttcgtgaatctgcgcgatgcgggcgacccggtcgagctcgccaacgcctatgacgcgcagggcgccgacgaggtcgtgttcctcgacatcacggcgacgagcgacggccgcaagacgaccgtggacatggcgtcgcgcgcgagcgagcaggtccacatcccctatgccgtgggcggcggcttcaggacggtcgcggacatgcgccagatgatcgccgcgggcgccgacaaggtctcgctcaactccgccgccatcgcggacccgacgctcatcacgcagggcgcgcgcgccttcggcagccaggcggtgctcgtggccatcgacgccaagcgcgtggcgggcggtgcggacaagtggaccgcctatatccacggcggccgcaaggacacgggcatcgacgccgttgcgtgggccgtcgaggcggcaaggcgcggggcaggagagatcttgctcacgagcatggaccgcgacggctccaaggaggggttcgacctcgcgctcacccgcgcggtggcgcgcgcggtcgacatccccgtgatcgcctcgggcggcgtcggcaccctcgagcacttcgccgagggcatcatcgagggcgaggcggacgccgtgctcgccgcgagcgtgttccacttcggcacgttcaccatcaggcaggtcaaggagtacatggcatcccagggcatcccggtgcgcctgtaggcgcccgttgcccggaccgcacgcgaggaaggacgcgcagttgtctgaaacccagctgaaatttgacgatagggggcttatcccctgcgtggtacagcagtacgatacgggcgacgtgttgatggtcgcctggatgaacgccgagagcatcgagctcaccaagaagacgggtacgacgtggttttggtcgcgctcgcgccaggaactctggaacaagggcgctacctcgggaaacgtgcagcacgtcaagcaactgtactacgattgcgatggagacacgctgctcgccaaggtggatgcggaggggccggcgtgccatacgggcaacacgacgtgctttttccgcacgctcgactgaggagtagcaacatgggggagagaacacccaacgtcaccgacggcaacctgggagagacgctctacgcgctggccaacacgatccacggcaggtgggaccacgacagctccgagagctacacggcgcttctgctcacgtccaaggaggacaagtgcctcggcaagatcgtcgaggaggcgggtgaggttgtcatggcggctaaggacgacgaccacgaccatatccgctacgagatgggcgacttgctctaccacctgctcgtcgtggcggagcgctacggcatcacgctcgacgagctcgcgggcgagctcaacgcgcgcatgaaatagaggccgccatgtccgaggcaagagacaaggtagagcaggccatcgcgaagctctcggagctcccgagcggcgacgagctcaagccccaggagctgcccgactttgccgacatcgcgaaaaagaccgggtttgccgccaaggccatgcgcatcggggcggtggtgctgggcgtcctcgcggcagtgctgctcgtcatagccgtcgccctgtgcgtccgcgccggcgtgcgcatggcaaacgcgacccccgaggcaacggcctctgccgccctgcacgcggtcatctcgcacgacaggtccgcgttcgccggctgctatgcgggcaatcccgacgagctcgaccacgacgtcgacacggcgttggcgggcgcgatcggcctcgagagctccacgacggtgccctcggagctcgacgcctcgcaccagaaggcctacgacgcgtttctggcgcggctcgtggacttcgactacgaggtcggccaggcgcaagtcgacggcgacagcgcgaccgtgcaggtaaccgtcaagacgcgcgacctcgacgcgtacttcaacgactgcatgagcgactacctcgcgcgcacgctcgccgatgcgcgctacaccggcgcggtgagcaaccagaaccaggcgcgcctgttcgtggacgtggccgacgagcacgcccagcagctgggcggcaaggaccagtccgccaccgtcgagctcaggctcgtgcgcgcgggcggcacctggaagctcgacacgctcgacgcaagcgagctcgatgcgctcacgggcggcttcttcggagcgctcgagcaggtgggcaattcgtactaccacgcaaacgccccgagctagcattcgggctataatcgaccagaaaaacgacacgagggcggatgagtccgccctcgcttggcattatctagaaaggcagcaaccttgcaagagcgtccccatttccccaaacgcgcgatcgtgaccgcaggcatgccctatggcaacaaggggctccacttcggccacgtcgcgggcgtgttcgtgcccgccgacatcaccgcgcgcttcctgcgcgaccgcctgggcggcgaaaacgtcatcttcgtcagcggaaccgactgctacggctcgcccatcaacgagggctaccgcaagctcgtcgaggcgggggagttcgacggcaccatctccgagtacgtgatgcgcaaccacgagcgccaaaaggacgtcttggacgcctacgacatcagcctcgacgtgttcgaggggtctgaaatcggcctgtgcggaaagatccacgccgaggtcacggacaagttcatccgccgcctgtacgagggaggctggctcgagaagcgctcgaccccgcagttcttcgacgtgaaggccaataccttcctgaacggcaggcaggtgctggggcactgccccgtgcagggctgcaagtccgagaaggcctatgccgacgagtgcgacctcggccaccagttcatgcccgaagacctcatcggacccaagtccacgctcacgggtgagacccccgagctgcgccccgtcaccaactggtacttcaagctgccgcagatgcgcgagctcatcgccgagcacttcgacaacatcgaaggccgcgacacgacgcgcgacgtcaccgtcaacacggtgcgcgagttcctcgtgccgccggtcatctacgtcaagcaggagttcgaggacgcctaccgcacggtcgaggggcagctgcccaagcacacctactatccggtcgagaagggcaaggcgtcgttcacgctcgagttcgacaacatcgacgagcgcgacgaggccaagcgcatcctgaccgaggcgggcgtcgccaagttccgcacgggcaaggcgctcgtcccgttccgcctgacgggcaacatcgaatggggcgtcgccgccccgcagctcgagggcgaggagccgcacaccgtctggtgctggccggagtcgttgtgggcacccatctcgttttccgaggcggtgctcgtcaaccgcgggcgcgacagggaggaatggaaggactggtggtgctctgacgatgcacaggtctaccagttcatcgggcaggacaacatctacttctacggcgtcgcgcagacggcgctgtggtctgcgacgcagggttctaacccgcatgccgagggcacgggcgacgagctgcgccagacgacgctcgtccccaactaccacattctgttcatgggcaaaaaggcctcgtcgtcgggcaagatcaagccaccgcttgcagacgagctgctcgactactacaccgtcgagcagctgcgcgcgcactgggcggcgctcgggcttggcctgaagtccgcgagcttctcgcccaagccgttcgaccccaatgccagcgagaagtcacccgaccccgccctcaaggagggcgcgctgctcacgaacatcttcaaccgcatcgcgcgctcgtgcttctacacggcgcagaagtggaccgacggcaaggcgccgctcggtggccccagcgaggaagtctcccaggcgtgcgaagctgccatcctcgagttcgagcagcacatgcaccgcttcgagatctgggccgccatggcgcagatggacgagttcctgcgcggcatcaacaagtggtggagctcggcgagccgcgctgccctgaacggcgacgatcccgagcgagacatcgtctccgtcttgcgcgacgcgttccactacctgcgcgttgccatcgtgctcatgcacccgatcgttccccacggcaccgagctcgtctacgagtacctcgacatcgctgatcacggctcgaaagaggggcatgcggggttcttcagctggaagcacatcttcgagccaatcgattcctgggcagaggatgtcgagagacaatccggctggttcaccctcaaagaggtgccgccgcgctttgatttcttcgagaagcacccgagccagctgtaggaaaaaagaaagaggagcccatggccaaagaacacgtacacggcgtcttcgagtcgattgcccagcagtacgactccgcaaacgaccgcatctcgctcggtatgcatcgcctgtggaagcaggcgctcgaagacgtcgccgtctccacctgctcgcacccggatgcgggcgccgggctggtgctcgacgtctgctgcggcacgggagacatcaccgagcgcatcgcgcgcaaccacccgaacatcttcgtcacgggcctcgacttctccgcgcagatgctcgacgtcgcgcggcaccgcacgcaggacctgcaaaacgtgatgctcgtcgagggaaacgccatgagcctgccgttcgacgacgacacgttcgactccgccgtcatcagcttcgggctgcgcaacacgcccgactacgagcaggtcgtgggcgagatgatgcgcgtcgtcaagcccggcggcgtcgtggcgtgccttgatgcgtccgtccccgactcgaagctcatcgacccgttctaccagttctactacaagaacatcatgacgtttctgggcggcgggttctcccaccacgaccagtacgagtggctgtacgagtcgacgcaggagttcctacgcaaagacgagctcaaggcgctgttcgagaaggtcggcctcgcgtacgtgagcgtgcgcccgttcatgttcggggcagccgccctgcacgtcggctacgtgccggcgtaggcgatacggggcatttccgtgcaacgtctgcacttcgatgacatcacgatgcgctactcgtctgaagacggaaagggcacgctcgcgctcgacgggctgagcttttccgtggagaaaggcgagtccgtcgcgatcatcgggccgtccgggtgcggcaagtcgagcacgctgcagatggcggcgggcctgctgcagcccacgagcggctcggtcaccatcgacggtgcgcccgtcaccgcgccgcgccaggacacgtcgctcatcctgcaggacttcgggctgcttccctggaagaccgtccgcgacaacgccgagctcggtctgaagatccacggcgtgggcaaggcggagcgcaggcagcgcgccgagcgggccctcgggctcgtcggcctgcaggacttcgcccaggcctacccgagcggcctttcgggcggcatgcgccagcgcctcgcgctcgcgcgctcgctcgcgctcgacgtcgacctgctgctcatggacgagccgctttcggccttggacgcgctgctgcgcgagcagctgcaggacaccctgctcgcgctgtggcaggcgcagggctatgcccagatcctcgtcacgcactccatcgaggaggccgtgtttctcggacagcgcatcctcgtgctcacgccgcgccccggccgcgtcatcgccgttgtcgacaaccccgacgtgggttgcgaagactatcgcggaagcgacgcgttcttcgagcgctgcaccgacatccgcaagaagctgcgtgccgccgtggaggcggccaaggaggcatcgcatgcgtaagctcgtggggtacctgtggggtaccgtcttcgtcatcgcgctgtggtgggtgctggcactcgccatcggctcgccggcgctgcccacgcccgatgcgacctggcccgccctcgtggacaacttcgcgcgcatcatgcccgagttctggacgagcctggggcgcatcgcgctctccatgctcatcggcaccgtgctcggcgtgcccgccggcctgtggatcgggcgctcgagaaggggcgaccagatcttcggcccggtgctctacgtcttgtaccccgttcccaagatcgtctttctgcccgtgctgttcatcttgttcgggctgggcggccaggccaaggtgatcctgattgccatcgccatcttcttccagatggtggtcaccatgcgcgatgccgccaagaacgtcccgcagggcgcggtcgtctcgctgcgctcgctcggtgccacgaagggccagatcctgcgcgaggtcgtcttgcccgcatcgctgcccgatctgttcacggcgttgcgcatcacgacggggaccgccgttgccgtgctgttcatcgcagagagcatggcgggctccagcgggctgggctactacatcatgcacgcgtggtcgctgctggaatacgagcagatgttcgccggcatcatcgccatggcggtgctcggtgtcgtcatctacgaggtgttcgagatcctggaataccgcctcaccaagtggcgccgcgcgtaaggggcgtctggcgtcgtgcctccttctcgcccacgcccgaggcgacggcgtgctggcctttgcggatttcaatgccatgtggtttcagatgactgctatagtcttctgtcacggtaatgcaacgtgcggcactgcggaggcgcgacccatgagcgatatttcgtctggcgcttacgtcatcgacgaagactacaccatcgtcagcttcaacgacacgataaaggggctgtacccccagctcaaggtcggcgagaaatgccataagcgcctgatgggcctcgacgagccctgcccgccctgcccggtcgccaaccacgtcttcggcccgcgcacgtacatggaccccatccgcggcatctacgagaccgtcgacgccgtcgaggttatgctcgaagacgggcggcgcgggcacgtgctcgtggagagcaccgtgggcgacagcgaggtcatcgccgccaagctgccgcgcaccgacgacgagctgcgcaagctgctcgagcagaagtactacgactccgtgaccgacggctactcgcgccagggcttcatcagagaggccgagcgtatgttcgccgaaggggaccgtagcgcctacgccgtgatcgtgttcgacgtcttcaacttcaaggcaatcaacgacaccctcggcatcgagggcggcgacgaggtcctctccttcgtgttcgacaccctgaaggacggccccctgcagccggtcgtctccgcgcgcctcgagtccgactggttcgccttcctggtcaagcgcgagctcgtggagcagggcagcttcgcgagcctgctcaacatggagtggaaccatggcgaccagaggttcaccgtgcacctccgctgcggcatctgctatgcgaaagacgacgacctgcccgtctcgaaggtcatcgagcgcgccatcatcgccaagacctgcgccggacggggcggcatgagcctgagtcccgtgttcgaggagacgatgctcaggtcctacatcagccacgccgacatcaccgcgcggtttcgcaacagcctgaagaggggagacttcaaggtctactaccagcccatcgtgcgcgcccaagacggggcggtctgctcggcggaggcgctcgtgcgctgggagcaccccacgatgggcaccattgcccccggagcgttcgtgcccgtgctcgagcgggacaaccagatatcgatgctcgaccgccacgtcctgcaccaggtgcacacgctccaggagtcgctcgcccagcagggcgcgaacctcgtgccgatatcgatgaacctctcgcgacaggacttctacaacgaccgcttcatgaacgagatcttcagcctcgcggcaggaggggcggtcccgaagggcttcatcaactacgaggtgacggaatcgtcggtcgtgggcttgcaggacacctgtacctacctgctcgagcagatccgcgaaacgggagccaagatcttgctggacgattttggcagtgggtactcgtcgctcggcatggtcggcagctacccgttcgatatcgtgaagatcgacaagtccttcgtcgacgaaatcgaggataagacggcggtgcgcgccgtgatcgcctcgacaatcgagatgtgccaccgcatcggcatgaagacggtcgcagagggcgtcgagacgcgcgcgcagctcgactttctcagggcgcagggctgcgactacatccagggatactactttgccgagccgatggatgagggtgccttcctcgattacgtggcgacacatgccgtctgcagcgagcaggatcgcgaagagcagggcaacgtggtgcagctcgacgtcgacctcttcaacctggtcgacctcgtcgaccattcggggcagttcatccaggtgtgccacccggaagactacacgatggtgttcgccaacgagatgacgcgcgtggtctcgggtcatcccgagcagccctatcagggcaagcgctgcttcgagtacatgctcggagccgacggcccctgcggccattgcccgatgaaccagatgggcgacgaagtggaaaagaccgtggaggtggacgatggcgaccacgtgttccagctcaaggcgcgctatgccacctggaacggcaggaaggtcttcatcgagtacggcagggacgtgaccgacgtcaaggcagcgcagctgcgctatgcccgccgcatgcacgccatcctcgagaacatccccgatggccagggtgtcttccatgtcgaccttaccgcggacgagtggctgagctcgagcggcatcgccgagaacgcccagaggatgcagcatgtggaaagcgtcgatgcgctcgtgcgcatgatcgccgcgttcgtgcccgacaaggaggggcaggagcgcttcttcgacaccttctgcagggcgcatgagctcgaggaacatgcaggcggcaagaaccagatcgtcctggagaccgaatcgtactacgacgaccgctcgatccgctggtcgcgcatcacggcgcatctgctcgagaaccccggcaacgggcatatcgagagcatcatctacggggtggatatctcgtcggagcgcgtctacgtcgccgccctcgagcgcgagaagcagcgccgcagctgcgagacgagcgatcttgcgggagatggcgctgcgagagccgcagggtcgatcggcgacatgcaggagatctgggacctgtacgcccaggcagaccgcgacaggcgccacgactacctgaccggcctcagcagcaggctcgacctctacgatgcgctcaagcgcttcgaaaacggcacggatgccccggtcacggccgtcttcatggtcgacctcgatgatttcaaggacataaacgacgcgtttgggcacacgggtggcgacacgtgcctttcggcggtgggagacttgctcaatcggttcggctccactcacgacatgtcgtttttccgttttggcggcgacgagatcgtcggcatcgcgcacgaggacgtccgccgtatcccgcagctcgccacgtgcttgctcgatgcgattcgcgagctgccaatctgcctgggggcgacggccccgctgcacctgagtgcctccatcggctacaccaccaccgtgcacggctaccaagaggcgatcgacgcggccgacagggccatgtacgccgccaagcggcggggcaaagaccaggtcgcctgcatcgactaggggcaagcggcgccccggcatgcttctctggcgcctggcgggggcatcgcctccgctgcctgcgccccatcggggccgcgggcgcgcctgcgcgctacaatggcagcatgaacgagattgaggttccacataaggcgcagcgcatcatcgacctgctcgaggccgcgggcttcgaggcgttcgtcgtgggcggctgcgtgcgcgacgcgatcatgggacgcacccccaacgactgggacatcacgacgtctgcccgccccgcgcagatcgagcaggtcatggcagatgccgggctcgccacgcttgcgacgggcgtcaagtacggcacggtgacggtgcgcgtcgatcacgagtcgttcgagaccacgacgtttcgcgcggacggctcgtattctgacgggcgccaccccgactcggtcgagctgctcgagcacgtcgacggcgacctcgcccgacgcgacttcacggtcaacgccatggcctacagccccaagaccggcatcatcgatttgcacggcgggcaggccgacctgtcgcggcgcgtgctgcgctcggtgggagacccccacacgcgcttcgacgaagacgcgctgcgcatcttgcgcggcatgcgctttgcgagcgtgctcggctttgccatcgagcccgagacggctgcggccatgcacgcggaccgccgcctgctcgagcgcgtgtccgccgagcgcatctgggcagagctcgccaagctgctgtgcggccccgatgccgtgcgcatcctgcgggagtaccgagacgtcatcgccgtgctgatccccgagctcgagcccgagttcggcttcgaccagcacaaccccttccacgcctatgacgtgtgggagcacacgctgcatgcactggccgccgcaaagcccgacgccccggcgccgatgcgcctggggctgctgctgcacgacatcggcaagccgcactgcctcaccatcgacgagaacggccgcgggcacatgtacgggcacgagaaggtgggtgagcccatcgcgcgcggcgtctgcaggcgcctcaagctctctcgtgccgcgacagacgaggtcgcctccatcgtgcgctggcacatgttcacgattcccgacacgcccaagtccatgcggcgcttcctgctcaagcacggtcccgacctggcgcaggagctctttgccgtgcggcgctgcgacaaggtggggctcggccgcgagcagcccgaggactccccgttaaacgtcgccttcgccaaggcggaggcgctcatggaagagcagctcaacgcggcgcccgtgttcggcgtgagagacctcgcggtgggcggtgcagacctcatggagctcgggttttcgcagggcccaaggctcgggcaggtgctcagacggctgctcgaggcggtcgtcgacggcgaggtcgccaacgagcggcagcctctgctcgattatgcgcgacgcctgctcgactgaatccccctataccgacgcgcttgcggtacaatctctagccacgtatgtctagaaaggacatgagcatgccagagaagaatgaaaaccaagtgcagtttcgcgtcgaggccacgcccgagcgcgcgtgcggcgtctacgcaaacgcgtccatcgtgagcacggtcaacgcggagtcgcgcatcgacttcctctacgtcgaccatgccaacaagaagggcaacgaacttccggcgcatctcgtctcgcgcgtcatcatgccgacgagcgctcttgccaacctttccgagaccttgaacgagcacattgccaagcacctcgagaagagcatgaactgagggtacggctgaactcgggggaagcgacgcccgcgcatccgcgcgcgccgtacctgcttggatacaacttgtcacgcgagaaagagcaccatgtctgaaacacccaactacaagcacacgatgaacctgcccaagaccagcttcaagatgaaggcggggctgccgcagcacgagcccgagcgcctcaagaagtggggcgagatggacctctaccacgaggtcctcaagaagaacgagggccacgagacctacgtcttgcacgacggcccgccgtacgccaacggccccatccacatcggccacgcgctcaacaaggtcctgaaggacatcatcgtcaagtacaagtccatgcagggctactacgcgccgtacgtccccggctgggactgccacggcctgcccatcgagaacaaggtcgaagagcagctcggcaaggagaagatggccaagatcgacacgcccaccttccgcaagatctgccgcgactacgccaccaagcagctcgacggccagcgcaagggcttcatgcgcctcggcgtgacgggcgagtggttcgacccgtatctgacctacctccccgagtacgaggcgggcaacatcgaggtcttcaagaagatgtacctcgcgggcgcgatctaccgcggccgcaagccgatccactggtgctcgcactgccacacggcgctcgccgaggccgaaatcgaatactccgacgaggtcagccccgcgatcttcgtccgcttcgagctgacgacgacccccgagggcctcgagagctacgagggctccatcgacgtcgcgatctggaccaccacgccgtggacgcttcccgccgacgaggcggtcatcctgcaccccgaggcagactacgtcgccgtcatgcacgacgggcgccccacgatctttgccgaggcgctggccgagaagtgctgcgccaagttcggctgggactacgagctcgtgctcgacgcgtccggcgaggtctggaagcgcacgggcgagcagctcgccggcaacgtgtacaagcagccgatcttcggcgaccagggcgagaccggccagttcatctacgccgactacgtcacgcttgaagacggcaccggcatcgtgcacgccgcgcccggccatggcgtcgacgactacaacgccggcctgaagttcggcgtgccgctggtcatgcccgtcgacgacaacggctgcttctaccaaggcgatgccatcgggaccggcggcccctggggcggcatggaggtcaacgaggccaacccgcacatcatcgagtggctgcgcgagcgcggcatgctgctgctgcacgaggacatcagccacagctatccgcactgctggcgctgcaagcagcctgtcatcttccgcgccaccacgcagtggttcgtctccatggacaagacgtcgctgcgccagcgcgcgctcgaccagatcgagacccgcgtgcagtggatccccgagtgggcgtcgcaccgcatcggctccatggtcgaggagcgtcccgactggtgcatcagccgccagcgctactggggcgttcccatccccgtcttcaagtgcaaggaatgcggcgagaccgtggccaccgaggagtccttcgacgccgtcatcgagctgttcaagacgaagggcgccgatgcctggtacaccacgagccccaaggagtacctgccgtcgacggtctgctgccccaactgcggcagccacaacctcgagggcgagaaagacgtcctcgacgtctggtgggagtcgggcgtctcgcacacgagcgtttgcgaggcccgtccgtacctgcgccgccccgccgacctgtacctcgagggttccgaccagcaccgcggctggttccagtcctcgcttctgacgagcgtcggcgcatatggcgaggcgccatacaaggccgtcatgagctgcggtttcaccgtcgacgagaacggccgcaagatgtcgaagtccatcggcaacgtcatcgaccccaacaaggtctgcgacgagctcggcgcagacgtgctcaggctgtgggtcggctcggtcgactactcgcaggacgtgagcgtgagcgacgagatcctgcagcgcacctccgaggcgtaccgccgcatccgcaacacgtaccgctacctgctcagcaacctcaacgacttcacgaaagacgacttcgtgagcgccgatgacatgctcgagttcgacaagtgggcactcgcgcgcctcatcgagctcaccaaccagacgaccaagcactacgacgagttccacttccattccgccttccgcgggtggtacgactacgtcgtctccatcagctccgtctacttcgacgccgtcaaggaccgcctgtactcggacgccgccgacagcgtcggacgccgcagtgcccagacggtgctcgcgaacatgctcgaggcgatggttcgccagctggcacccatcctcacgttcacgaccgacgaggtctacgagaagtatcccgagggcctgaaggggcccgaccacgagccgtccatccagctcgccagctggatgcacgaggatgacttcgtcccgcagattcccgcggccgagcgagagcagatccttgcaacgtacgagaccgtcacggccgcgcgcgacgctgtcaccaaggcaatcgaggaagcgcgcaacgccgagctgctcaccaagagccaggaggctgcggcgacgatcgtctgcaacgccgagaccgccgctgtgctcgaggcacgcggcaccgaggcgctggccgagatgttcatcgtggcatccgtcagcatcgacgtcgacgagtccgctgccgagccgagtgcgacggtcgctcccgcggcaggcgagaagtgcccgcgctgctggaacttccgcgagctgggcgaagacggcctgtgcacccgctgccacgaggtagtggagagccttgaagcttagtcgcaaacagttcgacattctcctgttcgcgctgctggctgtctggctggtggcgacggaccgggtgttcaagtcctgggctgcccagaacctccagatggggtcgatcggatacgacttcggccccatcgcgctcacgctcgtgcacaacagcggcgcggcgtttggcatgggtcagggcggcggcatgctcttcgtcgcgatggcggccatcatcgtcatcgccatcgtggtctggattgtgctcgccaagcagacgcgcacgctcgagatcgtctcgctggggctcatcgccgccggcggcgtcggcaactgcatcgaccgtttgaccacgggctatgtcgtcgacttcatccagttcacgttcgtcgacttcccggtcttcaacattgccgacatgtgcatcaccatcggcgtggtgctgctgttcgtgacgatgctctcgcatatccacgccgacgagaaaaagatcaaggcgtcgctcgacgagaaggcggcagcacagcaggcacgccgcgaggcacaggtggcaaaggctaaggccgaggcggcgcgccgtgcgggcaccgatgccgaagacgccgagtgggaggctgacgtggccgcctacgaggcaaaatacgagagcgaaaatgctgaagaggccgaggtaggcgacgcgtccgagcaaaagccctctttcgaggagcacggcacgacggcacggggaaacgaatagagacatggtcgaaacctatactcatgtcgtcacgcccgacgagcagggcacgcgcttggatctgctcgtcgccaacctgggcatagaatcgatcgcctcgcgctcttccgtcgtgcgcctcatcgaatcggggcgcattctcctgaatggcgagtccgccacgaaaaagcggctcgtgctcgccggagacgaggtccacatagaggtcccgccgcgtagcgcggcccccagcatcgtcgttcccaactacgatatccccctcgacatccgctacgaggacgagcatctgatcgtgctctccaagcagccggggctcgtctgccatccggcgcgcgggcactacgacgacaccctcgcgaacgcgctcgtcgcccactgcggcgagaacaacctcgcgcacgtgcagggggaggaccgcccgggcatcgtgcaccgcctcgatgccgacacgagcggtctcatgctcgcggccaagaccgacgtggctgctgccgccctgcaagacgggatacgcatgcgcgatatcgaccggcgctacgtgacgctcgtccacggcaacctcgcccacgacacgggcatgatcgacgcgcccatcgcgcgcaacgtcaccgaccgcacgcgcatggccgtgagcgaggacatcaacgccaagtcgtccatcactacgttcagcgtgctcgagcgcttcgaggcgggattgcgcgacgagggctacacgctgcttgaatgccatctctacacgggccgcacgcatcagattcgcgtgcacatggcctatacgcggcaccctgtggtgggagacccgctctacggccgggcggcgaacgccaaggcacgcaaccgcgatgcggcgctcaagaccgagctggggttggaccggcagttcttgcattcgtaccgtctgcagttcgaacatcccgttacgcacgagacgctgactttcagggatgccctgcccgacgatttgcaagaggtactcgacgtgcttgcggagcgcagcatgggccgcacgtcctacggtcacgagattctcgactagtcgcgcgcgccaagatccccccgcataggacgcgcgagaagagtggcactgccacacatacggcgttttctgcacgggaaacgtggcactgccacacatcccacgtcccctgcgcgaaaacggtggcactgccacgcatcccacgcattggaggtgcggatgcttagcccatcttttttgcgagcaccacgaagcgctgctcggaggttccgtagctgcaggtcgagagcatgagcagcttgtcgccgtacgatgcgctggcagatgcgtcgacgacggagcgctgcctggccgtggaaacgagcgtgttgaaccctcgttcgtcgagcgcgccgacgctgttccagtactcccacacgttctcgccggaaaggtccacatagaacgccgcgatgggctggtagcttgccgtgccggccagcgtcgtgtactcgatggtgtggccgttcaaaaactccgcgtcgttgaacttctcgagctcgccgaacatgcttccgtcgcgcatgtggtgcgcgtagatgatctggctgttcgtgcgctggtcgtcggggttgctgcccgcaccgagaaacggcgtccccgcccgcgagtccttcttctcgaagttgcggtgcaggtagtactcggggtcctgcggcgtgtacatcacggggtagtcgatgcgcgtgtcggcaacggagatccagccgatgcaatcggcgttttgcgccctgagggcggagatgtccctgcccgtgctctccgtcaccgccttgaagtcgttgtcgtcggcaacgtagctgccgatctctctcacgagtatgacggcgcagatcgccacgacgacgaggcagacgatctcgatggcgagcagcacacggctgcggcgcttcgtatgtgcggtctttgcagctgccatgcagccctcgtttccctcgtgtcgtgcatgtggacgttttcggattctacacgttcgcgcaacgccgcgtgctaccattgtcaccgtcgagacaagatcgggagctgcccgtctcgggcggctgagaggcgaacacccatcgcgaccgaaaggacggttccggtaatgcggggccgaatacgattatgacaacgaccattctcatcattgccggctcggacagctgcgccggcgcaggcatgcagatcgacctcaagacggcagcggcacacggtgtctacgccacctgcgcgctcaccgccgtcactgcccagaacacgaccgaggtcacggccatccagccaatcgaccccgaaatcgttcaggcgcaggtcgaggcggtattcgccgacatcgccccccgggccataaaagtcggcatgctcgggacgaaagaggttgccgaagctgtggccgacacgctgtcgcagcaccgtgacgtgccggtggtcctcgaccccgtgctcgtcgcgacggcgggaggggagctcacgagcgccgaggcgttcgacaccatccgcgaccgcctcatcccgcgcgcgaccgtcgtcacgcctaaccttcccgaggcccgcgcgctcgccggcgccgacccttctgacatcaccggcatcgggacctgcgcgaaccgctttctgaacatgggggcggatgccgttctcatcaagggcggccatggcaccgaggacacgatctacgaccgcctgtacatggcgagcgggatgcgcaaaatgagctcgaagcgcctcaaaggcgagttccacggcacgggctgctcgctttcgacggccatcgcctgcaacctcgcgcgcggcttcggcctcgaggagtcggtgctcgccgcacacgactacctcgccgacgcgctcgcccacgagctcgcgcttggcggcggctcgaagatcttcaacccgctcaacaggctctccagcctgtacggcgcaaccaagtagcacggccacgtggacggcgcggcagcgttcgcgtgtccgcgcgccaaaacccaactcgaaaaaaggaggcactcgtgcccgagtactcaacgcagatggaagctgcccgcaagggcatcgtcacgcccgagatggagcgcgtcgcagaaaaagagcagcgcgacgtcgagtggctgcgcgacaagatcgcccaggggcgcatcgtcattcccgccaaccacaaccacacctcgatcgacccatggggcgtcggcgaggggctgtccaccaagattaacgtcaacctcggcgtctcgggcgacctgcacaactacgacaccgagatggagaaggtgaagatggcgctcgacttcgacgtcgagtcgatcatggacctctccaactgcggaaagaccgccaagttccgccgcgacctcatcaacatgtccacggctatggtcggcaccgtgcccatgtacgatgccgtcggctacctcgagaaagagctcaccgactgcacggcgcaggacttcctcgacgtcgtgcgcgcacacgcccaagacggcgtcgacttcgtcaccatccacgccggcatcaacaggcgcacggtcgaggcgttcatgcgctcgggccgcacgatgaacatcgtgagcaggggagggtcgctgctgttcgcgtggatgcgcctgaccggcaacgagaacccgttcttcgagcactacgacgagctgctcgacatcctctacgaatacgacatgaccgtcagcctgggcgacgcgtgccggccgggctgcatcgacgacgcgagcgacgcctcgcagatctgcgagctcatcgagctcggcgacctcaccaagcgggcgtgggagcgcaacgtccaggtcatgatcgaaggcccgggccacatggcgctcgacgagatcgagagcaacatgaagatggagaagcgcctgtgccacggcgccccgttctacgtgctcggcccgctcgtgaccgacatcgcacccggctacgaccacatcacctcggccatcggcggcgcgctcgcggcgtcgagcggcgcggacttcctgtgctacgtcacgccggcggagcacctgcgcctgccggatgtcgacgacgtgcgcgacggcatcgtcgcgacgcgcatcgccgcccatgccgccgacatcgtgaagggcgtgcccggcgcccgcgagcgcgacaacgagatggcgaaggcgcgccatgcgttcgactgggagggcatgttcaagctcgccatcgacggcgaccgtgcacgcgagtactacgagtccgcgccgccgacagaggacgacacctgcacgatgtgcggcaagatgtgcgcggtccgcaccgtcaacaaggcgctcgagcgcagcgagatggacctgttcgagtagatggcgggggagagctccaaagaggatgtgcggcgcgagcccgtct

SEQ ID NO: 4427 - DNA, 15580 bp, Unknown
  16S sequences of unknown bacteria
aagatctgataggtacgattggtatcgttttttacctttagatccagccagccttctgaaatggtggcgtctacgccggtgggcaggttgctaggcggatctgggaaatccttgctggcatggccatgccgctctacaatggtcagcggcgtatgcagaaacagccaaaacagcagattggaaatttggcacatgcctccacccggcgctgtcgttagatgcccgttgacaacggttagcccctctttatacggtgtgtggcggtctgcatatcggatggcttggctaaaggaaaaagtttctcccggccgaatcaataggccgttgagttctttggcggccagcttcaagttgaataccttgttttcctgatagaccatatcaaacccggtttctgtgttgtatagctggctggaatcctcaaaggccacatacgggagggcgccttccaaacgagccttgcaataggtgtttttatccaggcgcatgccaagataaaaacagaacttgcgctgcttggtgcgcagggggatcaaaaaggggaagagttctgtgactcttttgcgtttcatggatgttcctttccgggattaaaaatgccctgtcttgatactgaaaatgtaccaaaacagggcattgtatatttataggctttgtttcaaaacgatgatgattttctgtccaaattcatacgattttctgacaatccaacggaagccggacggtaaaggcaatgctttcattttcgcttgcggcatggatggtgccatgatgcagctctacgatctctttggagatggcaagccctagccccgcgccgcctgtggaagaggatctagacgaatccaatcgaaaaaactgctcgaatatacggcccagcttatctggcggtatggtgcggccatgatttttcactacgatttgcacactctctgcctgtgcggacatggcaagggaaatcgcactgttttcatagctgtaattgattgcgttgcggatgagattatccaatacgcgttccagcttgtctggatcgcatataagctctacgccgggcgccagatccgtttgccaaaaaagccctttttccgccaagataggggtaaattcgctgacgatctgggaaagcatacgcgtaaggtcgatgcgttcccactccagcgttagagcggttaagttaaaacgcgtaatatcgaaaaactcgttgacgagatcctccagccgcagcgctttatccaacgcgatgccagtgtagcgggcgcgcagctcggcggagatctgcggctcatcctgaagaagcgttaaatatccgatcacgctggtcagaggcgttttcagatcatgcgctagatacacgatgagatcatttttgcgctgctcggcttctttggccatcgcttcgttgcggatggcttgctcacggaataaattgagctcatcctgcacgtttttcatggattccggcagcacaatgggctcatttcgattgtttacaagctggcctgaagcggctacaacctgatccaaataccgaagcggcttggacataaaatagtaggtgatgatggtccaccccaccaggcagaccacgccgccaaccaaaagaatataatcccggatccaggacaatagctgataaaggggatcatagggctgccatatgaccgatgcgcatagctgccacccgagcagcaccactacgcaaaggccgacgacaaatccaatgagagaaagaaaatattgaaacaatacatgccttgtgatacggctgcggtacggatgatttgttttggtattgcgttcactcaatggtatagcccaccccccataccgttttgacatacttgggctttctagcaggctcatgcatcttctcccgcagcctagcgatgtgtgccatcacggtattgttattgtccaaatatctttccccccaaaccgattcaaacagctcttcagaggaaactacgttgccttttcgttcgcaaagataccaaaggatgctaaattccagtggcgttaggctcaattcttttccatttagagagcatttatggctgctttttgaaatgtgaaggccacggatatcgatttcatctgggattttgtcctggtctgccggcgcattgttataccgggtatatcggcgcagctgcgttttcacgcgcgcaatgagctccaatggattgaagggctttgtgatatagtcgtcggcgccaagggttagccctgtgatcttatccatatcctccaccttggcagtgagcatgatgatgggaaaaagatgcgtttctcgaatcttttggcacagcgcaaaaccatccatatccggcagcattacatctagaataacaagactcaacgcttgtgtttcaatacaggatagggcctctgccgccgtataaaatttgtatacatgatatccttcgtttgtcagataaacctccaccagatccgcgatggatttttcatcgtctacaattaaaatgttttccgccatagctgaatgttcctttatcaaatggtttgcggcatacataagtcgaagaccgcaaatcctattgtaacatatgtaacggacaaatacctcctgggaaatggtatgcaagggagaagggcgaaaaacggatagggaaaggcgtagaaggagggggaaatctgcattgcgtttgaagattttttgccggcgtggggtggccagtttgtatgatgtagtttttcatcataggattttccggctctgttcaatgaagcatttggcgccgttgtctaaagaaggggatgcttttacagagaatttatgccttatatgaaacgagaacccttgcaaacacgcatcggcaactggagaagttgccgacagagcaagaaaacaagccttatgggcagcggtataaaaagcagaaaacggaaatcctatcgaaagaggacgtagagaaaggatatgaaaatattataaaattttataaaaatttacttaacaacataaaacatcaaattataatgatacgataatgtattttcggaagacgatgccaatgcttccagcgattcataggaaatgcggcgtatagttttgcaagacctcgtcaatactgaatacgaaatatcatttgatagaggtgacaggaaatggacacgtttgcattgctaattaccatcatcggcggcatcaactggctgctggtagggttggcgcagtttgacctcgtcgcatggatttgcggcggtccggcgacgattgcagcgcgcattatatacaccattgtgggcttgtgcagcctttggtgtattaagctgttgttcaaccgtacgccgaaaggaacgattacgcacaactaaggcaaaaggcaggaatcaatcctgccttttgtctttttgcggttgtttgtgctttttcagcgaagaggccaaaaaagctgccccaatcaaagcgccgcaagagccggcgatgatgtcggtcatggtatcggttaacgaaccgccctgtgcctgcaaatggaaaaatgtatccccacagaattcatacacctcccaaaggcctgcggcggcaatggccaggaagagggaaaataaaacgggcagcagcacagccctagagtcaatctcatagcgacgcacgagcgcagtatatagaagatagcccaccaggatcaaaagaatgccgctggaaaaatgcaggagcagatcgtaaaaagagatggcatgatagcttcccagcatagagccgaaatattgggccatgacggtaaagaaagaaaaaatagcgtagtataacggttttagattgcgtaaaaacaaaataaagagaagcgcggtgcctgctgtcattccataataatagaaagcgataggcgtttcccatgtgaaggaaatcgcataggtaatggtatagacgatcaacagcaagactgaaagaagcgtattatgtttggatgccttcatagaaacctccggcaagagcataatttttaacgattttcttaaattcaaccagaaaagcggttagtcgctttttatgacctttttctgttgatattctttatacagcttggaaaccagcccactgagcgccaagagggccaacaggttcgggatcaccatcaaaccattgaataaatcgctcaatgcccagacaagatctacctttagcatggaaccaaccatgatgaagatcaagacgatagcggaatacaatttcacggcttttgcgccaaacaaatatttgatattggtttggccgaaaaagtaccagcccacaatggtggaaaatgcaaagaagaacatgcatagcgccacaaaaatatcaccgaagtgtccgaacacagaggaaaaggcgacctgtgccaattttgaacctgtttctccggacgatagcgcgccggtagttaaaaaagtaagcgccgttaacgtgagcacaacaaacgtatccaaaaaaacacccatcaaagcaacaacgccttgatcgcatggatgatctactttggccaatgcatgcgcatgcggcgtagagcccatccctgcttcattggagaacaggccgcgtgaaacaccataacgaactgccattttaaccgagataccggctgctccgcccaatactgcttcaggccggaaggcgcctacgaaaatagagacaaaggcctggccgatatgctgataattgacaccgatgacaatcagagagccaacaatataaagcaaagccataatgggtacaagcttttctgtgacagatgcaatgcgccggatgccacccataaagataaagcctgccaaaagcgctacaaataccccaacgatccaggagggcatgccaaaggcaatgtcaaacgcctcggaaatggaattggactgcaccatattccccataaagcctagggctaaaatgatgaaaacggcaaacaatgccgctagaacacggccaaaacgccctttaaacgctgctttaatgtaataaaccggcccacccgtgacctcgccatgaacagtggttttaaatttttgcgcaagtgtggcctcggaaaagatcgttgccatgccaaaaaaagcgctgatccacatccaaaagatagcgccggggccgccggaaaccacagctgtggctgcgcctgcgatattgccggtaccgatttgcgcagcgatggcggtcgtcaacgcctgaaaagaactcatcccttctttgccggcctttttgcctttgaagcgaaaaccgccaaatacctttttgaagctgtccttaaactttacgatttggacaaaacggaggcgtaaggtaaaatagatgccagtacaacataacagcacaagcagtatattgtcccacagcgcaccgctgatagcttttacaatcgctgtaaactccatattgatccccctttttggatacaaagcagtctttttcagtatactgtctgagggaacaaatgcaagaaaaaaataaaaaaaggcccgaaacctaggcatgttccgggcctttttatcaatcgagatcggttttccataggccgtgcaggttgcagtatgcaaacactgccaacggtttttcgccgtctgtcagtgctacatcggcttccggcgcaccattgggagacaacgctttgcggtggccgccttggctggtctgtacatagatccattcgatggaatgttcttcagtcatggggtgcgcggcgctacccacgcatacatgcaccaaattgccatctacctttaccaccggcacatgcttttcctgcgctgcatccgtagtattggcgacaagctcctgcattttttcgccacagcatacgaccggtacacctgcattgtggatcattccaattaggtttccgcaatggttacatacaaaaaacttctgttctctgctcattgatacacactccttttatgctagggttatttccattatatcccagttatctatataagcaaatgaaaatgagagcaaacgtttattttttcttgggattctttgccttgccggaaacaaaccgcccatagggatgcacctccataaagtgctgaatctcctttgcgtatagctggatgcgttgatatagatccatcaaagacgcctcctttcccctttactgtaaccgaaagaagatatggttataccgggagcttttgagaaagcgcagtgcgtagcctgccgactacgctggcacagacgatgcactttataacatcgccgggcagtgtgggtaaacagtaaacggcaaagagctgagaaaccgtcatggcttgttggagataaagggtcatgatcccataaaaatagggaagacctacaacataaagaatgacggcacctgccaacgacgcaaaaaaagcggaagaccaggatttgcgggagcgttcaaacaatagaccggtacaaaaggtggcaggggctaggccgagcaaaaagccaaaggttggcttggtcacatagccgatgcctccgccttgtgtaaagataggaaggccgatcaaccccagaagcagatacacgacaacggataccgtgccccactttttgccgagcagcagcccggccagggtagaaaagaaggtttgaagtgtgatgggcagccaggccaggggaactttgataaaagcaccgatggcgcacaacgctgcaaatagtgagcaaaggatcaataaatacaaacgatttttggtaacgggcatgtagcagcacttcctgtacgatggttttttatacatggtacaggggaaaaacaacatatgtcaattttaaatattatataggtttacaattggaacgaggagaaagcgcactcaggtgcgctttttggaatcaagcaggatgcgttgccaaaaaatccatgacctgctggaaattttggatggcagtagttgtgccgatgctttggacggaaatggcgccggtggcattggcaaaacgggcacattcccgcaaactaaatcctttgagaacggccgtcataaatccgccggtaaagttatcccctgcccccgtagtatcgatggcgttgaccttaaatggcggcatatggaatgattgctggccatcgctgacatagcagccgtcgccgccatgctttaagatgacaacgccgcggcatacttcctttagacgattgacgatggttttgggatcgtcactattcaccaatttggaagcttcttcgtagcttggcatgaaataatccagatcctggatgatggggcgtatgctttcggcggtgtatccttccggcacctgggcagtatcggcggataccagggcgcctgcctcatgtgctttttgcacaatggttgcaaaaccggactccaataagccgggaagggaaaacagactgcctaaggtaacgagccttgtctgtgaaaacagcgaaaaatcaatgtcttctacagtaaaggcatcgttaccaccaccttgatagagaaaatttcggcgaccatcttcaaaaatcaacgcaacggaggtacaagtattcaccatatcatcgcgcaccacatgcgaaagatctacgccgctcttggttacaatgtctacgatggcgtccccccaaatatcgcggccgattttgcccaccagggcggttttcatccccagcttggccatgacgcaggattcattttgtgcatcgccgccaggccatagaagcatggaatctaccggcgtggagtccacggtaaaaatcttttcattaacagggcgcaccagaatatctgcacaaagctggcctacacatatgacatcataacggcgttgcaaaaagaacccctcctttggatagatacaaaaatgtttcatagtcatccatactatttcacacttgaaacgcaaagtcaatgaaaaaagaagggaagaaaaagaaaaaggaaaggcttgcctttccttttatgctgacggcgattccgtttgtcgttggtattgatgcacactatcgtccaaggtgagcgtcagcacatccccttctatgctccatggccctgcttgtaaagaggcctggtcacattttagctccagcgcttcgccgtccagggcataggtgccggtaagcatcgtaccgctctcactgctgatggcaaaggtgtgatcctgggtaaaggtgatggttaggccgtcctcattgttgtccgtccaggtacctacaagcgggtctgcaccgccgcaggcagagactgcaaaggtaagacatagcgccaaacacaatagtgacagcactttgccaaaggctttttccatagggaaacctcctgatttgtaaaataaaaaaacacaacataagataagagacgggcacgggcctgtcccttttgtggaatactttagcactttttaacttattttcctagataaaattcaaaaaatctggcgattttagggaaaagccatgaaaaagccgagaaaaagccacaaaaaacagggaatctgcgaaagaaaaaacacagaatacacagaaacccagaaacatgatataataaccaatgattataaattttaaagggggaccttgtataaatggacgagggcaaccgaccacgagcgctttcgctgctcgcgcagcatgtacaaagcgagtctttgttaaagcacgcgtatgcggtggaagcagccatgaggcgtatggcgcaccattttcatcaagatgaggatctttggggcgtagcaggcttgctgcacgacctggattatcaagaatatcctgaagagcactgccagcatgtagaatctatgctgcgggaagcggggtatggagatgcaatggtacgcgcaattttgagccacggctacgggctctgcacggaggtaaagccgcaaacggatatggaaaaatccttatatgccgtggatgagttgaccggtttgattacagcggtcgtattgatgcggccttccaaatctatcttggatcttacggtaaagtccgtaaagaagaagtggaaagcaaaatcctttgcagcgggctgtaaccgagaggtaatccaagacggggcagacagactgaatatgccttgggaaaccttgacgctgctgaccattgaaggcatgcaggcacaggcaaaagcgttgggcctggtaggaactttggaggaagaagcatcatgatacgattgacgatcttggtctgttttccacgggaggatgaacaggtgcccgtggattgggaacgagaaacaagggaactgatacacctaccgggtgtggaagaggtgttctggggacagaattaccagggcgaggccaactatgatgcagtcgctatgatcgatttcaaaaacgagcgcgcgtatcatagagcccaggaaaatgaagaatacctggaatggttccgggaaatttcgaaatccgaaggctttgcctgcctctgcacggaaattgagggggatgaggcatgattcggcatattgtggcgtggaagtttaaggaatatgcaggcggcgccagcgcaatggaaaatgcgatggagctgaaaaagcagctggaggcattgagacgcggcaatttgccgggattggtgtctatgaatgtgcagctgaactgccaaagagatgaaatggaagaggcgacagagcctataatctatgatgtggtgatggacagcgtgttttccgatgggcaagcgctggaagcatacaaggatcaccctgcgcataaaaaaatggcagagttttgtgaatcggtgcggctatcccgcgcagccgttgatttgattgttgattaaaggcgggtaaatttttccatagggaggcagttcatttgcaacccaatatacaaaaacaatccttaggacgggattttttgatttgccttgggataagtgcagtggggtatatcctgctgcgcctgccggtaggcatcaatgagatcagcgtttcttttggtgtctgcgccctgtatttggcggcgtatctgttgcctttcccaacggcgcttttttgtacggtgctgccggcagtagcggcagacgtgatctggggcagctttcatctaatcccgatgacgcttgtggtaacggctgtgtgccaattgtctttgtgctggatgtttgatcggtatgtgcaaaacaatctaggacggtttttgttggcagccggcgttggcggcgttttctttatggtaggaacgtttttctatttcgcagtggcgtatggcatgctggaggcgttgttgtccatgatcccctatttggtacagtggatcttcgcttcggtgctgggatactgggccattgcgttgtatcgatccaagctgctgcccaagctgaaatgaggagaagaaggcatgaaatatcgctgtttgggaaaatatgggccataccctgccgcgggcggcgcttccagcgggcatttgctttttcaggagggaaaggcgttggcgctggatatgggcagcggcacgttgccgcgcttactggcttcggtgaagggatatgaagtttgcggcgttgtgttgacgcatctgcatccggaccattacagcgatttactggtgtatgctcaatatctagcgaaatgtgcagaacggccgatgccgctgtatctgccgagaacaccagagcgtgtcggcagcctgttggcggatacgggagtgtttgacgtgcattttaccgacgcagagagcacggcacaatgcggcccctttgcgttgcgctttgcgccgacggtacatcccttgcctgggtatgccgtgcgggtagatggggatgcatcgtttgcttatacgggggacagccttgccacgcatgcgttggcggcgtgggcaaaacaggccgatgtattgctgtgcgacgcgccctttaccaagcagactgcgcccagcccatcgccccacatgacggcggaacaagcgggggaattggccaggaatgcgcaggtaggggcgctatggatttcgcatcttgtaccgggcagcgacgagcaggcggtgctgtgtgaagcccgtaagatattccaagatagcagtttggtggaggaaatggcggatagaaccgtctaaggcccggtctaagggggaaacaagatggaagaaagagcgggacgcggactgacaggataccgtctatggaatgtgcggccgctatttcttgctgttttgggcttcggtatcgggattgcattgtgtttttatgtgcgtccccatttcggtatttgcgtggctgtatgcctgggttttggcgtatgtatgctgtggcttgcccgtactgggcgccgcggcttttttgttatgctggtactgatgatgattggcctcggatggggaagaaccaccttttctttgcagggcatagtaccttggccggaggatggttacattcaaggagatattcatgagattcaggagcaggaaggcgtatatacgctgctgctcgaccatgttgctttaaatggtgtacagacaaacgaacagctacgggtacgtaccaagtcgcaaaccatgcaatatgccaggcccggcgatgtctttgaaggctatgcgttttccatttgggcgccagacatggattctgtctgggacagagcacaacgctatgccaaccattgggacaagctggcctgggtcggagaaacggaggcaaaggtcacacaaacgggctttaaccttcgttatgcgccggccagaatgagggatatggtggcgggccgtatcgacgctctgtttgggcaggcagcgccgacggttaagggcatggtattgggggataaaacagatctcagcgaagagcaaaaaacggtctatgaaagggcaggtatttcgcatatcctggcggtatccggtctacacgtaggctttttagggatgttggtttccaatttactcagaaaaagcaggcttggcagaaaaacacaaacgagcatcttgctgcttttgatttggggatactgtgcggtggtagggtttccggcctctgcagtgcgtgcgacagtgatggtaagtgtgcgccaatgtaatctggcatgtggcaggcggacagaccttttggaaaacctttccattgcggcactgcttattttgttatgcgatccactacagctgctgatgccgggtttccagctttcctttgcggcggtttggggtattgcaaccgtatcttccgccttggctaattggaaacgcggcatgggttggctgggccggagtatctccacttctattggcgcccaactgggcatctggccaatttcgctatatttctttggcgggatttctaccgtttccctgctggcaaacttgtttgtcattccgttggcgagcctgattacggccagtgcatttggcattctgctgtgttcgctggggttgccaagcattgccttgggattggccaaagcagccgcaggcctcgtatttttgatgaattacggagcagcgtggactgcgcgcattcccggcgcgctggtttcgatgccggcctggcccatgtccactacgctgctatttttggcaagcttattcttcttatcgccttactgcttatggaaggcaagggaccgatggacggtcgcaggactgtgctggctggttgcgctgctgcttgccttggtctaaaatggaaagaacggaggaagggcgttggaatatagacagctgagaaaacaaatacagcaaaaacaattatcatcctgttatctattgtttggtgtggaacagttcgtaaaaatgcgtaccctggaaaagctatgccaggcggcgctggaggatggggatcccggctggaaccagacagtattggatgaaaaagcatcggcagaagacatttttgcagcctgtcagacgctgccgatgtttgcgccccgccgtgttgtcatcgtaaaggaatgcccctttttcaaacaggggggcggagcggcaggggaggaaaccatactttccttgatcgacacgctgccgccggaaacgctcctcgtatttgtattggaaggaaagccggatgggcggagaaagctgacggcggcgctgaagaaaagagacgccatggtggagttttcgacgatgacagagcatgagatctttgcctggctcaaggcctatgcagcgcagcgtggcaaggcggtagagccacaagcgctggagacgctgatccagcgggtaggtacggatatgcagacggtcgcaacggagatggaaaagatctgctgctatgcagaggaaagggatcggatcacaagaaaggatgtactggatatcagcagccagacgctggaagccaatgcgtttgagatcgtagacctgctagcgatgggcaagcggcggcaggctgctgaacagattgatctattgctaagagagggaaactccatccaaatgttcatgggtgctgtggcgtaccggctccgccagcttttggccgcccgccagggctgggaggaaggcaaaagcgtgcaggctgccgctgcaaaggtgcagggccctcgttttgctgcacagcgtacggcaaagcaggcagggacaatgcggacagaggatctaagacggggcttgctggccttaacggaagcggattttgccctgaagagcgggcgcatgaaggaggacagggcggtgctggaaacggcactttggcaagcgtttcctgttaaaaaataaaaaagaaccgatgagaaatcatcggtttttttcatacatcatgcatttaagcattctgctttgccatcaccgcagccagctgagcttttttacggttggaggcgtttttatggatcacacccttggaggctgctttgtctaccatgcttaccgtttcacggtacacggcctgcaaatcagaatcccctgcggcaacagcagcatcaaatttcttcaaagaggtcttcaaacgagatttgatcatgcgattgcggccggcacgtctttcttcaacttttacgcgcttcatcgccgatttaatgttaggcatattccttcacctccccgggggataaacttgactttgagtattgtaccatgggacgagccgcattgcaagtaaaaaaaccgcccaaactgcatacttcctttgttttggcagaggatagaaaaaaaggaggcaaagattttgcagagatattcagatttggttttggaaagctgtatggccgcgggtacgttacctggcggtgtgacggtagaggaacagaccgaggaggaagtagaggtttccattgtacgcatcacggacgaagagggcgaaaaggcggtgggtaagccgaggggcagctacgtcacgctgacggcgccgcatatggctggcagcgatccagagatagataagcgctgtgccaaggcgttggcaaaacagatacgcgccatgatgccgaaaaagaataaacaacggcctgttttgctggtagggctgggcaaccgttctatgacgccagacagcctaggcccgaggacgctggatcatgtgatggtgacgcggcatttgttttcgctttggccagaggatctgcaaaaggcaggcaatgtttgcgccatatcgcccggcgttttgggggaaaccggcattgaaagcggcgaagcggtgtttggcatcgtacagcaggtaaagccagcggtggtcatcgcggtggatacactggcagcgggggacccggcacgcatggcaaccactgtacagcttggcaataccggcattgcgccgggaggcggcgtgggcaaccgacggctggccttggatgaaaagacgctgggcgtgccggtactggcgttgggcgtgccgttggtggtgcgtgccgatacactgtttgaaggaaggcagcaagggttgattgttacccccaaagacatcgacggcattgtaaaagcaagcgccatgctgctgtctcgagcgctcaaccaggcgctgcatcccagattgcccaaagagatgaaagaacttttggcttcgcaatcatagacaaccattgatgacgcataccttatggggaaaggggtgcgtataaatgcggggccggatggtgacaagaatcagtctaaagagaaagaaaaagcgccgtatacaggccgggcgtctgtgtgcagggctggtgttgctggccctgctgggatttgcctatgttaaaaatgctgccgggaaagggatgacagaacgcctaatgggcatggagatggcgctgctcacaggcggagagacgatgacggcggcctttgaagaggatgaaccttgggcgctggaggatcaggatagcacacaggccggccaagagccggaagacacagccgagcctgcctcggtgacggctgccaatgcagaggtggctctgggcgcaaaggtgacaacgctgatgcctccagaggggatacagccgcgcatcattttgtatagcacgcattccaatgaatccttccgtaaggtggagggagataactatgaggaatccagccaatggcgtacgctggacagcggctataacattcaaaagattgcacagaatttggcctaccttttatgcaatgaataccatttgcctgtgatgttcgacagtacagatcatgaattggggaaatattataccacttcctacaatcgttcgctggagacaatgaaaaaggataaggaaaaatatccggtggatctatttatcgacgtgcatagggatggaacgggctcttccggca

SEQ ID NO: 4428 - DNA, 18961 bp, Unknown
  16S sequences of unknown bacteria
gtgtttcctcaacagcgaggtttataataccatcgttctttttgtttgtcaacaagtttttttcattttttaacttttttatttcctattttagaatctctcgttcgatagttaaagacttccgtcttgcctgattcggtgaagaggcaagatccccggtgtgccttacaagcgctactgaggatcttctatattatcattattatgatactagggggcaaaataccttttaacctcaacatcattattatgcccgacttaaaagtctgaaaccacgatatacaaagcgttattctcatttcccctttgtatgtttcaactgcaattctcctcttcgataaattctctccagtagcggcgtctctacaagcagcatcccgatccagcctgcgagataggagtatggcaatgcctcgatcccaagtccaagcataaatacgagcggaatcgctgccagtacccgcactcccatatttacaaagctgctgatcaatgtcactttcatgtcgccaataccacggaaaaatccctgcaatccattggtcagtgccggaagcacatacatcagagaaatcaaatgcaaatatatcactccatgtccaatgacctcttcatcttttacaaacaggagcatcaacggtcttgccagtaagtagcaaacgaggaaaatgaagattccatagataacttccagcaccagtccgcagcgaaagccctcccgcattcgatcacgcctgcctgcgcctttattctgcgccatcagtgcagtcattgcatgtgcaatattctgctccggcgtataagcaaagtcgtcgatccggttcacgactgcaaatgcggccgcaacagaaacccccatcgtattgacgattgcctgtatcccgatcttgccgagctgcaccgtcgcttgctgcatcgcagacgcccagccatatgcaatcgtacgttttaaaagtcctgaatcgaataccagccacttttttccaagccgaagcaatggcacctttttctggatataaatcacgcaaaacaggctgcataacgcttcgcttaataccgtcgagattgcacagccattacttcctgctttcagcaccacgacaaaaaacagatcaccgaatatgttcagcaccgcactgataatcaaaaaatacagcggggagctgctgtctccgagtgcccgcagggtactcgcaaaaaaattataaagaaaggtaaacatcattccaagaaaaataatgcgcagatatccccttgtcatagcaaaaatagagggatccacctgaagcatcgtcaggatcgggcctgcaaagagcacgcacaggatcgtcagcgtcagtgaaaacaccacaccggagagcaatgtcgtgctgatttgccgatgcagtgtctcatattcttttgcaccatactgcgtccccatcaggatgctggcccccatacaaagtccgttcaaaaacagaatcatcagcgtcgtgatcgggttgcagatcccgactgctgctaacgcgccttttccgacaaaatgccctacgataatactgtccactgcattgtaggtgagctggaacaggttgccaagcacgagcggtatcgtaaactttaccaatatcggcattattttcccggttgttaaatcttttgtcataatttctccaatattttgcctgatctgccagaatgctctagattgatttctttttctttacgcatcagatctggaataggaattcttcatcaaattgctcagctcatacaatacctgattcaatgtcgcagcagtctcctttttcagcatttttgccacacgctcatttgcttcctcgcgcagctgcatccgcttcgtctcatcctgctcttttgcaagccgctcatcgtactgatgaatcagcgcatgcccttttgccatcacatgttcctgataacgttcgatatggaatatggactttttataggaggcatctgccatcgctgcgatcatacggctggcccagtagaaattgtctgtcgagacttccgccgtcgtattagagaggtaatctggtgtcgtcgtcacttctgcatagaagggcacaagtgtattaaacgcattggacgcaaacgccacccattccagaataccagaatccgcaggctgatccgggcgcatctgaatcacagaaagaaaatcattgcggttaataccgatggaacgaaacgcacccttttcagacttatctccataagctccatatgggtcgtacggcgttccctgataatgggaagacagcacatacttcacatcctccacagtcacttttctctccgggaccatgcaccacggcaaatcatccgagtacggagtgtaatctgcggctgctccatcccatttcctagtgtgtggattcaggcaacgctccatataccatgcacgcggcgtattatagacatgatctgcatcgtcgtggcttccaaaggcatcccggggattcaatttgccgtccgtcgacagatccagatgatactgctgaataaattctctcatatctgccgagcacatatactccttctgctccccgagtgcatcctccagatcaaatcgatccagcccaagctgattcggcatcaccacatagacatcatccggtacccgtctggcaatccagtgatggccaccgatcgtctccagccaccagatctcatctttatcctgaaatgcgatcccgttcatctcatatgttccatattgctccagcagactgcccaggcgctgcacaccctcccgtgcactgtgaatatacggaagaacaatatatacgatatcctcttcgccgatgccgccagccacttcttcttttccatcttctgccggctgatacatgacgagcggatccgcgccgagcacacgtggattcgatgtgatcgtctccgtcgcggtcatgccgacccttgccgcattgacaccactcgccgcccagatgccctccccttttaccgcattgggcatcgcggtgtagcgcatcggatgatccggaaggtcgatctccacatgagaaatctcggatttataatgggtcggctgctccgacggatgaacgaccacaaatttcttcggggtaaagctcccagagccggaatcatcgttccgggcaatcatcgtagatccatcatagctcgcctttttgccaaccagtattgttgtacatgccattttgttttcctccttggcagccttattcagagcaatctgacattctctatccgtgttttgctcataactgaaaaaccgctgctttttttattctttcttattataatcagtcccgtcgctccccgcaactccttttccatacttcccaagcgcacttctttaccttgcggtcgtaagttaaatcaatagctctcaaggcattccagttagtctgttataattttatcaaaccttttcgtaatatattgagaattcttttcattagtgttaaaatgagaaaaaacaaacacggaggataatctgatatgaagaaactgaaagtaaaaaagggcagcacctgtatggcatgtctggcctgtgtacaggcctgttccgaagcattttataaagagttcgatccggacaaagcatgtctgcagatcgtagaaaagaaggcagtccgcccgatcgcctgtccgcagtgcggaaaatgcgcagaggcatgtccggaaggtgcgatcacccagaatgcaaagggcgtttacatgatcaacaaaaagaaatgtgtcggctgtggcaaatgtgctgaggcatgtccattcggtctgatcgtcgtaaccgagggcaatccggcttccaaatgtatcgcctgcggtatctgtgcaaaggcatgtccgatggatgtacttgaagttgtagaggagtaatcgctccctgcatccagccagcccaatacctgtgaaaaagcagctgtactttgattttgtacggctgcttttttctgttttctatctcttttattttcgtttttcccgctctccattgtgatatcgcccgatcggtacaatcattggacttccggagaccggatccgaaataaccatgcagttcagtccatacagttcccttatgagcggttccgtaatgaccacctccggcgatccctgcgcgattagttttccttttttcacagcaaacagataatccgcatatttggccgacaaattaatgtcatggagtaccataacaatcgtcgttccgcgcctgcggttcagatctgtcaacagatccaaaatttctacctgataggcgatatccagaaatgtcgtcggttcgtcaaggaacagaatatccgtctgctgtgccagtgccagagcaatccagacacgctggcgctgaccaccagaaagctcatccaccggacggtcggccatgtccgcgatttccatcatttctaaagcatcttttaccgcctgaaaatcttccgtgccaagccctcgcataaattttcgatatggaaaacgtccgcgggatacaagatcatataccgtaattccttccggcacaagcggagactgtggcatcagccctaccgtacaggcaaattccttcggtgcaatctcgtccgtcttctttccatccagcaaaatctcaccgtcaaagatccgattcagcctgcaaaacgtctttagcagcgttgattttccacatccattcgatccgagaatgacagaaacctttcccatcgggatttccacattcacgtcatcaataatcactctgttatcatatcccgtcttcaatgcccgtgcttccatactatgttccatcggcatctcagaattcccctttcttattcatcgcaatcagcaaatacaacatatatggcgctccgagcagccctgtaatgactcccacgggataatgaactggtaacacatggcagccaataaagtcagatgccagcacaagcagtgcacccgtcagtgcggatggtgccacatttgcccgcgcatacccggcaagccttgaagcaatcggaccggacaaaaaagcaaccgaggcaattgggccggtcaccgccgtcggaactgcgaccagacataccccgcataaaatcagcaccagataatcttttcttacattcatccccagaacaaccgcgtaagcatcgccgagccctagcgtctgcaaatgacgttccagcagacaaagtatcatgccgagccccagtacaacaatcgcaagcagtggaatatcttttcgttccacaccatttaaattaccgctcagccactgcatcgtcgcgctgacattaaattctgccgttttggtcagcagataggaagtgacagcgtcaaacagcgccgcaaccccgattccggtcagtatcatttttccatgtgaaaaatgcccgcccggagacgccagaagatataccgcaactgccgttagaatcccaaatactactgcaataaccgctacaatgcttccctgtaattttaaatacaaaatgcaaaacactgccgcagtgcttgtcccggatgaaataccaataacatccggactggccagaggattgcgcaataacgtctgaaaacaatatcccgccattccaaatgctgcacctgccaatgctccacctagcattctcggtagccgtacctcactgaccgcataggaaacgcccgggatctcagctccaaacaatgcttttaacacatcctttccggaatatgaaacactccccacgcacagagccagcgcaacaaacagaaaaaccagaactgccagtactctgtttacccgatggaaacgtctcatccgcctttgatagccggaccataaccttttttccttcatatactccgaatcgttcctttcctgataattgcaataaacagcggtgcccccagcacggccgtgacaattccgacctccgtctccccaggcgcaccgatcagccttccgatcacatccgaaatcagaagcagcgcactgcttccaagaaaagaaaatggcatcatcagccgcatctctgagcccagaaacagccggatgatgtgtggtaccatcagaccgacaaatccaatcggtccagccaacgctgtcgtcgccccacaaaggagtacactcgcgacagttccggctgcccttacaaaccgtacatttacgccaagtgaggaagcagcctcatccccgagcgccagcgcattcagctgcggtgccagcagcatggcaagcaagaagcctacggcaataaacggcgcaatcagccgaatgctttccgtcgttgcccgcccgatgcttccaacggtccagaaccggaagttctgcatcactttgtcatttggcagcataatcgtactgacgagtgagccgagcgtaatcgctaccgcagatccggaaagtgccagcttcagcggtgtcgccccttcttttccaagtgaagccacaccatacaccagcagggtcgtaagcagtgctcctaaaatagccagccagatgtactggctcgctgcggaaatatgcagatatgcaatcccgatcacaacaaacaaagatgctcctgtatttactccaaggatactcggatctgccaccggattccgcgtaatagactgcataagagtgccggagatgccaagcgcacctccggccagaattccaaagattgtacgcggtactcttgccagtaccacctttgcccccagcgtctccacatgtttaccgctcaatgcctccagcacttttgtaaaggcaaccgtacggcttcccagacacagtgacagtacgattcctgctacaaaaagcaatacgctggatactgccactgcggcaatcttctttttcttcatgttctgcctgcttactgtacttttgccgctgccactgaaagcagatccagatactcatcaatgactgccggaatcgacagaactgttgcataggttcccatgtacagatcgctgtcatctccgatcgttgctactgccccgtttgcaatcgccggaacggtgctcatcagttcgttcgcctgaagctcaccaagcagagaatcatcaccatagcatacgatgacgtccacatcattaagcaaatcaatattttccgcactcaagtctaccgaaaaatcaccgtcgcctgccatcgaagtgatcgactccggcactttcataccaagctcttccagaaacgcggcacgcggatccagaggcatataaatgtataccatgctcaagttagaaggatcaatgtaacagaatgccgccgtctttccctccagttccggatgctctgccagtttttctgcaatcagtgcctttgtattttcaatcagctctgcaccttctgcttcttttccaagtgcctttgctgtaacctctgcctcttcctcccaggtcgttgcatacgcaatctttgcatacggaaccgtcggtgcaatctgtgaaagccgctcatactcctcttcggtcaccccggaattcggaatcaacaccagatccggctctgccgcatttacagcttcgtaatcggttccctccgtatcatcaaacacattcggtgtcactccaagcttttcaaatgccgcatttgtccacggaagcaatccgttttcttccacatttccatatccaacctttgatacgccgaccggggcaacacccagtgcgagtactgcatctgaattactgtcaaacaacgtcactacccgttccggctgttcttcaatcatcgttgtgccgtaagcatgctcgatctctaccggaaatgcagcctcctctgcaaataccggaactgcacaggtgctgatggataacgctgcaagcagcgcaaggattcttttcttattcattggtgttctgtctccttatttttgatgtactatatgttagcagattgttattttaatttcaattgtctaacttaacaaagtttcaactaacatatagcaatccatctgacagtttaccaacatttcagaatactccccttccttttgcttcaggttttcctgctctctattgcgatatcgcccgttcagtactcattgaatttccagctacatattctcccacagcttgcaaatacaggtcggacgaaccgcatccgcccggatcgccgtcttttcgagtctctttttctcccggttgatatgcagtaccgtaaggctgtctgaatcctgattcgccaccacgagaaaatcactgaagatctggaaatcccgcggcgtccttcctccggtcttttcaattgagcagaggcgcagacttccatcttctgcgatctcatacattgcaatactgtcgtctcccctgtttccggcaaaaagaaagcctccatacagtcggatcgcagaggcagtgtttgcgccggaaaaaccggtcgaaagtgtggaaatgtcctgtagcatcacatactccggtttgctgcgcttatcttctgcttttttctccgcaaatacaacaacccggctggcaagctcacagaggacataaatcacttccatgtcttcatgccagaatgccagatgtcgcggtccatagcccgccggaagctgcaagcgttccccgctgtccgtcagcgttccagtttcatagtcgatcacataagccgtcacctgatccagtccaagatccgtacaccagagccattcgcctgcctcctcagagaagtgcacatgcggaccttcctggcgttccgggtctgctcccatccccgtatgctgcagcaaatcactcagttcctgcaaatgcccctgttcatccagtgaaataacgcccagagatccactcgaataatttgccaccatcaaaagctgttctctcccgtcaatgctcaggtggcatggatccgcaccgcctgacggcagttctcttataagccggagcaatgccgttccgtttcctgtcggctgttccggattttctgatggtcgcagtgtcttcagctcatacacaccaccttccggcgtctcctccctcacggcatacatcgtatctccacgttcatttaatgtaatccaggacgggcgaatcgcctgtgtatccgctttgagcatgctcagccgttcactcctcgtgctcagcttccacagacaaatgccgggctcacctttttctgcataagatccggtgtaaaaataatagtttgcctgctgaatctcatcgagctgatcccagaatgcccagaattcctcttctgtgatcttgccatttaaaatcagaatttcatacatgacgccccgccagccataagaaataccggatttgcgatagccattccgctcataaaatgcgatccgcttcgtccgctgttcctgattttccgcctccggatccggcatctccacgtccagaatcagtcgcttgtccggatatgcccgtctgaccacatccaggatctgcgaaccgtatccattcccccgaagtgtttcctctacagccagaaacaggacatgtgtaatatcccccatcgtcagtgtcgaataaaatccgcacagcatttcgccatcatagcaggcaataaagtcatacggcccgtccgtctccagcagcagctccagcgccacccgctcttcacgcggaaaagccgcccggtacagcctcacgatctccggaaatttttctgattcttttgtcacctgaatggatgtaagcatatagtccccctttacttgtctcgcaccggatcattcacctggttgctcttctgatctttttattatagcgtctccaagaaaaatccgccatatcttttctccgaaaacaggatgtaagcttgtgattttcgcttttctgtgctaaggtttttactaaatgcatgccaaaatgcgctgtggagccaggacggtaaatgatataggattgcgtacccgtaaagtaaaacaaaacatttcgaaagagggatttataaaatggaagaaaggcacttattcaccaatacagatatccggaaactgcttctgccgatcatggtcgaacagcttctcgcttcgttgatgggaatggtcgatacgatcatggtcagcaacgtcggctcagcggcgatctcggctgtttctctcgtcgactcgatcaacattctggtcatccagctgttctctgccctcgcggcaggcggtgcgatcctgtgttcccagtatatgggcggaaaaaatatccgtcaggctgaaacttccgctaatcaggtgttgctgaccgtgacggtactctccagccttatgaccggagtctgcctgctgttccgccgtccgcttctctccctgattttcggtgcggtagagcctgcagtcatgaccaattctgaagtttattttctctacacggcactgtccttcccgtttattgcgatctatgacgcaggcgcttccatcttccgcgcccaaaacaacacgcgctgcccgatgatcatttctgtgatctcaaatttcatgaacattttcggcaatgcgatcctgatctggggcgtcggcatcggcgtagcaggtgccgcaatctctaccttgctgtcccggattttctgtgcggtcatggtcatgttctggctgcgtcggccatgttatgcgctgcgcgtctacaactaccgttccatccgaccacaatggaactatatccggaagattctctccatcggcgttccctccggtattgaaaacggaatgttccagttcggaaagctcgcgatccagtctactgtatcaacacttggcacagtcgcaatcgccgctcaggccatgaccaacattcttgagaatttaaacggtgtcgcagccatcggcgtcggtatcggactgatgaccgtcgtcggccagtgcatcggtgcaggacgggatgatgaagccgtctactatattaaaaaatttaccggtatcggtgaagtcgtaatcatgatcagttgcgggctcgtctttgcagccggccgaatggtaaccgtccttggcggcatggaaccggaaagcgctcagatgtgtctgtatatgctcactgccatcacgatcgtaaagccgctcgtgtggacattctcctttattccggcctatggcatgcgcgctgccggtgatgtaaaatattcgatgattgtcagctgcatctccatgtggatgttgcgcgtagcgctctgtgtttacctctgccgcgttcagggcttcgggccaatcgccgtatggattggcatgttcaccgactggaccgcccgtggaattgcctttttatggcggttccacagccggaaatggctgcgacatcatgtgacagtatgaattgaaaatctgaacgaaccgacttgacttttcctgcataaagttttataatattaataacagttattatttttattttaaggaggtctttttatgaagtacgtatgtgatgtctgtggctgggagtatgatgaagagaaaggatatccggaaggcggcatcgcaccgggaactaaatgggaggatgttccggacgattttgaatgcccgctctgctccgtaggcaaagatcagttttcagctgaataaagctgacaaaaaggcgctggatcacggaaatcctgcgcctcttttttattcttatccgttgttttaaccgtaaaagcaggatctttcagcccttttgccggttctggcacgccacgattcgactgccaaacacatccaatgccaggacatctcctattgagaccggcaatggcacaatcatctgattcaattgtttcattgcttccaacagccggtccttcgggatcggctgttctgttttgactgctacgacaccgccgtctgcgcagcgaagagtcgtcgtcagcgtccgcctcggatccgtacattccgttctcgcatattctgcaccccgtttgcacgtgtttccgctcacactcacaaattctccggtttctgtcagctttgcacacagctgacatcccagcggacatccgatacaaatcatttcccgtttcattttgcatcctccagtgtaaatacaagctcctttgtgcctgcaaacagctcttttttcagagtaattcgttccatctcaccaggcgccacctttgctcgtttctttgtataaatctgttttccgttttcatagatacagatattgacattccgaaatacgtcggatacacgaaaatagatctctacgtcttccgcccgcgtgattttctgcggaacggtatatcgaatccgcccatctgcccggatcaggaccgattccgtcttctgatttgctccaagcagataatttgccgcgctctttcctgctgtctctgcctcctgtgatacaaaatcgaccaggtcatgcacatgcaatacatttccgcaggcgaaaatgccatccactgatgtctcgcgatcctgatctaccaccgccccctttgtgatgccatccatacagatcccggctccttttgacagctcattttccggaatcagcccgacagaaagcaacagcgtatcacaggcaatatactgccgcgtggcatcgattggttttcgcttctcatccacctgcgcaatcgtcacgccctccacccggtcttttccatggatttctacgaccgtatggctcaaaagcaacggaatatcaaaatccttcagacactgctgaatatttcgcgcaagccctcctgaatatggcatcagctcgcaaactgcctttaccttggcaccttctaaggtcatccggcgcgccatgatcagcccgatgtctccggaaccaaggatcacgacatcacgtcccggaagatagcccttctggttcacatatttttgcgcggttccggcgctgtagatacctgccggcctcgtgccggcgatatttaaggatcccttcgcccgctcccgacagcccatcgcaagtatgatcgcctctgcctcaatctcaaaaataccaagcgatgcattcgtcgcgatgatcttcttctctccggtcacttccaataccatcgtgtttagcatcacttccattccggtctcctgcaccatttgctcataacgccatgcatattccgggccggtcagttcctcaccaaaccggtgcagaccgaagccgttgtggatgcactgctgtaaaatgccgcccagatgctcatcccgctccagaagcaggatatcccggattccgcttcgatgtgccgccaccgcagcactcatgcccgccggaccgcctcctatgatgaccagttcctttttcatgcctccacccccttcgtttttcccacattaatataggatgctttccctgattttgtcacctgttcataagaaatcccaagctcccgcgccagcagctctacgatctgtggcccgcaaaaaccgccctggcatcgtcccatctgtgcccgcgtgcgtcgctttacgccatctaaatctctggctcccgggttggtatggatcgcatgcagaatttctccttccgtgatatgttcacagcggcagacgatttttccataagccggttctttacgtatccactcatttttctcttctacagacgcttcgcaaaatgcatgatccggttcgcgatatggctgataattttgttttctctgcaaacctgctccctgctgtttcagcagctccactacgtattccgcaatcgcaggcgatgcgctcagtcccggtgattcaattcctgccacatggaaaaagccacgtttcggagaccggatgataaagtcaccggtactcccgactgcacgaagcccgcaaaaagaagtaatcgtctctccaaatggtatatccggcacatactcccgcgcctgtttttgaatctgcgcaaagccacctgctgtcgtagctgccatctctttgtcctcctgatccaccgaagtcggccctgcgagcagattgccatctacggtcggcgtcacgagaattccttttcccatctttgtcggcgtgcgaaaaatcgtatgctgcaccaaaagcttcttttcccggtcaagcagcagatactcgcctcttcttggatgaatatgaaatgatgtatccccgaccatcgccgcgatccgatccgcataaactcccgctgcattgatgatgtttcgtgtctgcagcacctgctccctgctgcacacttcaaaaccgtcagcactctcccgtatatccgtgacctcaaaatttcgaagaagttcagttccattgtccatcgcatttccgatggctgcgatcgtcagctcatatggacagataatggcaccggtcggggcatacagcgcaaacagtacctctttggaaagtgcaggctccagcgctctcacttcttcctgatccaaaattctcagtccctttacgccattctggcatccccgctcataaagtgtcctgattgtcgcacgatcctcctcacaaaatccaagcaccagcgatccgtttctcttgtattttactccaagctctcttgcgacctgcggcatcagctccgatccgcgcacattcagcttcgccttcaggcttcccggcggcgcgtcaaagcccgcatggacaattgcagaatttgccttcgttgtccccatcgccacatcattttccttttctacgatgcagattcttaattcaaaggcggacagcgcccttgcaatcagtccccctacaacaccagctccaattatcacgacgtcatacatttgcacgccctcctcttttcatttctcctattttccagtataatgaaatgagcagatttatcaataattcgagcaatagtaggcaaatgagcagctttttaagcgtaatacgcagattttgcgtgtttttatggagggattatgtatcagaaggaacgaaaacagcagatcttatatctgctgcaggaaaaaaatgaaatgacggttgcggagctttcccggctgctgtttacgagtgaatccagcatccgccgcgatcttcagacgatggaactgagcgggctggtgaagcggacacatggcggagtgaagctgctcggtgacaatccgacgatcgtgccgttcgcgagccgcctgcactataaggtcgcagaaaagaaaaaaatggcgaaaaaagcgctgtcctatattcaggatggacaggtcatttttctcgaccagtcctccagtgcgctctttctcgcccatgagctggtgaatcgacggcaggtcaccatcatcaccaacaatattgaaattctcgccacgatggcgaagtccgaattaaaggtctatgcctccggcggctacatctgcccaacgaaccgcaactgcctgatcggagaggatgcacacgaaattttccgaaaaacacacgcggatcttctgtttttttcgaccaaggcgctctcttccgatggtgtgctctacgacgctacgcgcgaagaaatccacatccacaacgcgatgctcgaaaactccgcccggaagtattttctgtgcgattcggggaaatttgactcgtatgcaagctatctgcagtgtacattatcagagctcgacgggatgatcagtgaagctgcgattccggagagattcacgaaatttctgcctgatccagatcgggcttaggactccgcacatctgaagcggaaaatgcttattctgcatcaggaaaaaacaagtctgtccagcgcatcaaacacccgctctgcgtacatctgcttgatctcgtgtctcgtcatcccggtgacatccgcatttacttcaaagcaatttgcctcatcgtgtatcagaatgcagaaaaatacccttccctgcacgctgtccgcattgttcagatcgagatttccggtcgtgccggtgatcccgactgcgatatcagtatgcagcttctcctgtaccgtccgcgccatcgcctccgcacactccttcgagtagacaccgtatcgctcaagcaccttcggatcgacgccgataaaaattttcgtttcattcagatatgtcacatacccgcccggaaagatcgccgatgccccctccgtatcggtgatcatcgatgcgatcagaccggaagtgcagctctccattgtagagatcgtggtgtgcgtggcgatgagttttttgatgagctgagcaatatctgtcgcttttctattatctaatctcatttcacaaatcctcttatctaccatattatctccatcttttctgtatactgcttatctcatccatgcgttttacggcatcgtgcgacgcttctcctgtcgataagcagacggagacatcccatacttttttcggaatgtctttgaaaaatccatctgatcctcaaaaccgagcgagctcgaaatcattgcgaccggaagctctgtcgtatcaagcaggcgacctgccttttttaatttcagctccatcaaatactgttttggcgcgacctgaaatttttcccggaaaatcctcgtcatataattcggatgtatatgaaatttttccgcgacatcctgtagccggattttctgcgaatacttcatatccagataaaaccggatctcatctgccagtgaactttttcccttgctcttttcctgaactcctgcgtcttcataaagatacgacataacgcggagcagtatactgttcgcataaaaatagctgctgatatcattattaaaaatagacaaaatctccaatatacagtttttgtatttctcggtatccagtccgcggagcacatatgcctcttctgaggatgccatcagctgggtgacataccgctctgaattgattccaagaaaattgatccatgcataactccatggttccatgtccgatgcctgataaagcgatatcttccctgcaggaataataaatacatcccctctccgacactcaaacatatgctgattaatatgcaggactccttttcctgacagcacgaaatgaacgacatgataagaccggatctttggcccatagctgtacccgatcgaacattcttcatagccggcgctgtaaattgccagatccgagagagacttatcaatcaggttgtgtgaagtttctttatactctttcataaagctatcttaccagaaaaagtttgttttttccatatttttatccgaaaatactatataaaaattctgcagacttttgtttaatagggatcagataccaaatatccacgcaggcatggcacccggctcattgcccgcagaaataaaggagcgatacgaatgaaaaaaataacagaaaacaattatatgaccgttttcagtgatctggagctgtccgcctgtatccagacggaacataaaagtcaggatcttcagatcagcaggattgatgtccagccaaaaacgttgcctgaaggccagactaccggaactatccggcttgtattttcttttcctgcaactgatatcagcggacgctggtacccgatctgccaatttgaccggtcagtaaaggccgactggtatactcctgtggaatccatgactgcaagctctgcgcctgtcgtctgcttctaccgcgcagatagcagaaaccgccatacaatcgcgctctcagaagtccggaagaaagtatttctgaagtgcggaatccatgaagaggatggatccatgcgctgcgtcatcgaccttcccatcacgcagggattttcagaaaaggagttccagttctctgtctgggagtccgttgagaaaaaaaagtactgggaggtacttgatgaggtacgcagctggtgggaggaagctctgcacattgttccgaccacagttccggacgcaacgaaaaaaacaatgtattccttctggtattctatgcatcagaacgtcacagcaaaaaacgtggaagaagaaagcagacgtgcggcgcagttaggtctttccgctgtcatcgtagacgatggctggcagactgaagacaacaaccgtggctatgcctactgcggtgactgggaaccatccaggcaaaaattccctgactttgccggacatgttgcaaatgtacaggcgatgggtttaaaatatctgttatggttttccgttccttatatcgggaaaaaagcaaaagcctggaagcattttcaggataagcttctgcgattcagtgaaagccagcaggcaggcattctggatctccgatatccggaagtacgggaatatctcaaaaacatttatgtaaaagcaatccgggactggcatttagacggcctgaagctggactttatcgatgaattttattttcaggaagacagccctgcttacaatgaaaacatggactaccatgacatacaggatgcactgaatcgtttcctgaccgatgttatggatactttaaagcagatccgtccggatgtcctgattgagttccggcaaaaatacatcggaccccagatccgcaggtacggaaatatgttccgcgtaaatgactgcccgggatccgctgtgagcaaccgtatcggcaccatcgacctgcgtcttttaagcggtaatactgccgtgcactcagatatgttaatgtggcacccctcagaagccccggaggatgctgcccttcagcttctcagctgtctgttttcaacggtgcagctttctgtatgtctggatcagatttccgaaagcatgaaacagatgctgcagttctggttttcttttatggaagaaaagagcgctctgctgctgtcaagtcagatccagccttccgaaccggaaaacctctatccggaagtctgcgcagaacatgcaaatgaaaaagtgctcatacattatagtatgggaagagtcgcaaatctgaccggctgtccggaaaagctctattatgtccatgctacaaaagccgaagaaatctgtttccggtgcaatgccaccgatcagctgacttatgaggtgaaaagctgcttcggtgagacgattgcacacggcgagaccaccgggaatccgctgtttctattatcagttccgacctccggaatggttgtgtttacaaaaaagatgtaattacattcaagaatgcctcggcattcttgctgcgagatgcgcgtcatgcaatgcatgacatacttcttctgcgcatctctgcaatcctgccggaggctatatcagatgggggattgactcccac

SEQ ID NO: 4429 - DNA, 12658 bp, Unknown
  16S sequences of unknown bacteria
taggggcatagacaaactaccggctgagccggtagtcatgatttgtttttatctgtcctcatcgtacaaaagtaaatcatttggcgtgcagccgaatataccgcacattgcatcaagtgtttcatattttatagatttcgtttcgttatttaccatgcgattaaaattctgataactcataccgagctgcttccaaagccagtatttgctcttgttgtgtttttcaagcatagaaagaacatcaagcttaatcatatcaagtgcctccgtactatctaatgttttgattagataatatattgatgttagtgtaaaataattgtggactttttaaagaaaagaaaatagagatcaaatcctaagtggtaaaataaatttgcaacaaaatcacgaaaggaagatctctatggaaacaattatacaacatattgcattggatttggtaaaaaaaatcacaaaaaaagcatattcgggtggaattaatgatattgatgctctggcatctgatgttctggtcgattgcagaaaagcagcatcattagttattgaagcgatatattctcagattaatgtgcagatacgagaggataaggcggaaaggaagaaactagggcttgtccttaaagaaaaggaacgcaaaagagagcttcttacggaacagggcagattgagtctgcctcgtgattactactatgacagaaataacggcagatatgtttctgtccttgattacataaccgggataagagcatatgagagaattggaaacaatttaagcgcctgtatggtaaatcttgcaacggatatgtcatacgcgaaaagtgcgcagctgtcatgcggggaagaagtaagcaggcagacagtgaagaaccacattatgaaagtgggttcactggaaaaaggtattgaaagcagtctgaaaaaagaaatacaggagcttcatatctatgcagatgaggatcacgttcatatgcagaagtctgataaggaaaaaggcaaaaagagcagaatagttcctcttgtgactgttacggaaggactggatacagataacagtaacaggcatagaacaagagggaaaatgcattttgtagacgaagcatttgatacaaaggctctgtggaaaagcgtggaaggatatatagggaagatatatgacctgacaaaggtagagaaagtctatgtacatggagatggaggcagatggataaagaacggactggaggatttaccgcagacagtacatgtaatggatggatatcatcttgaaaagaagctgaaggagctttcagtgagatttccatcgagaggagtaagaagccgtctgacagaagcaataaaggcaggagagcggaagaaagcggataaaatagtgcagagcctgtatgaaatagcgtaagatgacaaagagagtggaaagattaatgaatttggcaaatatcttatggggaactgggaagcaacagagaatagaaagacgctgaatataccggggagctgtacagaggcacaggtaagtcatgtgttatcagaaaggttcagcagagatccgctcgggtggagtgataagggacttggaaagcttaccaagctgcgggtttatgtcaaaaatggaggaaggataaaggcggaggacttcagggagcatgagagaaatacaacatacagggagtatgcagacagggtaataaatgaggcaatggaaggggcaattgactggagtatatttgatagaagaccatttgtatttaatggagccagtggtacacagatattgctgcatgaaatagcctgcattaaaaacacactttggaattgatgtcaatcaaaaattccacaacaacttgacactatctacaggctttgtaaaacttataatcgaaacagttaaaaccgatgagaacatctgccatgtagctttgaagctgataacatcaaacggagctgttacagatttcagaggcggcaatgtggcggttacagtcagccttaacaaagaacttgcagccaaggaacttgtatgcgtatacattaacgatagcggtatctacacaccggtagacggagctcttaatgcagacggcacatatacatttgtaacaggacacttctcggaatatgcagtaatggaaaaagctgaagcggacaagaaaatctccgagcagctaaacagcttaatcagcaaggttaatcttaaagtaagaacctcaaaaacagcaaataagaacattaaggctgtagtgtcgggagatgtgaaagccctgacagatgcaggttatacggttaagtacagcttctacagagcaaccgggaaatcttcaaaatatgctgcaaagattacaaaagaacgcggcacatatataaacactataggtaagaaaggtactaagtactactacaaggctaaggctcttatatatgatggagataaacttgtaggtcagactgaactcaaacagtgcaggtatggggttagaatatggagtaagtaaactagcccgaataagggatattgcttaggttatttaacagaacatatcttaaactgttaaaacaactgaattaaggtgtttgacaggtaattcactttgttatggtggattgcctgtttttgtatatctgacttgcctgaaaacgttctgtacttaataaatcggatataaattgtaattattactgttttagatgcggttaaaacttgaataaaatataattgtatatattaaaataattaaaattggatattttaaagagtataattttgttgtaatatattaaaagacgatacatgtattatcttttaattctataacaaaggaagagatgataaaaatgagcacaaacaatgcagctgcggcagcaccgcagaacaaaactaaaatgattgtaattaacggccttttcatagcgcttacactggtggcaacaatgtttataaatatcagactgccccttgtaggaaacggcggccttattcaccttggcaatgtacctatgttcctcggagcctttgttttcggcagacgtacgggagcaatagcgggcggcataggcatgagcctgtttgaccttatttcaggctggaccgcatgggcgccttttacccttgtaattgtagcagctatgggatatgtttcaggccttatttcagaaaaactcaaagtacgccctgtaatagcaaacactgttgcggtaatcgcggcgcttgttataaaaatcgtgggatactacttcacagaggttattctgtacggcaactggattgtgccttttggctctatcccgggaaatatagttcaggttgccgttgcgggaattatcgtaataccttttgcaggcaagcttaaatcaatagcagctaaatactaaaaaatacacatacttacaggagaccttattatgtacaaaataatgacagcaggacctacgcaggttcgtgaaaatgtaagacaggcaagaagcctcgtatcaacaaaccctgaccttgatgaagctttttatgacttctacaaggaaacctgcgacatacttgcgcagcttatgcattcgtcaggcagagcatatatacttggcggagagggaatactgggccttgaggctgcctgcgcttctcttaccgaggcaggcgacagagtgctggttttagataacggcatattcggtaaaggctttaaggactttgtaacaatgtacgggggagagccggttctctttaccgcagactaccgcagacccataaatccggcagagctcagagaatttcttgataaggactccgatttcaaatatgccacagtggttcactgcgacactccaagcggcgttatgaatgatatttcagcaatctgtccgctgcttgcagaatacggaattatgagcgttgtagattctgttgcaggaatgttcggcgaatacgtgaatgttgatgaaagcagcatagatatcctgtgcggcggctcgcaaaaagcgctgtctgctcctccgggacttacaatggtatgggtaagcgacaaaggtatggcggctatggaaaacagaaaaacaccgattgcggcgttttatgcaaacctgcttacattcaagaactattacagtgacaaatggttcccatacactatgccggcaagtgatattacaggacttcgcgcggcaatagacaatgttgtttcagagcctgatattatagagcgtcatcataaaattgcagaggcggcaagaaccgctgtcagaaatgcaggactgaagctctaccttgaggatggattttcaaacaatgtcacagttattgaggttcccgaaggtctgacagatacacagatactttcgactatgagagataagtacaacgttatgatttccggctgcttcgatgtgctggcaggcaaggttataagggttgggcatatgggtgagaatgccaatagagaggatatgtgtatgacatttgatgctatggacaagactctcgaagaacttggatttgaactcaaatgcagcctcaaagaagaattcctgaaagcacttgataactagagtataaactacacagctataaaccaataaggaccccgcatcgcttaggtgcagggtcctgctcattataatgtcattttatgatgctttactgtcaataaagcttcaggacaaagaaacttttcagaaatttgcagaagtgctgcctttctttaagaatattatcagggagggaaaacgtgtcctataataataaataacacctgtacttactgctgcgtagaagcagagggatacaggtgcttttttctgttagaaatatttctttttcttaaaatatatgaactcacatacagctataattaaagctacggcaattactgcaatatagccgtatctccagctcagctcaggcatatgccggaagttcattccgtaccagcctgtaagcagtgtaagcggcaggaaaaatgtcgtgatgatagtcagaaatcccattatcctgttctgatgggcgtcctgtgttgactgataaagctctccgagctgcagcagattctccctgatgaactgaacatggttctggagacgttcacagcgtcttgtatatttgtcccagtcgtcaggttctgatacaaatgaagcacagacaggaagctgcagcagttctccgatatcaacaagctggtcataatatgcatttagctcggacagtttacgtctgtattttgtaagagatacgaataaattgccggtatttccctctgtaatattatcctcaagcatttcagtctgttcctctatatgcgaaaggtaaagaatatcatcggatatcatattgcccataacctgcatcagaagctgccccggagtaaacgcatcgcccagaatttctgcctgattttctatccacggaccaatcttgccgccgttttcgataaaaacaatcttagaagctgtcagacagaaaccgaaggtaagctgtgcgtctctgtataaatcatttttcttaggcaggcgtatcatgcctgtaatgcagtccctgaaaacctcggccttgcagtagcgcattgatttaaggctttcggcaagctctcggcagcctgaaaaccgctccccatatttattattaaactcctctctgctcataacctgaaacagagccctgtcatatctgttcatattttttcacccatacatattatttgccttttcatatattttagcaccaaagcctgtggcgggcaagatgcagggctcttaaaaatctgcccgatatatgataaaataaatatatattttgtctgtcctgtcagaaatgcaggcggtattgcgaattaatatatgacaacaaagaaaggagaaagcgttcttgaagattacaaaggaaaactgcatcgctcatattgcgtcaggaaacccacaggccattgaatacatagtggaagaatacggcgaccttatcaaaacagtactgtgcagaagccttggacagcaccgccagcactgggaagaatgttttaacgatgtgcttatggctgtatggaaaaccggcggaagctttgacggctcaaagggaagcatgacctcgtggcttgccgctgtggcaaaacacaaggctgttgattttctaaggaaggaagtccggcacgataacagagcggaagccctgacagagccggctgtgtacgatgagtattcaggggaaacagtgattgatgaactgcttgaatgtctgtgtgaagaggacagggaactgttcagaagacgctatgtatatgagcagactgcagaggaaattaccgcatcaacgggactcaaaagagatgtggtgtattcgaggctttcaagaggtaggaaaaaaattcgcaaaactatggaagaaaggggtgcaggcagatgaaggacagatttgagattatgtcgcaggaagaaaaaacaagagcgatagacagcttctacaaagaagcggggattaagaaacccacgggaacaaggaagaaaaaaaggtggataacagtagctgtggcagcatgtattgttcttgtattcagttttactccggcaggaacaagcgcgtgggccaaggcaagagaggcatttatgggaataggacagtacctcggaaattccgcagaggacgactacgtttctgtcatagaccagacacagaaaaaaggggacataacctttacgcttaatgaggttgtggcaagtaattaccagatgaggttttcggtaactgtcgaaaaggatgacgggacagtgctcagattgagagatgtctgtgaacaggtaacattcataaatggtcttcgcataggcggaagcgaagatgatataatgggatatggcagcggaagctatggaggcaagcgcgatggtaataagggtatatattttttaaatatcagctatgaatatgatatgccgctttatcctgaaatcaaaacgtcattttatgcagaagaccagtgttttgattttaaattcatccttgataataagagatttaaagaagcaaccaaagaggttgaaattaataaagtgttcgatacatccgggggagaggtgcatctgggcaagctgattatatcgcctattgatcagagtataacagttgagaacaaagaggatatagaagagccgctttatcttgaaggtacagatgaaacgggcgataaagtggatttctttaatttttgtactaatgatatgtggggcagcagaattaatgatgatgatacaagctatgagcttaattatgatgttaaatcatatacgctgcagttcagttatgatgatttggaaacggatgaacttgtatatgtaggcgagccgtttacaattgatattccgtagcagacctgagtgaaaaaggggatttgagtaattaaaagagacaggagatttttagcaagctcctgtctttttggtcttgagatttatctgctgcctgcggtgtccggaattgcaggcgttacatatactgtcctgttgtttgtgaatataaccatgccgggctttgcgccgcttggtttcttgacgtattttacaggcacataatctacaggcacctgctctgaatttctggccttgctgtgatatgccgcaatggccgccgcctcgaatatggtctttttgtccggctctttaccctcggtaaatacgatgacgtgagaaccggggatatccttggtatgaagccataaatctgtttttcctgccatctttagggtcagagtatcattctccgtattatttcgccctacgaggattctaaagccctctgaggacacatattcaacaggagaggttttctgttttttctgtacgggattgttctttctgcgcttcagataaccctctgccgtaagctctgtgcgcagagcttctattgtatccgcgctgtcggcgttctctatatatgaaagcactgactcgaggtactgtatatccctgtcgttttcttctatctggagagccttttctttaacagcggtctttgacttgccgtactttttaaaatatatctgcgcattctttgacggtgaatatttgatatcaagaggtatcgttaccgtagtgccgtcataataattgtcaacggtaacagacctgtcgcccgtcttgcacttgtgaagatttgcagtcagcagctcgccgtacagcctaaggtcctcggaattttcggcctttaataaatcctcggacaatctctgctttttaaggtagagctttttcagcttctgctccacagcttttaaaaggtcagttcctttctgtttaattctgttggaggaagctctgtgagaatagtagtattctacagcttcacttactgtattgaaatctactttattaaggtggttttcataggctctcagaggaaatgctgaaaattccatgggagagccgtcctctttaagatatacgcaaggagagaagtcgcctgtggcaagcctcttccttatggcttcaagattttccgatatatttccctcaagctcatcggcaatggagggactgatgccgcctatgcagtcaagaagccgtctgctctcaaatgaactgatatcctctgctgtgacctctttgaaaggaattttatcctgtaaaggcgggcactgatatatcatacccggaagaagctgtcttactctgctggtgtcaattgaaatcctcttgatgctgtctattatcttgccggtgccctcatctacaagggatatattgctgtgcttgcccataatctcgacaacaagttttttattcacgttaaaaccaagctcgtccatagtttcgatatatatttccgctattctctcagagcctacctgctttacatctgtaattctgccgctctgcaagtgcttgcgaagcagcatgcagaaagccgacgggtttgcgggattgctgtagctttcagacgacagatatatccccgcgtgattgcccgaagaagatatatacagtttcagcttgcctgattttgaatgtatgttaaataccagctcctcagcttctggctggtataccttttcgatttttcctccctgcagcgtatgattaagctcataggttaccgccgcagtcattattccgtcaaatgccataatcaatctcctgtcataagtgatataaatattttaacataagagtctgaaatatgatatgatgttttttcataaagactggtcgaaagaaagcagtaagttcttacaacagacagaagaagaactcttgcatgagacctgccgcaatttgcttacacaaattgggccagggcttcaagagctgatgaaatacagatgcctattgaagttattatgtggtatgatgcttttcacactgactgacaaatgaaatgcagacagaagtgatgaaatacagatgcctattgaagttattatgtggtatgatgcttttcacactgactggcaaatgaaatgcagacagaagtgatgaaaaacagatacctatcagagttattatgtggtataattattcagttatcattaattaaaagaaaaacggaggacagattgaatgataaaaagtatgacgggttttggcagaggggaatactctgacggcaaaagaaacataatagtcgagataagaacggtaaaccacagatacagcgatatttcggtaagaatgccaagaagatacacctttgctgaggagaagataaaagcggcgattaaggaaaccgtaaacaggggcaagatggatgtttccgtaatagttgaaaaccttacggaagatgatgttacagtcaagctcaacctgccggttgcaaagcagtactatgacaatctcagacagctcaaggacgaatttgatgtgacaggcgatatatcactgcagtttctttcaacacttcccgatgtaatgaaagccgcgccggacattgaagatgaggaaaaggtaacagcctcccttatagttccggttaaaatggccgttgaaaatcttgataaaatgagatgcatagagggcgagaaactggcagaggaccttgtgatgagaggacacctcatagcggatatggtttcagagatagaagaatatgccccgcaggttgccgaaagctatatgacaagactcaaagagaaaataacggaccttataggcaattcagcatcgtttcctgaggacagaattcttgcagaggccgctatatttgcagacaagagcaatattacggaggaaatagtaaggctcaagagccatatcagacagcttgaaaatataatttcggggaacaagggtgaaacagtaggcaagaagcttgattttcttgtgcaggaaatgaacagagaggcaaataccataggctcaaaagccaacttccttgatataaccaatacggtgcttgacatcaagagtgaaatcgaaaaaatcagagaacaggtgcagaatatagaataatgcttagatttaatgagaataacgaagtgatacaggagcaggaatacagagctgttcttgtgggacttgaacttaataaggatatatcttattcgatgcaggagcttgcaggacttgctgaggctgcaaatgtcgaggttgcgggagagatggttcagcatcttgaaagaccaaacaaggctacatttataggcagcggcaaggttgaggaactggctcttatgtgtgagaatatggagattgatacggtcatattcaatgacgagctttcgggtatgcagcttagaaatcttgaagaggctctgggcgtgcgtgtaattgacagaaccatacttatacttgatatatttgcagaccgcgcgctttcaaaggagggcaggcttcaggttgagtacgcccagcttgcgtacaggcttccaaggctcacaggctttggcaagtccctgtcaagacaggcgggaggcataggcaccagaggtcccggagagaaaaaactcgaaacggacagaagacatattcagaaacgaatggacgacattcgcgcagagctcaaaaaagcaaaggctgtaagggctacgcagcgcggcagacgtgaaaaaaacagcatacctgtagttgcgctggtggggtatacaaactccggtaaatcggctcttatgaacaggctgcttggagatatggacaaagaggacaaatccgtattcgaaaaggatatgctgtttgcaacacttgacacatcacatcgcaaaatttcgtttgatacaaatcaggaattcatacttatagatactgtaggctttgtaagcaggctgccgcattcgcttgtggaggctttcaagtccacccttgaagaagtaaattatgcggatctgctcattcacgttgtggacagctcatatgaggcctgtgattttcatattgaagtgactgatcaggtattaaaggaaatcggagcgggagataaagaaagaataatagcgtacaataaatgtgacatagcggaaacagagcccgtgtgcagcgagggctgcgactggctgtggatttcggcaaaacgcggagataatatagacgagcttacagaacttattaaaacaaagatattttcagacagagtaagagccacgctcctgataccttttgacaagggcgatgtggtttcatatctgtgcggcaaagcgacagtcttttcgatggattataccgaagatggcactgtgcttgatgcggaaatgtcaaaagaggattacagcaggtacaaaagatatgatactttataagacggttggaaaggctgcgcaggcggagcagattatagaaaaatcaagatttataactcatgtaaggcctgtagcgagcagggaggaagctgacagcttctttgcggaaataaaaaaagaatataaagatgcaacacataatgttccggctatggttataggcgacaaattccagatacagtgggcaagcgacgacggggagcctcagggcacctccggcgcgcctattgtgcagatgcttgtaaatgagggaattaccaatgtggctgttgtggtaaccagatattttggcggagtcaagctgggaacaggagggcttgtcagagcttatacctcaagcgcaaggctggggattgacgccgcaggtgtatgcaatgttacccaaatggcagttatgaatataaaaatggactattcttttttaagtaaattgcagaatttttccgaaaaaggactgtttaaaatagaggacataatttatgaggatatgattacggctgccatatgctgtgatgaggataaaaaagaagacacgagattgcttattgccaatatgacaagcgggaaatttgaagtcgtttttgagggagataagcttgtaaatgttgaaatttaaacgtttttgggcgattaaaatttattaaaaaaagtaaatattttttgtcgaaaattcattgacacaggggtaccattgtggtaagataatgaagtcgctcaacgagagcacaaaacaaaatagcaaataaaaaacttataaaaaagtgaaaaaaacacttgacataagaaaccaaatgctgtatagttaataaatgtgtcgagcagataaaatgcttcgggcgtatagctcagctgggagagcacctgccttacaagcagggggtcataggttcgagccctattacgcccaccaaatatggcctggtagttcagttggttagaatgccagcctgtcacgctggaggtcgacg

SEQ ID NO: 4430 - DNA, 15136 bp, Unknown
  16S sequences of unknown bacteria
tacgctcgttacctccgtattctgtcgcaatcgtctgggtgatccgggagatggtggaatccccggtggaggtgggctccggacgggtaatggtgatggtgacgctctcatcgccctgggtgaatacaaactcattctcgccgtaggagaggcttaccagctgtccgtacagaccgttcttggtggtgcgggtcacttcggagccgttgagatagaggggctgatcggggtcagagatcacgctgatgaagtacttggcagaggaggtggtgaaggtgtcactctgcaaagtgctgccgaagccgggctcaacggtgagctcgtaggggcagatgtcgtaattcgaatcgtacagggagttcatcagatccatcagatagtacttggagctgcgcagggcggaatagccctcaatggcagtgccgcggatagagtggccccggttctcgtagatctgataggcgggctcataggggtcggcatagagtttgccgtctgcgccgctgtccgccgaaatcaggttcatgttgtggactgtgatgaggtcgcagcgtccctcggtggcggcgctgacatcgttcagaagctgggtatagtcaccgctgacggtggttccccgcaggtctgccagcaggaagtcgggggtgtagccctcttcactgaaggcgttcagggcattgttgccgctctccagcccctggggggtgatctgggtatagacaccgatcttcttgccggtgcccaactcatccacagcctggtcaatggcagagaataccttcgccatggtctggggatcggtgccgtcgtcattgagcaccaggcccgagatgccatagttgtagcagagttcccgggcgatgttggtcagggtggacatggagtccttcttggaggtattccagcgcagggcgccattcccgtcctcataggagagggagctgtcatagactgccgggtgatcctccgaggcaatgcccagactttcggcgatgtaggtggtattgatgacggcatagacctggatattctgcttcttggcagcccggacagcctcatagacgatgtccccgccggagttcttgcccttttcatcgagcatgagctcactggtgggcatatagtcggaggtatagagcgcactgcccttggcatcatgcacatccatgaaaacggtattgatcccgttttccgccgcataggacatgatctggtccaggctctgggccactgtaccagcgtcatagggggactggatgatcagatcctgcccggtggcatggatgaacaagccccggatctcaccgtccactgtgacggcggattccgcgggggagctgggtttgcgcgggccggtcatacagccggtgagggctgtaaggacgatcattgccgcagtcagtgccgcggccaggcgaaaccgatgggtcttcataatggaacctcctgtattttagcagtccggacaaaatataccggtctggtacgatattactgcattctatatagtatcatatcatttcaccgactgtttttccagtggagaaacggttttttgtcgaaattccgttcattgccatagaaagcaggaggatcgatcccatcccgatgagggaaagtcctccaattatgccagcaactgtggcctgagccaccggctgggtgtactgcatgccagccagcagatctgccaggcatcgctgatagagcaggcttgcaagggcagcggcaatgcagcccccggcgaaccgggagaagaagagcaggccgaagctcatggggagccgatggaaggcagctgccgcctgacagatcaccgagaccccgccgaaggagagcaggaaggcggtgaggacaaaggcctgttcaccgcccaaagccgaagcggcaatacagccgtcggtcacttccagcaggcctcggagcagggcagtgtagaacgccgagccgccggatacgggccacagccgttccagcgcggtcaccaggcgggggagcagtccggtctcccagagcaggctgcgcagcccggagaaggtcaccacaaaggcgcagatcccgatcaggctctgggcggcgccggaaacgctctgcacaaaggcagtgcccaggggcaggggttccgcgggcggggcaggctcaaaggtctccttaccggtacagatgaagaaccccacgatggcggaggctcccagatgggctgccagcaggcagagccccgcctggaccgaagagtagagcgcggcgcccactgtgctgaccacaaaggcaggcccggcattgatgcagaagcagagcatccggcgtgcggtccggggctggatgcgtccctgttccagcagctgggcgatggttctggctcccacagggtagccgccgatcatactcatcagcagggcgctgccggcttcgggcggcaggtgaaagacccaccggcagaccggttccagggggcgggagacccattcccccagccgggtggtggagagcatccccgaaaagatcaggaaggggagcagggatgggatcaccagggtggcacaggaggccagaccgtcccggatgccctcggcggtctgggccgagtgggtgagcagtccggcgccgatgagcagtactcccagggccccggctgcccggagcaggggttggaacggtgccgcggaagccgggcggcagcttgtatttttggttgtaggcatacagagtccctccagtcagttgcgtgtcaagtcattctattcagccccgggccatataatcacacgaaagggaggtgatccgatggcagaaaacaagggcccgggacggctgcacgcctatcttgcgtcctattcaggcagtgaggagccgctgatgcgtctgctgccggcaagaccgtatattgagctgtcatccaacgcaaagatgctggtggaggggtgtaccggggttctggaatatgagcgggagtgcatccggcttacggctgggaaatgggtgctgcgcatcaccggcagcggcctgcagatcggcagcatgaaggatcagtgcgctgtgatcaccggggtgatcgcttcggtggaatatctgagttcggagggatagcagatgaaaatggatcagctctaccgccggttccgggggactgtgcggttcaccgctgagggcggtcacgcgctgcggatgcccggtctgctcgccgccgacggaatcccactctacggggtgacgcccactgatctgggctttgaggcggagatcgccgccgagcactaccgcaaagcggcaaaggcagcccgccgcaccggaacccggatccgactgcgggaaaagcatggtatctccttctggctgttccaaaaccggaagcggcggggactgtttgccggtatcttggcggcggtgctggtgatggcgtttctcagccggtttctgtgggtggtgcgcatcgacggcacgctggagcactacaccgaggcccagctccgggaacagctccgggaatatggcctccgggaggggacgctggtctccgagctggacgccgcttccattgagcagtcgatgatgatcgccaatgacgatctggcctttatagctgtgaacctgcggggcagcaccgctgaggtgatcgtccgtccccgcacccggattgaggaggagccgggcaccggcggacagcccgccaatgtggtgtcactttatgacggggtggtgcgcagcatcgaggtgtattccggcacgccccaggtgaaggtcggggacacagtctgtgccggggatctgctcatcggcgccatcgtggagaccaccaacgggcgcagttcggtcaagcaggcgtccggacgggtgatgatcgaacatgaggaggatctggcagtggcggtgccgctcaccgagcagatgctcctgcccaccggggaggtgcgccaggtgcgcagtctggagttctgcggcctggagatcccgctgggccctgacccggtgggagagacccgcaccgagacccgggagcatcggctcacggcttttgggacgcctctgccggtggtgctgattgtacgggagcattcgctgctggaggagcaggaggtcacccgcaccgaagccgaggccgaggcgctggcggaacagcagctggcagagctggaacagacccagctgggtcaggccgaggtgctggaacgggtgctcaccggcacagtggacgggaatgttttcctgcttcggggccattatctggtactggaagatgcggcattggagcgccaatttgaagtcaatcaataaaattgtatcggggtagattgaaattttggctatttgtgttatgatataggagaaggcgcaaaaccggcgcttcttttgttgtacggttttatagccgggttcgggtgtttcctgtatgcgggaaaccgaagaaatgatctgagaaaataaaggcaggctgtttcatgatagaaaaaacgattgatatagaccggatggaacaggcggttcagcttttcggcagctttgatgagaacatcaaggagctggaaaaggaatatggcgtcaccattctcagccggggcactgacatcaaggtctccggtgacgcggaaggtgtctacaacgcctgcaaggccatcgatgcactgctttcgctggtggaaaaaggtgaggtcatcaatgaccagcgggtgcggtatgtgatggatctggtgcgggatggcagcagcgagcaggtggcaaagatcgccggcgatgtgatctgcatcaccgccaagggccgtccgctcaagcccaagaccctgggccagaaaaagtatgtggagagtatccgcacaaacacggtgaccctgggcattggtccggcaggtaccggtaagacctatctggcggtggcaatggcggtacaggccttcaaggcccacgagatcaaccgcatcattctcacccgtcccgccgtggaagcgggcgagaagctcggcttcctgccgggtgatctgcagaacaaggtcgatccctacctgcgtccgctctatgatgcgctgtttgatatgctgggagctgaaaccttccagaagtaccaggagaaggggaacattgaagtggcgccgctggcctatatgcgcggacgcaccctggatgactccttcatcattctggatgaggcacagaacaccacgccggagcagatgaagatgttcctcacccgtctgggcttcaattccaaggcggtcatcaccggcgacatcacccagatcgacctgcccgattccaagaagtcgggtctgatcgaggcacagcgggtgctgcgggaagtggaggacatcgccattgtcaccttcacagagaaggacgtggtgcgtcacaagattgtccaggacatcatcaaagcctacgagcgctattacaataaaaacaagcggtaaactgccgcctgtgtggtcaaacgaaaaagaggttcaaatacaatgggagttgtaaaagtatatatcaccaatcagcagaaggccgtcaagatcccgtccggactgcggctcctgatccgcaagtgctgccatgccgtgctggagatggagaacttcggcaagccggcagaggtcagcgtcacctttgtggacaacaaggagatccagaccctgaaccgggagtaccggcagaaggatgcccccaccgatgtgctgtccttccccatgggtgaaaacggcgaatatgatctcaacgaggataccggcgcctatattctgggcgatgtggtgatctcgatggaaaaggctgtggagcaggcagagatgtatggacattccctgagccgggaagtgggcttcctcaccgttcattccatgctgcatctgctgggatatgaccatgagaacggcggcattgaagctgtaatcatgcgggaaaaggaagagactgtgctcagccggctgggactgtcccgggatgccagctatgtgccggagcagcagtaaggaaaaagcgagggaattatgcagacaaaaagcggatttatcgccattgtgggccgtccgaatgtgggcaaatccagcctgatgaacgcgctggtgggcgagaagatcgccatcgtatcggataagccccagaccacccgcaaccggatcaccggtgtcctcacccgtggggagacccagctggtgttcctggatacaccgggtgtccacaaatcccgtaccaagctgggcgactacatgaatcgtcaggtcaccagttcggtggcggatgtggatctgatcgtctttgtcaccgaggccaaccgtcctctcaatgaggcggagaagaagctcattgcttccttccggggaatgccggcggtggcggtgctcaacaagatcgacctgctggacgctccggaggagatgctccggaagatcgccgaggtagcgggcgcctatgagttcgatgagatcgtgccggtatcggtgctgaaaaatgacggtctggacgggcttctggagatcctgctgcggtatgccgaagagggaccgcacttcttcgaggacgatgccatgaccgatcagcccgagcgggtgattgtggctgagatcatccgggagaagatcctgcgcaacatgcgggacgagatcccccacggcaccgctgtaaccatcgagcggatgcaggaccggggccggatcatcgacattgacgcggtgatctactgtgagcgggagactcacaagggcatgctcatcggcaagaagggtgagatgctcaagcgcatcggtacccaggcccgggaagatgccgaacggttcctgggcgccaagatcaacctccagtgctgggtcaaggtcaaggaggactggcgcaaccgggaaggcctcatcaaaaacttcggctatgtggatgaataaaccagggctcgcctgaattttccggctatatcggaacgcttttctgccaaactgaatctgtaagatcaatttggccggaggcgaaatgagatggatgagctgacagcatggaaacggtttgctgaaaccggacgggtggaggattatctccggtatgtccggcagacgcacgccggaccggcagcagaatcggctgcggcggcgatgtccgtttctcaggagacagatcagtatgcagatcaccacaacggggatcgtgcttcgggaacgggaacatgatgatgaccgtattctcacgatcctgacagcggaccgcggtgtcatcaccgcctatgcgagaggagcgaaaaagctccggggacggcttctgtccggaaccgagctgctttgctgctctcgttttgtgctgttccagtatcgggaccgctatcaggtggattcggcggaaaccgagcagaatttcttcggcctgcgcggcgatgtggaaaagctgtcgctggcagtgtacctggcacagctctgtgcccaggtggcgccggcagaggaggaggccggggaattcctgcggctgatcctcaacagcctctacctgctggagaaggacaagcgcccccagcggctggtgaaggccgtgtttgagctgcggctgcttgccatggcgggctatatgcccgatctggtaggctgcaaggtctgcggctgctatgaggcggagggtatgtatttcctgcctctcaccggcgacctcatgtgcggggactgcctgggggatgctccgccggatgagatggtgcgcctgcgcctgagccccggcgtactggctgccatgcgccatatcctctattcggaggctggcaaggtatttaactttacaccatcggaggaggagctgcggtacctcggggacatctgcgagtactacgccattgtccagctggatacccggctcagctctctggatttttacaaatcgctcctgctctcataggcagggattttcttaggaaaggagtttttctgtgtcgatacagagcaaatatatcacttcgctggaactggacaaggtactggcgaagctggcgaatgagaccacctgtgaagcggcacggctgcgggcactgcgtctgaccccggtgaccaccgaggaagaggcagtgcggctgatggcgtacacagcggatgccaaccgtctgaccaaccggtatggcactcccactgcccagaatgtccgggactgcaccggttcgctggaacgggcccggctgggagcccagctgcctattccggaactgctctcgattctgcacctgctggaaaccatccgccggatgatcggctggaagaagcagagtgaggaagaggtcaccgcgctggactatctgttctcctgcctgacctctttcaagagcctggaagatgagctcaagggtgccatcctcgacgaggagacgctctccgattctgccagcccggcgctggcggagatccgccgcaagatccggaacaaccagcagaaggtgcgcagccagctggacaatatgatccggtcttccagctatcagaagtacttacaggattccatcgtcaccatgcgggacggacggtatgtggtgccggtcaaggccgagtaccgcagcgaggtcaagggtctggtgcatgacacctcctccagcggcgcaaccgtgttcatcgagcccatgtcggtggtggaagccaataacgagatcaaggtcctggaaagccaggagaagaaggagatcgaccgcatcctctatgagctgtccgcttcggtgggcagctatgctgaggccatcagccgcagctatgaagtgctggtagagctggatctctactttgccaagagccgtctggcagacaagatgaaggcttcggtgccgcagatcaccggtgaccggaagatcaagctgatccgggcccggcatccgctcattgacccggagaagatcgtcccggtggatgtgaccctgggtattgattttgacaccctggtgatcaccggccccaacaccggcggtaagacagtcctgctcaagacagtgggtctgctcactctgatgatgatgtgcggcctgatgattccggctgcggacggcagcagcctgtcggtgtttgacgaagtgctgtccgacattggcgatgagcagagcatcgaacagagcctgtccaccttctcggcgcacatgaccaacatcgtctccatcctggaggcggcaggggacagctcgctggtattgctggatgagctgggttccggcaccgacccggtggagggcgccgcactggcgatctccatcatcgagaagctccgggagcgggactgccggatcatggcgaccacccactatcccgagatcaagctctatgccctggaaacccggggcgtggtgaacggtagctgtgagttcgatgtggagaccctgcgtcccacctaccggctgctcatcggcgtgccgggacgctccaacgcctttgccatcagcgaaaagctggggctggacccggagatcatcgacagcgcccgggagcgcatttccagcgagaaccagcggttcgaagatgtggtatccgagctggagaccgcccggcagaatctggagaaggaatacacctccgcccacaggctcaaccaggaggccgagcggctccgtcaggagaaccaggcctaccgggagcggctggagaaggagaaggaagccgagatcgaaaaggcccgggaaaaggcccgttccattgtggagcaggtgcggtaccaggcggatcagctgatgaacgagctggaagagctcaagaagcagaaggattcggcgaacttctcggaaaaggctgccaagatgcgtcagagctatcgttcgggcatccgcaagctctatgacagcgccgatccggtcaccggacgggagaaggagaagcagaaccacaaccgtgccctcaaacggggcgatattgtcatcattcccgagttcaacaaggagggtaccgtcctcaccgacgaggataaggacggctatgtgatggtccaggccggcatcatcaagaccaaggcgccggcagcggatctccgtctggtggaccgcagcgaccgcaaggtgacggtgaacaaccagaaggtatccttcaagcgtaataccgctgccagcggcgggggacggggaagctccggttccggtcgcagcagcactgaggtggatgtccgcggcatgaccaccgatgaggccatcatggaagtggaccgcttcctggacagctgtgtgctgagccatatcggcaccgtcacagtgatccacggcaagggcaccggtactctgcgggcggcgattcagcagcacctcaagcggcaccccagtgtacgaagcttccgtaccggcgtctacggtgagggagaaaacggcgtcaccattgtagaactcaaataaaagggcttcggcaccagcagcaaatccatcgctgaagccagttaccataccggttttcctgccggaacctcagtcagactccggcaggatttgcttttatcttggcaaaacagccttgctgccgccggcaggttcagccggatcaggcgttttgtgttggaaaggggagaaattgggatcgcagcgtagaatctgagaaaaggataggtgaaagtccaatgaaggatatgacacagggcaatcctgtaaaagaagtgcttttattttccgttccgatgattttggccagcgtgttccagcagatgtataacgcggtggattccatcatcgtgggacagtttgtcggcgccaacgcgctggctgccgtaggcgcggcattcccggctatgttcctggcaatgtcggtgctgatcggtatcaccatgggtgtgcagatcattatctcccagctgttcggcgccggagaacatgaacggatgcgcgccacctttgccacttcgatcatttcgctgatgatcctggtggtcatcgccagtgtgatcggttactttgcctccggtaccattctggagctgatgaatactccgccggagatcattgccgattccaaggcctatctggacgagatcttcaaaggtctgatcttcatgttcctgtataacctctatacctcggtgctccggggtgtgggcgactcgaaaactccgctctatttcctgattatctcctcgatcctcaatattgtcctggacctcgtctatgtgatccagttcggaatgggagtccggggcgttgccgttgccactgtgcagtctcaggcggtatcggtcatactgtgcattatctacaccaatatccgcattccgctgttccgcctgggcctcaaggatctcagagtggactttggaatcctgcgcacggtcctccggtttggaatccccactgcgatccagcagagcatcagcgccattggctccatgctggtgcagggcttggtcaactctttcggcgccaccgcggcggcggcctttgcggccggcaacaaggtggaatcctttatgatgatgccgctgatcaatattgcgaacgcctcgtctacatatgtggcgcagaataccggcgccggcaagctggaccgtgtgcgggacggttttaagaaggtgacggtgatcaatgtgctgatcaccgcggcaatcagtattatcccgcttacaattccccagtacctgatgcagattttcatcagtgcggatgaaaccggcgtgattgaatatggctgcctttatctttcaaccctgttcttcttcttcttcctgcaggcgctgatgttcagcctgtccagtttcttccgtggcgtcggcgatatgaatgtatcgctggccatgtcgatgatcgctctatttgtgcgcatcggttcggcctatgccctggcaaagccgctgggatacctcaccatcagcatttcgcagcccatcggttgggtctgcgctctggctctggcgtttgtagcctatcgctccggacgctggacccggttcagcatcgctgcccgggaaaatgaaaaccagcttcaggaggaagtatgatctataacgacggaaaagcgggattcctcaccgtgattatcggcccgatgttctcggaaaagagcggagaactcatcaagcagtgtctgctctcccagaactatcagaataaaacggtgcggatctataagccggtcattgatgaccggtatggtgaagatgaagtagtcagccgtatcggactgcggatgccggctcataatatcagtcaggagatcacgccggagctgatccggaccatcctggcagactgtgaaacagctgatctggtggcctttgatgaggcacagttcttctcggagggtctgctggaactgaccctgggtctgctcgaccggaaaaagcaggtgatgatcgccgggctgaacctggattatctgggacggcccttcggctgcatcggacagctgctgctccatgcggacgaggtgattgtgaagaaggcctactgcaagtgctgcggacgtccggcgatgtatacccagcgggtgatcgacggacagccggtcacagcccagaacctggattcggagctggtgctcatcggtgaccaggagagctatgaagcccgctgccgtctgtgctttgtgaaggatcgaggagggatacccatgcccgggatctgccggattccgccggaggagcggtgggaacgctgccgggagctgctgcttctggcagacccggacccactgatggtggagcgatacctgcccgcctgtgaaatgctggctctctgtgaaggggagaaggttctcagcgaggtgtgcgtcgagcagccggaggccggggactgggagctgcgcaatgcggcaacctgcccggagctggagggacgaggctatgcttcggccctgatccgggaagtccagcgtcaggcccgggaggcagggcggtcgctggtggtgggcacctctccggagggagtgggcttctaccgccggttgggatttgtgccctgcggggtgcgccggggatttttcctgcagtaccaggaaccggtgctggaaaacggaaccgtactggaagatatgcagatgctccgctggagcaaggaggaaacagaatggactttatgaacacaccggaacagtttgcacatattcccaaggatattctgcgggaccgccggatgaccctggcagccaagggcctgtacagcgtgatctgtacctttggcccggacagcccggtatccattaccgcggtggcagaactgctgggcctgccggtggaggagatcgaccccatctgggatgagatggtctccttcatgcggctcaaggagaaggaagaagagcttttccgtgccatggcagagatgcagcagggactgggcggttcccagaactgacatctggaaaataccagcagacaggcagtttcagcgattggaactgcctgtttttattttataaaaatcccttgtatttccagagcggctatgctatactgggaatgtatttaggtaactataaatattatgcaatacaaaatattatagtgtacaaaacaaaaggagcgaatttgtatgaaacagatggaagatgatgtgagccggctgattcagaacttcagccgattcagccatttcatcaagcgccggagccgcaatgcggacctgcgcactggtgagattgcgattctgcggtgtattatgcaccataccgacggcccggatggggagatcaagccctcgcagatcagcgcgctgatggggctgcagcagccgtccattacgccgagcctgcggtcgctggaggagcggggatatgtacgccgccgcaacagtgaccaggaccgccgggaggtctatttctcggtgacggaaaagacccgggagatggcagcagaggagcgccgccggactgcccagatgtttgccgggctggcagaatatctgggagaggaggatacccgcaagctgatggagatcatggagcgggtatcggggtacctggatcagcagatcgaatccagccccaagaataactgctccggacggggacgccgcagtcagcaggctgagtcccgggaggaataaaaaccacaattcaaattgccgccgcatggactcagacaggaggttgaaggtgtgaaaaagatgtttttgcgcctgcgtccctttattggattggtactctgttccggcctgttcattatcggaaacagccttgccaatctgcagatgcccgcgcttttggcagatatagtcaacaatggtgtagccatgggggacagcgactatgtgacccataccggaatccggatgctgggtgtggcattctttgcagtctgctgttcgctcggcactacctactgttcttcccggatcgccacgggattttcttcccggctgcgggacgaactcttttataaggtacagtccttctccgaaggggaagtggatcgcttcggcaccgcgtccctgattacccgttccatcaacgatgtcagccagatccagcacttcctgatgatgctgatccgcaatatgctgtctgcacccatcacagccattggcggtgtctatctggccttttcctgcaatgcccagctggcaatgatcgtctttgcagccatgccgctgattgttctgatcgttgtgggcatttcccggttctccatcccgctgacccgtgtcatgcaggaaaagctcgaccaggtcaaccttgtcctgcgggaaaagctgcggggcgtccgggtaatccgggccttcggaaccgaggagtatgaggaacagcgtttcgcccgggccaatgaggatctgaccggggtttccatccggatgcagcgcaccatgagcgccatgtcgccgctggtgatgatcgtcctcaacggcgccacggtctttctcatctatgtgggcggcgtcaaggtcaacaatggcctgatgccctatggcgacatcatggcagtggtggaatatgtgatgcagatcctcatgtcgatgatgatgatctcgatgatctttatccggattcccagagccgtagcctctgccgggcgtatcaatgccatcctggactgcgatactgccattgaaggcggcactgtcaccgacagcggtgagacccggggccgtctggagttccggaatgtgaccttttcctatgaaaatgccgatgaaccagctgtaaagaatattagctttacatctgaaaaaggccagacggtcgccattatcggctccaccggcagcggcaagaccacgctgctcaacctgatcccccggttctatgacgcccaggagggacagatcctcatc

SEQ ID NO: 4431 - DNA, 32759 bp, Unknown
  16S sequences of unknown bacteria
tgatatttctattctataccatttcagaggtttacacaagatgggaagaagtctcgtgaatatcgcaatggcttttttaatataaggttttcttcctccaactgagcattgcgtttttgcaattcctttatttgttttgcagtaagaaccgtgttgtcatcaatttttacttcagaatactgttttatccaatttgccaaagcattatgtgatatgccgtattcttcctttatttggttgtaggttttgcctgagtgatatagatctactatcgtttgcttgaattactgtgtgtatttttggtttttgcctgccatttttgtttcctcctcggttagctgttttcctgtgcttttattatatcatacttgtccactcttttagtatatatccaatactccaatgaagataatcgcaaatgaaatgggaattggagagaataaagtatataaacacaagaaaaatgcactttcaacacttgcaaaaaggatgaaggcagatgaactatagagaaagcgttagggatatatcgattgacacaaaaacaatattacagtttttaaacggtaaggatatatcaggtacggttatagatttctatggcaaatatattttcagaatatccgaattaactataacagattcggagcatagtgttgaattaaagtacatagatagagatttaatgtagaagatgattttttaattaaaatcaaggcatgataattgattgctgcaagcgctcttcgacactttcgacgcgtaaatatcgaaactttcgataaaattttatcgaaagtattgacggactgtttgccgggtgatataattgcattaagaaaagtgtacgaaggtggaaatatgtctattccaatcaatatagatgatttaataaatcaaagggttgttgagtcaacacgcatagaatttaagagtgactggaatcctaacccgataattcacagtatatgcgcctttgcgaacgatatagataatgttggcggtgggtatataattatcggtgttgaggaagaaaacggaagtccggtatttcccgttaaaggaataaaacaggacagaatagacggaattttaaaggaacttataggattttgccattgtattgagcctctatacaaccctgtggttgaaccggttttgtttcaaggtgtatatattattgttgtttggattacgggcggctatggaagaccgtataaagcgtcaaaggatgtgttcacggaaaaatccaataagctttactatatcagaaaattcagcagcactattgttgcttcctcagatgaagaaaagcagttgttttatgtttcgtcggatattccgtttgatgaccgtgctaaccttgcggcagatgtttcagatttggatatcggacttatgcgccagcatctaaaggcaataggaagcagcttgtatgaaatatctcttaaagaagatgcattgaaaattgcaaaggatatgcagttgctatccggaccggttgaaaatattaaaccgctgaatgtaggaatacttatgttttctgagcaacctgaacggtatttccgttatgcgcggattgaggttgtggatattccggatcctacaggcaccaatatggtggaaaaggtattcaccggaccgattcaaagacagctaaaggatgccctggcatatattaaaaactatatattgaaagaagctataattaaagaatccgataaagccgaatcaataaaaatatataattacccatatgcggcagttgaagaattactttctaatgctgtttatcatcgttcctatcaaataaatgagccgattaccgtgagaataaccccgcagaatatttcaataacaagtttccccggattcgacagaagtatttcggataaaagaatttcggaatatgacataacttcgcctatataccgaaacagacgaatcggtgattttttaaaggaacttcatctgattgaggggcgaaataccggttatccgactgtgcttaatgcacttcgcgataacggttcaccgtatccggagtttgaaatggacgagggcagaaattatcttacggttaagctttcgattcacccgtactttttaccgaatatgataatcagtccaaaaaaattggagtaccgtcaaagaataataaacgctttaggtgatgggaaaatgtcattaaacgaattgtctaaagcaatgggttataaggggattactactaaattgtcatttacggtagatgatatgataaaatccggcgtcattgaaaaagtgatggtgggagcgtatgccaaattgcatattcctaaatgatttttcgctaacaggatatatgaaaacgacagtgattattttttaataattgctgtcgttttttacttaaggggggagggttttcggaatatattaagactatgtatatagagggcgcaagaaaagcgtcttatgaaccttgaaaaatatgcctatgggcattatagaaagcatactgtaaaacagcaggggagcgacgtttgcttaaacgcaaaaaacaaaggtatgacagcctttgtccgcgatgatccttttaaaagacacttgccgtgggcttggacggcaagcgggcagaagtcagcccgttgcagtatgtccctgcggaggggctaaatactccgtcagttaaacagagtgttgaaaaacaggagtgtaattataatgaatgcggcaaataacggtattttaaaaagattgctcggcaaccaaaatctcacggtatcattttccgaggaagaaacaggggatattaaggcagatattttttcacttcttttaagcacatataaatcccgcgttgaatcggaagtcagaggcagtataaaaagtcaaatttgacaaaataacttttgtgtgctatactccccggcgaaatccgaaaggatttgcggaccttgaaaaccgaataaagtagttcaggtgatttcgtatatctgcgcataccctgcgatacatttatttgcataaaagaaaaaactggttaccgtttttataagggaggagattaaaatttatgaacatagaagaattcggaaagctgaatttaacaagactggacggtaaaatatccgccgacaaaagactgacatgggaaagcatatatgcctcgtgccgttccgaatcattgctgacgggcaaaaccgtaggggtggactcggtaaagctgtccggggataaaaatacgcattgccttacggtgatagataataccataaaaatccttataccctttagcgaggtttggtatgataaaaagctgatttacggcagaatactgtcaagatggtaatgctacctcggtgaaaggttaaataactgagaaaacattctgatcaaacttcagttgtttaaggtgaataaccattggcaagtaaaaatgtttctgcacataattaaagattgattgtgcattaactcttgagcttctgcacatactatgctataataatgtgcagaaacggaggaactaatatgagaaagtttgattattcttttttaaataactgcttattgccggcaaatcttattaaccttacatccggtattgcttcattaaagacaatggcaggtgtaagaaaagaagaatatgcaaaggtctttactgaactggaagcagtagcgaaggtgcaatcggttaaaagttccaatgccattgagggtatcgttaccagtgatgagcgtattgctgccattgtaaaccagaatagcgccccattaaaccatacggaaggtgaaattgcaggttatagagacgccctgaatgcgattcatattcgtcatgacaccttagatctgcgtcaaagcgatattttaagacttcacgaaatgatgatgcagattgccggttacgagtacggcggtcagtataagacgggcgataattatattattgaggaagacaaggacggaaacagaaaagttcgatttaagcctacaccggcctctgaggtaaaagaggcaatggaacagttggagttggcttatatggaggctcggaataatgcaaatatcaatcagttattgctgattccctgtgttgtgcttgatttcctgtgcattcaccctttccgagacggtaacggcagaatgtcacgcctattatccttgctcttgctttataaaaacggctatgatgcaggaaaatatgtttcctttgaggaacagatcaacaactataaggtgtattattacgaagcgttgagagaatcctccatcggttggtacgaaaaccggaactcttatattccttttatcgagaactttctttcaacactctatatgtgctataaagaattggacaaacgctttgctgttattcatggcaagaagattacaaagaccgcacgaattgaagcaaccgttctcaatagtttagtaccgatttccaaggcagatatatgcagtgtcctgccggatgtcagccctacaactgttgaagcagtattgagcaaaatggttagaaacggacaaatcaagaaaatcgggcaatcccgaatgacccgatatgttaaaatctaaataatgattaacctttacggtgcttgtgttcgcgtcggtaaggctatgggatataaacggattattacgtatactcttgaaagcgagcacggctcaagcgttaaggcggctaattataaatatgacggaattgcaggcggtattgtatggagcgggaaaagaagaaatgacgcgctgcccggcggggatatgaaagaggtttttgaaaccgttaagaccaataactatatgggctggaagccctgcacaatggaagaggctcgtgcggctgcaaacagcggcacggctgcaataggcataagcgatactccatatgtgatgaatcgagctgattatatgcgtgatcctacggtcgaacccacaaaaagtaacagaacctgggggcaaattaaatctgacggtagttctatcacctatcctgccaatagtgattacggagcttttgtggtttattccgcaatttgacataaggtatttataaaaattaaaaatccgagatttatcaaaatgatttaatctcggatttttatttgtcacaaatactatatctatttatctgtaatttcagaaggcggaatcagatagtttttccattcaccgccgtttaaattccatacggattcatcggaaaggtattttgacagctcggggcttgcggcgtaataattgttattcgacggcaaagtgaattccgatgttttttgcagagaaccgtcaattaacgcctcttccgtataagtggtttcagctccgtttgaataataagaaaatgttttttgcgttataaaatcttttgtttgattgttatagcaaactaattctaccacaggttcgtcactatggacctatttttttatttcaacttcattttacaacgcgcgaatgatttaaaaacgggtgtgatattttgaaaaaagttcttatcgtcattattggattttttcttattgcggctttatgcggctgcggaagccacgcgctttcaagcgatgattttgccgaggggtgagataaaggtaggtgtggaggaaagacttgcggcggaaaacaacagtatatacggtatgatgacgcatacctgcccgatagattatcttcctactgaaatgtttatgtctacaaagcaaaatgccgaaataaagcgaaagcctaaaaaagcaaaatccaaaaaattattcaagcccgatattgaccgttcaactgaggaatggctcggcagacttgaaaggagcttggattacgaaatatggtactgcggacactaccatattgataaacagcttgataaggtttatatgatgtataatgaaatcagaccgctgcatatgaattgaaataattacagctgctttgaggcggtgtataaaatttacggcgatgccgcatgcttaaagcgcgcgggagaggtgagaaaaacggcggagcggcaattctttaacggtacgtttttttgcgaccatgtaataagaaatgaaaacggcgttttagagattcaggacaggcacatttcagaggcgtgccaatattatgcaatttttcgggttgtctttagcggaagttatttaatgcttttcattttaaatattgctttttccgaaagcagcattaccgccgatgtatttacgcagagcagtatgccgttgaaaaaggcggaaagccgccaggcggcgtcaatattcataagcgcgccgggaacacaaagcagcgggtagattataataaacagccgcctgcctgccttaccgaaaagaaattcgcaggatactattccgtaatacccccagcctataacgcttgaaagcccgaaaaggcacatcataaccgtcagcaaaacaacggaatacttaccgtaaagggtggaaaaggcggagcaaatgagctctgttgaagcacccttgccgtattctatgcccacacccgagcaaagcatggatagtgcagtgagggtgcatataacgattgtatcaacaaacacctcgaaaatcccgaaaagcccctgacgcgcgccgtcggtataagccgaggaggaatgagccatagccgaggtgccgagcccagcctcgtttgaaaaaacaccgcgcgacgcgcctgtgagcaccgcggcggaaaggctgcccaccgcaccgccggttacggcggagggcttaaacgcgcctttaataatcattgaaaaggcggcgggcaggcggctgaaattgaccccgataattcctaaggtcataagcaggtaaagcaatgccataaacggcactattttacctgtaaagcttcctattcgccctgccccgcccgacagcaccagcgccgtgattacggcaaaaaaattccgccgacaagcttaattaaggcgctttgcccgaaggactgcaccgcggtgcccgtttgggtgaggtttccgctgcaaaaaactgcgggcaccgctgccgcggcatataaaaggcttaacggcgccagtatttttggcagcccgttttttatgtaatacataggtccgcctgtgtattcaccgcccgatttttcgcggtattcaagcgataaaataatctccgctaccttcactatcattccggcgaaggcgcttatccacatccaaaaaaccgcgcccgcgccgcctattgcaaccgcgccggcaacgccggctatattgcctgttcccaccgtggcggaaagtgcggtgcaggctgcctgaaaggggcttactccgattttaccgtcactttttttcataccgccgaacgcatattttaatgaagagggcaaaaaacgaaactggaaaaagcggcatttaagtgtaaagtaaacgccgcaaattataagaaacacaaagggcagcatgcccgatataaggctttcactgaattcaaaaaaggctttcaattttatatcccccaatattaggttattggagaatacataaatttattctgaaaaaatcctatatagctgtatgtaattcttgacatatcggcgccgcagtggtaaaattattaagatagtaaattcggttgcggcgtataaaacaccgcaacagtgcagcttaaatgtgccggggcttttggcgaaccgcggcgcattggttgattttatcacgggagaaaacagcacggctcccgttgctttcgttttattgcgccgggtgcgaatttcaaaaaaatccggcatacgggcgcgtgaaagaaaaaccgtgtttattatataggaggttaataaaaagaatgcaaccgattttatatgtcgtttttgcggcggttgcggtgctgcttgccgttataggcttttttgcaggctccgcttatcgcagaaaagcggctgaaaacgccatcggctccgctgaggacgaggctaaacgtattttaagcgacgctatgaaaaccgccgaatcaagaaaaaaagaagctcttgttgaggcgaaggacgaaattcaccaaatgcgccaggaggcggaaaaggatatccgcgagcgcagaagcgaggttcagcgtcaggagcacaggctccagcaaaaggaagaaacacttgacagaaaaaccgataatattgaggcaaaggaggaaaagctgagtgcgcgcgccaaggaaattgacgcaaggttagccgagtgcgacaagataaagcagagccagatggaaattctcgaaaaaatttccggctttaacaaggagcaggcgaaggcgcaccttttagagctgcttgacggcgagcttaaccacgaaaaagcggttaaaattctcgattatgagcagagacttaaagacgacgcggacagaattgccaaaaacgttataggtcacgcaattcagcgctgcgcggctgaccattcctctgaaatgaccgtttcggtggtatccctgccgaatgatgaaattaagggcagaattataggccgcgaggggcgcaatatacgcgcgcttgaagcggctacgggcgttgaccttataattgacgatacacccgaggccataaccctttcaagctttgacccgattcgccgcgaaatagcgcgtgtgacccttgaaaagctgattcttgacggacgtattcatcccggcagaattgaggacgccgtagccaaggcgaccgccgaggttgaggcgaccataaagcaggagggcgagcgcgccatgatagacgcgggcatccataacctgcaccccgaacttgtaaggttgctcggtaagctgaaataccgcacaagctacgggcagaacgtacttaaccattcgcttgaggtttgccacctttcgggacttttagcgtcggaattaggggcggacgttacccttgcaaagcgcgcgggtcttctgcacgatataggcaaggcgcttgaccacgagcaggagggcacacacattcagctcggtgttgaggcggctaaaaaataccgcgagagcgaagaggttattcacgcaattcaggcgcaccacggcgatgttgaggcgaagaccgttattgcctgcatagttcaggcggcggatgctatttcggcggcaagaccgggcgcgagacgcgaaaacatagagaactacattaaacgccttgaaaagttggaggaaatcgccaattcctttaacggcgttgagagctcttatgctattcaggcggggcgcgaaatacgtattatcgttaagcccgaggctgtaaccgatgatgaaatggtgcttatggcacacgatatttcggcgcgtattgaaaacgagctggaatacccggggcagataaaggtaaacgttataagggaaagccgcgcagtggattatgctaaataattgcgcgtgccgattttctcggcacgcttttggacgggaatgccgttcgcaaaaatcagagatttttgactgcactctatccccgccaataccaccccagtgctcttgaaaaatagctcaaaaagctatttttcgcttacaaggtgtttttccgccgcacctgtcagcggaaaaacaaaatgtagagcctgcacagcaggataataaatttacattttgataatatactaatagtttccacctgttgcaaaaacttaaaaaaagtggtacaatactccttgtcgtatgacagggggtatttttttatgcagcttaaaattcagaacggagtggttgagctttcgggtcagccgatactttcctccgttaatatagagataaacgatgcaagccgcatagccgtagtcgggcggaacggctgcggaaaaacaacccttttaaagcttatttcgggcgaatactcccttactaaacgggacagcgacgaggacagcttttttgcagtatcgggcaagccgcgcataggcgttttggatcagatggtttttgacgatgaggaaagaacgctgaaggacgagatacgctctgcttataccgatattttggaaatgaagaaaagacttgccgcggcgcagaaaaaaatggaaaacgagcagaccgatgaaaacatacgggaatacactaccctgcttgacagctttactttgtgcggaggcttttattttgaaaaggaatacgaggcggcgctaaagcaattcggctttaccgaggagcagaaaagccgcccgctttctgaattttcgggcgggcagcgcacccgcatagcctttttaaagcttttgctttcaaagccggatattctgctgcttgacgagccgacgaaccaccttgatatttcggcggtggagtggcttgaagaatacctttcaggctataaaaaggcttttgtggtggtatcgcacgaccgaatgtttttagataacacggtgaataccgtttatgaaattgagcacggcaagacctaccgttacgcgggcaattacacgcagtttaccgtggctaaaaaggagctgcgcgagcggcaggcgcgggaatacgaggcgcagaaaaaggaaataaagcggcttacggagcttgtggaaaaattccgctacaagcccacaaaggcggcaatggcgcaatcaaagctaaagcagattgaacggatgaagcccatcgacgcgcccgaggcttacgacctgcgcacattccgcgccgattttgagccgtcagaccccggcgtgaaagatgtgctttcggtagaaaaacttaaaataggctataccgaggttttatcggaggtgagccttgaagcaaagcgcggcgaccggataggaattataggcggcaacgggctggggaaatccacctttattaaaaccctggtgggtaagacccccgcgctcggcggcgtttataagttcggacccagagtgaatataggctatttcgaccagcaaaccgcgctttattcaagcagcaaaaccgttttggatgattttatgggcgcgtttcccggaattaccgattttgaggcgcgcagcgcgctgggtgcatttcttttcagcggagagacggtgtttaaaaccgttgatatgctctcgggcggcgagcgggtgcggcttgcgctttgcaaaatgtttaagcgcagaccgaatttcttaatactcgacgagcccacaaaccatatggatatagtgggcaaggaaacgcttgaggatatgctgctgaatttttcgggaacggtgctttttgtctcgcacgaccgctattttataaagaaaattgcaagcagccttatatcctttgagtctgacggcgttaaatactacccctacggctacgagcaatatttaaacagcaaaaaagcgccgacagcagtacccgaaaaacaggttgaagtaaaggaaaagcctaaaaaaagctttacaacgccccttaaagagcgctcgcggcttgagcgcgcaatagcgaaagccgaggaaagggtggcgctgcttgaagaaaaaaccgacggcttgaggtgcgagctgggtatggaggaaaacgcatcggattatttaaagctttccgaaattaaagaagagcttgacgaggcggaaaccgagcttgataccgctatgaacgaatgggaaaaattaaacgccgaatatgaggcgctgataacttccgacaattaaaaaatttaccgaaacgaggaaaaagtatgaatatatggcatgatgtatccgaaagccgcataaaacccgaggactttctggcggtaatagaaattacaaggggcgataagaagaaatacgagctggataaggaaacgggctgcataattcttgacagaattttgtatacttcaatgcagtaccccgcaaactacggctttattccgcgcaccttggcggacgacggcgacccgctggacgttttggtgctctgcaacgagcctatcgacccgctggtgctggttgagtgctacccgataggtgtgcttacaatgctggacggcggcaaaaacgacgaaaaaattatagcaattccttttaaggacccgacctataatgactaccgcagcgtgcatgatctgccgagccatttgtttgacgaaatgcggcactttttctcggtttacaagcagttagagggcaagcagaccgccgtggacgaaataggcgacagggaaagggctgttgaaataattacacgctgcataaattgctataacgaaaaatacggtgacaaaaaatgatttttaatttaagctgtgcggtaaacgccgcgcagactatcggcagctggtatccgtcccttaaagcggtgtatgccgcaataggcgcggtactttcggctatggtgctttacagagtagcctataaaataatcgggctttttttcacgcggaaatttgcgccggcgaagaagcagcataaatacgccgtggtaatagccgcgcgaaacgaggaaaaggtaataggcaacctgcttgacagtataaaaaagcaggactacccgcacgagcttgtaacggtttttgtggtggcggataactgcaccgataaaaccgcggctgtggcgcgcgagcacggcgcaatttgctacgagcgctttgatgacgagcataaaacgaagggctttgcgctgcaatttctgtttgaaagaataggggaggattacggcagacaaagctttgagggatattttgttttcgacgcggataatcttttaaaatcggattatatatcgcgtatgaacgacgcgtttgacgcgggcgagaagataattacctcttaccgcaacacaaagaattttgacgaatgttggatagcctctacatacgcgctgcactggctgcgctctataagggcgaaccaccgcgcgcggtctgttttaaggcttgcaacaaacatacagggaacgggctttcttttttcaaatgaaatagtgcgcgacggctggaagtatacctctttaacagaagaccgcgcccttaccgccgatgcggtggcgcagggctacgccataacctataacgacgccgctgaattttacgacgagcaacccacaagccttaaaatagcgctgcggcagcggctgcgctggtcaaaggggcatttgcttgcctttgccgaaacagggccttacctgcttttaaacgtgttttgcggtaagcattttttaaaaacgcgctggcaggatgataaaaaagaaaagaagaaaaaaggctttaaggatatttgtaagggctttttggaatcggtaaggcaccgctttgcctcttacgatacgcttatgcagctaacgccattttcggttataaacattgtgcgctggcttttggtctcggtaatagcctacggcttttactgctatgcttacggcataggcggcgcggcggtatttacccgcggcacctacctcgggcggtttttgcgctttttattccctattgaaataaccgtttcttcgggtcttcaggcaatggcggtgggtatgctgctggcggtgtggcttagaattttatacaggctcggcaaataccttgaaaacacggctgctgcaatttacatttttattgtggagcataagcgcattaaaaaaatacccttttcaaaaatgctgctttatattttcacctggcccacctttgatataatcgggcggtacacccagtatgtggcgctgtttaaaaaggttacctggaagcccataccgcacgaaagcaaggttacaatagacgatattcacgagtcgggcgaaacaaaagaaaccgcgaatgtatgataattaaagtctaaaccggaaaaacgctttttctcttatataggtttattacccttttgcccctatcctcggcaagtcttttaaaatctgccgcgccgccggggccctccacataggtgactaccgtatcggcataccgcagcattatattattgcgttttactattgcaaagcgcagcggagtttttatcagctcctcgggaaaaattgtttccgaggggctgaaattttttatatcctttttacgcttttctaaatatgccaaaacaaccttatagcttataaaaggatattcggtctttagctccttcaaggtatcgtataccatccaatcaaagctgccctcattgccgacgtaaaacatatccgctctgtccttttcaataagctcccgcagggtttctttaagtaaaggttttacactgtcgggcgtgcgcctgtgcccgaaaaatgttacggtcatatttatttcccctcaatattttttaaaaatatattaagtggatattttatatctactctgtcaacattataacacgcagatactttaaaatcaacgttggataataaatatccaattgagatgcttgagggtgtaaaatatggcgaaaagtctttttcttataaaagggaatatttgcgcagagcgtgtcaggctgggcagagcattgcaaaagccgcctatgacgcaggatgacttagcacgcaagatacaatttatgggtatggatatgacgccgcttattatttcgcgtatagagaaaaatcagcgccatgtgtgcgatgccgaactcagaatacttgcaaaagcattgggtgttacaatggactggctttgcggcgacagtgacgagattaaaataaactgaggttattttatggttacgaagagtttatcaatatgaaatacaatgagcttgcaacggtttcgggcgtaacgccgtcaactgtttacagccttatggacgcaagccgtaaggatttatcggtaattacgctgaaaaagctttgcgacggacttgatatgacgataacggagtttttcgatgatgagctttttaaaacgctcgaacaggaaatcagatgaaaagaataattgatacggagaatgtcaatataatcggtgcacggataaaaattgcaagagaaaatgccggaatgagtcaaaaacagctttcggaaaagctggaattagaggcggtatatacctgctgtggttcaatttcaagaattgaaaacggaaagcgtgccgtaaccgatatcgaaatagacgcaatttcaaaaatactgaacgtatcactggatttcctatttggcagggagtgacaaatatggcgaaaggtctttttaataacacaccgacggcatagtttccacgaaacaaaaaagaactggaccgcttgcggttcagctccttttcatctgtcaatattatatgcggcataaaatcatgcagaaattcagcctcccttgccttaaagggaggggattgtgctatataccgttaatcagctttttaattgcttcggcggcggcggtaagccccgcagcgccgggcacgggcgccatactggcggggcttaccctgccagtgctgcggtattcgccgcaattctgcggctttatgggcggctcgtcgctccaaacggcggtaacccccgaaacgccgcgttttttaagctcatagcgcataacccgcgctaaggggcaaacgcttgtttttgatatatctgtcaccctgatgcgcgtggggtcggttttattgcccgttcccataacgcttatcagggggatttttcttttatacgcctgctctgccaaaaaaagttttgcggtcacgttatccaccgcgtctatcataacgtcgaatttttcaaatggtatttcgctttcgggcgttataaattcgcaaacgggaattatattgcactcggggttaatatccctgtaccttgcggcggctatatcggtcttgtttttacccactgtggaattaagcgctataagctggcggtttatgttgctttttgcaaccgtatcgttatcgtaaatataaaccgtgccgagccctgagcgcacaagcgcctcggcggcatacgaccccacgcccccaagcccgaaaacagcggcggcggagtgtgaaagcttatctattcctttttcgcctataagcgaggcggttcttaaaagttcttcgcgcatatcacagctccaagtatttaataagatatggtatctgcgtttcaaagtccaccccgaagcgctcttcgcggttatcggtaagcgccttttttatgcagcgcgcggtgaaattagccgctatctgcgcggcggattttaagcttcggtcgcgaagatatgcggcggtaagcgtgcttgtaaaaatatcccccgtgccgtggtaagccacgggaacgcgctcggcaaatacatatgaggcggtttcgccgtcaaaaacggcggcgccgatttttctttcgtcaaagctgacgcccgtaagcacaatatcggcgtgggtcttcaaataaagtccgcctagcagcgcctttatataatcttcatcatacggcggctccttatattcgcaccccagcataaggcaggcttcggtaatattaggggttataatatccgccgcggcgcataatttcagcatataatcgggaaaatcaggctcaaagccgcggtaaagcctgccgttatccgccataacggggtcggctataagctttgtatcggggcggcttataaggcgggcggactccagcgccaaataaatctgctgctttgagcacaaatagcctgtataaaccgcgtcggcggttatgccctcctctttccagtggcgggctatggctaccatatcggtcgacatatccttaaatgtataatttttaaaaccgcccgtgtgggttgaaagcaccgccgtgggaataacggcggtttcaattcccgctgccgaaattatgggcagcgcgaccgtgagcgagcatttcccgagacaggaaatatcgcttattgcaacaactcgcttttgcaagctatttcactcccttttcaggacaaaaactttcaagcggacaaatttcgcagtgcgctttacgggcggtgcatatatccctgccgaaaagcaccgcgcggtgacaaaacgcgttggatttttcgggcggcagcagctttcgcatttcggtttcaaccttcagcggcacggtcgtattaaccagccccaagcggttgcagagccttataaaatgcgtatcggtaaccacggcgggcttgccgaaaatatctccgcacacaaggtttgccgtttttctgcctattccgggcaggcgggtcagttcttcaatagtatcgggtactttaccgccgtactgctctgtcagcattttgcctatgccgcaaaggtcctttgcctttgttttgtaaagcccgcaggttttaataagctcctccacccgctttatatcggcggcggcgagtgtctcgggcgtggggaactcggcaaaaagcgcgggagttaccatattcacccgcttatcggtgcattgcgccgaaagccgcgttgcaataagcagctgatacgcgtcggtataggtaagggagcacacggcgtcggggtagagcctttcaagacccgctaccgccctttcggttatttcttttttacgcatttgtaggctccagctttaaatcgccctgctttataagccccaatttgcgcatgccctcggcaatggcaagggtcacggcggcagggagaataaagtgcataactattatttcaattattgtaaccgcgggtgaaaagcccgccgcggtcatactgtcatacgccataaactgccccacaagccccgaggagcccatacccgagcctacggggttgcttaccattttaagcaccgccgaggaaatcggaccgagtatagcgcttgaaagcacgggcggcagccaaagtataggcttgcgcacaaggttcggaacctgcagcatagaggtgcctagcccctgggctataagcccgccgagcttattttcgcggtagcttataaccgcaaagcctaccatattgcagcagcaacctattgtagcggcgcctgcggcaagcccggttattcccattgaaatgcctattgccgccgaggaaatgggcagggttaaaataacgcccataagcgccgaaatcgcgattccgcccaaaatcgggctgttttcaacatttatattaacaagctcgccgagccacttcatagccgtggaaatgtacggtcctacaaaatagcccgcagccgcacctgccaaaatgcagcagacaggcgttacaattatatccacctttgttttgcccgaaaccagcgcgcctatttcaatagctatgtaggcggctataaaagcgccgagcggctcgccgggcgcgcctattttaaacgcctcgtttgcaaggttggggaaagcgcctatcatacccgtaacccccgcggctaccgcaaccagcggtgaagattttaatttgcaggcaacgcccacgcctatgcccgcgcccgtgagcgtttttgcaacgctgcccatggcgttcaggtatgtacccacaacgttaccgcccacaagcttacctatttggcagataatagtgcctataataagcgtggaaaaaagcccgtagctcattccggaaagtccgtctataaaaaggcggttaagatattttttcataattttccccttctccgcaatagtattacacttattatactaaaaaaaattaaaattaacaatagtgaataccccgaatttcagggaaaatactaatgatattatgataatattatcaaggcataaacggaggtaaaaatatgaaaacagtagcattcttcgatgcgaaaagctacgaccgcgaaagttttaaacgttttgaggacgaggacataaacatcagattttttgaaaacaagctgaacgccgacaccgtgagtatggcggcatgctgcgacggcgtgtgcgtttttgtaaacgatacgcttgacagaacggttattgaaaaactggcggaatacggcgtgggagtaattgcgctcaggtgcgcgggctataacaatgtggatttaaaggcggcggcggggcgcgtaaaggtggtaagagtgcccgcctactcgccctatgccgtagccgagcacgcggcggggctgctgctaattttaaaccgcaagctgcacagggcgtatataagaacccgcgaccataacttctcattagaggggcttatcggctttgatatgcacggcaagaccgtgggaattataggcacgggtaaaataggcaggtgctttgcggatatttgcaccggcttcggaatgaatattttgggctgcgacccctacgaaagccccgaatttaagggcgaatacgtcacgcttgaggagctgctgcaaaaaagcgatataatatcgctgcactgcccgcttacaaaggaaaaccaccacctgataaacgaaaacacaataaatcaaatgaaaaacggcgcgtatattataaacacctcgcgcggacagctgatagacacccaaagcctgatagcggggctgaaatcgggcaaaataggcgcggcggggctggacgtttacgaggaggaaaccgagcttttctttgaagattactccgaggaaataatccccgacgataccctatccaccattatttcaatgccgaatgttattgtcacctcgcaccaggcgtttttgacccgcgaggcgctcgacggcattgcgggcactacaatggaaaacctgcgcgctttctttgcgggcgaggagcttaaaaacgaggtggggtaaaaaatttgactcccccagagcaaagtccgatttataggacacacaagtctatataataaagaaaaagaataaaaaaagacttgacaaatgtcgaatttgcgattataatatcaatatcgaacatttgttcggagggagaaattatgaatttatcaatgcttttaagaacagtttttgaaatagctatgtttgccgccgtgctttggggaattttccatgaggacaggctggcagcatttgaaagaaaaatagcctgccttgttcgccgccgcagacttaaggtaataaaaggctcgcgcccggagtcgctttgcaacagcgcggaagggtaaatatttaatgcggaattaacgatttataacagcaaaccctaaaatttaaccccgatagttgtcattttaacgataactaccggggttctctgtttattattccgaattccgcattacgaattccgaattactttgtcataagctcgcaaacaagtgcgctgtgctcggcggggtcgggcacgctcttgccgcctattaagcacgcctctccgtaaagcagctttgcgtatttaccgagggtatccttatcctcggtataaagcgctttcagcttttcggcaatcgggtggtttgcatttatttcaagcacaagctgcgcctttactttattctgctccgctcccggcatagagtttagcaccttttccatttcaagcgaaattccgccctcgcttgtaaggcatacggggtgatctttcagcttgtttgtaaagcggacggcgtttatcttgtcgccgagactttctttcatagcctcaaacatatccttggcggcggtgttttcctcttcaagcgctttcttttcgtcctcgctgtcgagattcaaatcgttatcgcaaatatttacgaactttttaccgtcgtattccgccagcattttaatggcaaattcgtcaacgttttcggtaaggtaaagtatttcaaagcccttatcctttaccgcgtcggtctgcggaagcatatcaatcttttcgtctgtctcgccgcaggcgtagtaaatagagtcctgaccctctttcattctgcttacatactctttaagggtaacatacttcttctcgtttgaggagcggaaaattagcaggtcgcgcagggtttccttatgtgcgccgtaatcgttgtaaatgccgaatttaagctgtatgccgaacgctttaaaaaattcctcgtaagcctcgcgctcatccttgagcattttttcaagctccgattttatcttcttttcaagggtcttggcaataagctttagctgcccgtcgtgctgtaaggtttcgcgcgaaatattgagcgagagatcctcgctgtcaacaagcccctttacaaagctgaaataatcgggcagaagctctgcgcacttatccattataagcacgccctttgaataaagctgcaagcccttttcatattcctttgtgtagtaatcaaacggcgggtgcttaggtataaacagcagtgcggaataggttgcctgaccctctgtctttgtgtggataacgcgggcggggtcatcataatcgtagaacttttctttatagaaattgttgtaatcctcgggctttatttcgcttttctgctttttccaaagcggcaccatactgttgagggtgcgtatttccgtaacgtccttgtattcggtgggcttatcctcctcgccttcctttttcggtacaggttctttggttgtaaactccatacggatcgggtggcgaatgtaatcggaatacttctttacaagcgcgcttattctgtattggtcgaggaactcatcgtaattatcgtcaccctcgttttcctttatgtgcagggttacagtggtgcccaccgtttccttttcgcagggctcaaccgtgtagccgtccgctcccgatgaggaccagcgaaaagcctcgttcgagccaaaggcgcggctttcaaccgttaccttatcgctcaccataaacgccgaataaaagcctacgccgaactgacctataatatcaacgttttcctttttctcgttttcctgcttaaaggcaagcgagcctgattttgcaattgtaccgaggttcttatcaagctcgtcctcggtcattccgcagccgttatcaattattttaagggtgcgggcgtccttgtctatttcaaggcgtatttcaaaatcatcgggcgctatacccaccgaattatcggtaagcgagcggaaatagagcttgtccagcgcgtcgctcgcgttggaaataagctcgcgcaggaaaatttccttatgggtataaattgaatttatcatcatatccataagctttttggattctgatttaaactgtcttgtacgcataaatttatcaccttttttgagagtttgactttaactgacatatagtatagaacatctgtcggcttctattgttaataaattgttaataatatattaaaatgtattgttgacttgtattttaaaaatgctataataaccatataacactatcggaggtaatatttaatggagcttaaaggcacaaaaataaactttctcggcgacagtataaccgagggtgcgggaacctcctcgcacgataaaatgttcacaatgttaattgagcgcgaatacggcgcaatatgccagaattacggcataggcggcacacgcatagcaaggcagaaaacgccgaccgaggaaaaatgggacagggattttatatcccgcgtgcccgaaatggataatgacgcggatatagtggtggttttcggcggcactaacgatttcggccacggcgacgctccgataggcacaatgagtgaccgcacgccatataccttttacggcgcgctgcactgcctttacaccgcgcttatcgagaaatatcccggtgtgccgatagtggtgctgacccccctgcacagaataaccgaggatatacccacgggcgataataagcccgcgcctgtaggaacgcttaaggaatttgtaaatataatacgcgaggttgcagagtattactcgctgccggtgcttgatttatttaaagagagcggcttgcagccgaaaattccggtaattcagcagaaatatgttccggacggactgcacccgaacgacgccggcaacgagattttagcgcataaaatcgcgcgttttcttgaaatgctgtaaaccgataaattaagagtataggtcttgcacgaaaaaatggctcccttctgttttgactatgcgtcaaaaagaagggagcctatggttttcacacaaaaaattccgctttacattgccctgaaattatctacggtaacgccgtcggcgttttctattgtgatattttcctgctctattgcgtttataaggtgcgcgcctgttacccattccgatgcgaacacgcggttttgcgggcggaggtgctggctgaaagggcgcatatgagcgtcggcagatttcagcatatttttaaggaggttgcgagcgtatcacccgcggaatataccgaaaaaatgagaatagcccgcgcgaaggaactgttttccggcggcagctgcgatatttcggaaatagcctttaagtgcggattttcggagcacagctatttttcaaagcgctttaaaaaatataccggcgtaacgcctaggcaaacgagaataatccgaacccgttttttgagcgtggatttctcgcattgccgcgttaaaatactcgttaatccgttaggattaactgcgttttgtgcctcgctctgcaaaaaatccgctcctcaaaaaatctgcgacccaaaacgagcgtgattttcgtgtggatttttatgcggaggatgcgataaggctttcaccttataaagacgacaaatgaaaatacgccgaaaatacgccgttttgggcgggttcggattattctcgtttgcctaccgcctataaaacagccgagcgggaaaaattaacggttgacaaacatatattatatgatacaatataaacagaactgaatattatccttatcaagagcggcggaggggaccggccctgtgatgcccggcaacctgatttttaaatcaaggtgccaattccggcggattatccgaaagatgaggctttttataccgtctcgtccgaggcggttttaattttttgaaaaaagaggaatttaaaatggcgaaaatgctttttacatccgaatcggtaacagagggacaccccgataaggtgtgcgacggtatatccgacgcgatactcgatgaaattttaaagaacgaccccgacgcacgcgttgcctgcgagaccttctgcaccaccggcagcgtgaccgtaatgggagaaataaccacaagctgctatgttgatattccgcagatagcgcgcgacgtggtttgcagaatagggtacgacagcccatccgccggctttgacggcaatacctgcgcggttatgacggcgatagacaagcagtcgcccgatatagcgctgggcgttgataattcacttgaatacaaggacggcgaggaggacgaatacaacctgcgcggcgcgggcgaccagggtatgatgttcggctacgcctgcgatgatacgcccgagcttatgccgctgcctatttccttagcgcacaaaatggcaaagcggctgaccgacgttcgcaagagcggtgagctcagctacctgcgccccgacggtaagacccaggtcacggttgaatatgacgacggacaacccgcgcgcatagaggcggttgtggtgtcatctcagcacagcgccgatattgatttatcaaagttaagggcggatatactcgaaaaggtgataaagcccaccgtgccggcagagctgcttgacgaaaacacaaaaatatatattaaccccacgggccgctttgttgtgggcggaccgcagggcgacacagggcttaccggcagaaaaattatagttgatacctacggcggctttgcacgtcacggcggcggcgcgttttcgggcaaggaccccacaaaggttgacagaagcgcagcctacgccgcaaggtatgttgcaaagaatattgtagccgcgggcattgcgaaaaaatgcgaggtgcagttagcttacgccataggcgtggcgcacccggtttcggtaatggttgataccttcggcacgggcatataccccgatgataatatagccgaggcggttaaaaaggtgtttgacctgcgcccctccgctataatagataagcttgaccttaaaaagcctatatacagcagcctttcggcatacggtcatatgggcagggaggacttaggcgtttcctgggagaaaaccgataaaacggaagagcttaaaaagtacttgacaaaataaaactttgtgttataatggaataacaatgaagcagtacgtttattcgtcctcaccccgagcgagaagcgatagggtcaataaaagttcagacttatgggtttggtatttttatgcgcgggcgaaaattcgtccgcgctttttgaattgcagcaacgcgaattttggaggtgcattaacatcagcagcaaagagctttccgtaaatgaaaacatcagatttaaggaagtccgtacgatcggctcagacggttcacagttgggaattttaccgattgccaaggctttggaagcggcgtatgccgccgatctcgatctggtttgcatttcgccgaacgccgccccgccggtatgtaagataatggattacggtaaataccgttttgagcaggcaaagcgcgaaaaggaagccaaaaaaaatcagaaaacggttgaggttaaggaaataaggttaggacttagcattgacgttcacgattttgagaccaagggaaaacacgcaatgcgttttcttgacgagggcaacaaggtaaaggtttctatccgtttcagaggcagagaattgggtcacccggaaatagggcttgaaacaatgcgccgcttcgcggaatattgcgcagaccacggctcggttgaaaaggctgctaaaatggaaggcagaaatatgctaatgtttttggctccgaaatcgggtaaataattgcagttgaattatatcagggaggacttacaatgcctaagatcaaaacacacagcggcgcgaaaaagcgctttaagctcaccaaaaccggcaaggttaaacgtgctcatgctttcaagtcgcacattctcaacaagaagaccacaaagcgcaagagaaatctccgcaaggttgttacggctgacgtaaccaacgtagcgaagatcaagaaaatgattccttataaataaggtacgactgaaatcggaggttagaagatatggcacgtgttaagggtgcgttagcaacacgcaaaagaagaaaaaagactttaaagctggctaagggctatttcggcgctaagtcaaagctttttaaaaccgctaaagaagccgtaatgaaatccggcaactatgcgtacatcggccgcaggcagaaaaagcgcgatttccgcagattgtggataacccgcatttccgccgcctgcaagctgaacggtattaactattcccagtttatgaacggccttaataaggcgggaataaccatcaaccgtaaaatgcttgccgaccttgcggttaatgacgccgcgggctttaccaccttggtaaaggctgccgttaaggctctcgaaaagtaatttttttcgcccggggtttgctctctgggcgaatttttaatattatgaaagggtgcggtgccgattgtatggctttaaaaaagttacaagcagagaaaatccacttatcaagcttgtttcctcgctccagaaaagcgctgccgcaaggcgcgaaaacggtcttttcgtgctggaggggctgcggctgtgtacggacgcgtgcgataacggaatcaggtttgataagttgatcgtctcattttcggcggcggaaaggcacgccgagaaaattgcggcatttgcaaaaaatgccgatgaccgtatagccgttcccgacgcgctttttaagaagataggcgataccgaaaacccgcagggaataatagcgctttgcaaaataccgagaaccgagaacataaatattaaaaagaacggtaaatacgtcgctttggaaaatataaacgaccccgcgaatttaggcgcaatatcccgcacggcggaggcgctgggagcggacgggcttatactgtcctcgggcagctgcgacccgtattcacctaaagctatgcgcgcctcaatgggaacgcttttgcgtatgccgatttttgttttcggcgattttgcggcggaaatgaaaagctgcgggcttaaattttacgcctgcgtgccgtcttcgtcggctgaaagcatttcaaatgtaaaatttttgccctgctgcgccgtaatgataggcaacgaggcaaacgggcttaccgaagaaacaaaggcggcggcgcataaaaaaatcaccatacctatgtgcggcagagccgaatcgctcaatgcggcggctgcggcggcaatagctgtttgggaaatgatgaaatgattgaataccttatctggctgcaaacagccctcggtgcgggaaatccgcgcggggcgcgggcgctcgataatataggcagcgccgagcaaatttacaaaatgaacgataccgagcgcaggcaaagcggtattttcacgccgaaagaccttgaaaggctgcgccttacgaaattgggcgaagcaaaggcgatagaaaaggaatgtcgccgccacgggataaccctgcttgcctacggggataataaataccccgaaaagctgagggtaatagccgagccgcccgttttgctttatttaaagggcaagctgccgaatatggatgaaacgcccgcggtttgcattgtggggccgcgaaaatcaagcaaattcgggcagaaagcggcgtattcactgggttaccgtttggcatcagccggaatgacggtggtaagcggcggagcgcgcggcagtgatttttacgcccacagcggcgctttaaaggccgagggcaaaaccgtgcttgttatgggctgcggaatagaatcggactacctgcccgaaaatgccgcgcttaggcgcgccgtgtctgaaaacggctgccttgtaagcgaatacccgccctttgagggcgcctcgaaatacactttccccgtgagaaacaggcttatgtcggctttagccgacgcggttattataaccgaggcgggcatgcgcagcggcgcacttaacacggctaaccacgcgctgaaccaaggcaaggaaatttttgtaatacccggttcgcctgcggacgaaaattacgcgggctcaaacgccttgctccgcgacggcgcacggccgctgcttgatataagcgatattttgaatgaatatctgccgcggtaccccgataaaattgatattgagaaagcaattaaaaagcgggcaaaacccgtggaagaacgcgctgcgaaacccgaaaaaacggaagttcacaaaaaattatcaattgaaactctttcaaatgaggcgaaaatagtatataatcaattgaataagcctatattttatcccgatgagataaatacttctttagagccgggcgatattttatcggcgcttaccgagcttgaaatagaagggcttatacgctcgctgcccggcggcaggtacgagcttatcaacaactgaagacggaggaaggaaatgtctaagcttataatagttgagtcacccaccaaggtgaaaagcataaaaaaatatttaggcggcggctatgaggtaatggcttcaatgggtcatgtgcgcgatttgccgaaatcaaagctgggcgttgataccgagcacgattttaaaccgcagtatataaatatgtcggacaagaaggacttaataaagcagcttaaaacggcggcggcaaacagcgacggcgtgctgctcgcaaccgaccctgatagagagggagaggcaatatcgtggcatttggcatatttgctggcgctcgatttaaacgagcctaaccgcgtagcctttaacgaaattaccgaaagcggtgtaaaggcaggcattgccgcaccgcataaaatagatttgaaccttgttgacgcgcagcaggcaagacgcgtgcttgacagaattgtgggctataagctaagcccgtttttatggaaaaaggtcaagggcgggctttccgcgggccgtgtgcaaacggtggctttaaggcttattgtagagcgcgaaagggaaattgaaaagtttaattccgaagaatactggagcgtagacgcaaagctgcttgccggcacaaagagctttaaggcggctctttacggctttgccgacggtaagaaaatagatgttattccgaacgcggaagaagctgacaaaatagtatcggcgctcggcggtgcggaatatatagtatcggcgcttaaaaagggcacgcgcaaaaagcagcccgcgccgccctttataacctctacccttcagcaggaggcttcgcgcaaattgggctttacgggtcagcgcacaatgcgcattgcgcagcagctgtacgagggcgttgacgttccgggagcgggcacaacgggtcttataacctatatgcgtaccgattcgctgcgtatttccgaagaggcgcgcgcggcggcttataagtatataacggggcgctacggcaaggaatatctgcccgaaaagccgcgttatttcaaaacaaagagcggcgcgcaggacgcgcacgaggctatacgccccacgtcggtcagctttacgcccgagtctgtaaaggacgcgcttaccgccgagcagtataagctttacaagcttatttgggagcggtttatagcatcgttaatggaggtttgcgtgcagaacaccgtaaacgccgatattaccgcaggtgattatttatttaaggcaagcgggtattcggtcaagtttgacggctttaccgtactttacgaagagggcaaggatgaagacagcgccgagggcggcgcactgcccgaaatgaaaacgggcgataagctgaaattaaaggaactgacccccaaccagcacttcacgcagccccctgcaagatacaccgagccgacccttattaaggcgctcgacgaaaacggaataggcagaccttcaacctatgcgccgataatttccaatatattggggcgcgactatatagagcgcgagaaaaagagcttaaagcctaccaatctcggtatggtggtctccgaccttatggtggagtatttcgataagatagtggacgttaagttcaccgcggggcttgaaaagcagcttgacgaaataggcgcgggcaagcgcggctgggttgataccataaaggatttttataaggattttgataagctttataaaaaagccgaggactctctcgagggcaagcgcgtaaaggtgcccgatgaggaaaccgacgtaatatgcgataaatgcggcagaaaaatggtggtaaaatcgggcaggttcggcaagttccttgcatgccccggctaccccgagtgcaaaaatacaaagcccatgcccgaggacgaggttaagcagccctgcccgaaatgcggcggcaagcttgttaaaaaaacctctaaaaagggcaagaaattttacggctgctcaaattaccccgagtgcgatttcgcagcccccggcatacccacgggcgaaaaatgccccgagtgcggcagctttattataagcggcgttcgcggcagaaaatactgtatgaattcggagtgccccacaaggcagaagaaagcggataaaaaaacggatgaataaactgactgtaataggcggcgggcttgcgggctgcgaggcagcctatgccgcggcaaaccgcggcatagaggtagagctgattgaaatgaagcccgccagaaagaccgcggcgcacaaaagtgattatttagcagagcttgtctgctcaaattcgctgaaagccgcgcgtgtagattcggcggcggggcttttaaaggaagaaatgcgcaggctcggctctgtttgccttgctgcggcggataaatcggcagtggcggcaggcggcgcgcttgcggttgaccgcgatattttttcaaggcttataaccgaaaaaataaaaaaccacccgaatatcaccgtgaccgaaaggcttgttaccgaaataccgcaaggcggcgttacggtaatagcgacaggacccttaacggacgataaactggcggaaaagctggcgggactttgcgagggcggcaatttaagcttttacgacgccgccgcgcctattgtaacggcggaaagcgtggatatgagcaaggcgtttttcgcctcgcgctatgataagggcggcgacgattatataaactgccccatgaacaaagaggaatacaccgccttttatcacgaactgataaatgcggaatccgccccactgcacggctttgataaagcgcccaatgtgtacgagggctgtatgcccgtagaggtgctggcaaagcggggcgaggactcaataagattcggaccgctaaagcccgtgggtcttcgcgacccgagaacggggcaccgcccgtgggcggcggttcagctgcggcgggaaaatgcggcggctacccttttcaatatagtcggctttcagaccaaccttaaattttcagagcagaaaagggtattttcaatgataccggggcttgaaaacgccgaatttatgcgctacggggttatgcaccgcaacacatttataaattcgccgaagctgttaaaccgcaatttatcacttaaagcggataaaaatatttttattgcggggcagctttcgggcgttgagggatatatggaatcggcggcaagcggcataattgcgggaataaacgcggcggctgaaataacgggcgaaaagccccttgttttacccgaaaccactatgacaggcgcgctgctttcatatataacaaacccgctgacggataattttcagcccatgggggcgaatttcggaataattccgccgcttgaaacccatataagggacaagcgcgaacgctacgcggctttggctgcgcgggcgctcgggatacttgcggataatataaaaacggaggaaatttgaaaatgcgtattgcagttgacgctttcggcggcgataacgcgccgcttgaaataataaagggcgcggcgcttgccgcacgggaatattcggtggatattacccttacgggcaatgaaaaaaccataagggaaataatagcccgcgagggtcttgaatttgcgggcgaccttaaaataattgataccgacgacgtaatttcaatgcacgacgagcctacatcgcttgtgaaagcccacaaggaaagctcaatggcaaaggcgttttacgagttggcggagggcagagccgacgcctttgtttccgcaggctcaacaggcgccgtggtagtgggcggcacgcttatagtaaagcgcattaagggcataaagcgccccgcgcttgcagggcttattcccgcgccgggcggtacatatatgcttatggatatgggcgcaaacgccgattgccgccccgaaatgctttgccagttcggggtaatggcaagcgtttatatggaaaacgtggagggtaggaaaaacccgaaaatagggcttttgaatatcggcacggaggatacaaagggcggcgagctgcaaaaggcggcatataatcttatgaaagaggcgcccataaactttgtgggcaatatagaatcgcgcgaaatgccaaagggcgtgtgcgacgcggttataaccgacggctttacgggaaatatcgccttaaagcttatagaaggcactgtttcaacccttttcgggcttataaagcaggtgttttacaaaagccttaaaaacaagcttgcggcgcttacggtaaagggcgatttaggctcgcttaaaagcatgatggacagctccgaggtgggcggcgcgccgcttatgggcgttcgcggcacggttataaaggcgcacggcaattcggacgcaaaggctataaagaacgcgataggtcaggcggtcaaatttaccgagaccgatgtggtgggtaaaatttccgcctcgctttcagaataaaaaagaaggaaaaataaaaatggaaggcttagaagaaaaattaggctataaatttaaaaatatcgatttgcttaaaaacgcgcttacccattcctcatacgcaaacgaggtgcgcgatggcttttcttcaaacgaaaggctggaatttttgggggattcggtgctttctattatagtatcggattatatttacaggcactaccgctccctgcccgag

SEQ ID NO: 4432 - DNA, 4497 bp, Unknown
  16S sequences of unknown bacteria
cgaattgataaaaagggcgttaggagaaagatatatcacaattgcagaaatgaaaaaacacgatgcagaatcagaagactgattctaacatcgtgtttttcccgcgccttttcatttccctgctgtgaatagtaacaaatatacgcatcctgcttgtgaaatgaagccgttttcactttacgggatgcgccgcttctgttaagatgaggaaaacacaggagggatagcgatggaaactaaccaggccgggatgcctcgcggatggacgatgctccccacagcggattcgctggattccaccaacacctggctcaagacacacgtggagggatgcgcggatcgcagcgtgctgatcgccagggaacagactgccggaagaggccgcaacggccgcgtatttcactcggccaaggaccgggggctatatctctccatcttgttgaaacaagagcaaagcacggcgcagctgaacaaagtgacggcgctcagcgccctggcgctgcagcgcgccgttatggaaagctgcggtctgctcacccagatcaaatgggtcaatgacctgtactgccgcggatacaagatcgccgggatcctgtgcgaagcgctgcgcaccaaggaacgcactgaagcgctcatcatcggcttcggtgtcaacgtcttctcccaggactttccggacatgacgggcaaccgcccgggcgccatcgcggacttcagccctgccccgccttccatggatcagctgatcagcgcgctgctgcggcagatcgacgactgtctccgccacctggacgatccaagatacatgcaggcataccgtgcatgctcctgcgtcatcaatcagcctatcctcgtcaaagagccgcatggaacatatgaagcctttgccgaggacatcgacgaacaaggccgtctcctcatccgctgcggcagcgagaaaaaatacctgtgcagcggcgagatcagcatacgccccatctcttcccgatgacccttgcctttcttcgatcagaagagaggcattttttcactgatcagcgatttcccagaaaacatgatcttcggatcttcaataacgaaaaagcccggtacgcccgggcaagaaactcaatataaataacaaaggaaagcgatgccctgcaggatgccggcaacagccacgaaaaggtgccagacgacatgggcataaggaaacggcttcttcgcatagatgaacgcgccgacgctgtaggcgatgccgccggctgccacatagagcagaaaaggcagcgaagcgcgctggatcagctgcggaagcaggatgatcacgctccatcccatgcacaggtagatcgccaaggacagcttgctgttcttgcgcttggcaaagatcttatagaagatgccgatgatgaccattccccactggaacacgaggaggccgatcttcatccagccatccatgatggcgatgactgccggcgtatagctgccagcgatcgccagatagatgcagatgtggtcaaagatgtgcaggacatcctttgcggccgatcccgccggcatggcgtgatacagcgcagacgccgtgaacatgcagatcatgcacaaaaagaagatcaggatgccgacgccggccaccgtgccctgcgccgcccatgtctgcggcacgccgatgcacatccagatgatgaaggcggcggccatgacgccgtgggtcaggacgttcagcttttcctcacggctcagttcagcgcgcatagacattcctctggatctcatcgtgcaggcgcgtcagcagctcttcctgcttgatctttccatactcttcatacgggatcggcttcccgtagatgacgctgatactgcggatatggctctttttctcatccagggcataacaatgcttcagcgtgaccgggacgatggcggccttgcccatataggccggctgcagcgatcccatcttgaacgcatgcatttcatcccccttggagcgcgtgccttccggaaagatgagcaggttcttgccctgcttcagcctgcgcgcgctctctctgagcatatgcacattgccctctctggtctcccggtcaaaatggatcgtgccgatgagctgcgcccaccgtcccagcagcgggatgctttcattttccttcttggagatgaacgcgagggggatcggacagctggccacgatcggcgcaggatccagcgtcccctgatgattagagacaaagaacagcgggccctgcgtcggaagttcctccgctccctgcacatgcagctcgaagccgaacgccttgatggccttgcggctgtatctctgcagcacgcggtaattcttttcccattcgtccatgctgctgcggcgggagatgatccacgctcccggcagaagatgtgccactctcagtatctgaaatggcgtcatgttatcacggtcctttcagtagcttattttgcgtcgctcagcgcgcacatgatctcgccgcgggcggccacttcgccatccacgctggcgcacacatcggcaaaatagatgccggcgcgctgattggtgagcttcacttccagcttcaggacatcaccagggatgaccatgcggcggaaacgcatcttgttgatgccggcgaatacgccgatcttgcccttgttctcttcacgggagagcagaagcacgcagccggtctgcgccagcgcctccacgatgagcacgcccggcatcagatgctgctgcgggaaatgccccagaaactgcatctcattggcgctcacgcacttatgaccgacgatgctcgtgccatcttccccgatgctgtcgatctgatcgaccagcaggaacggataacggtgcgggatgatcttctgaatgtcattggaattgtataccatggattactcctcccatttcgcaaataccagcgaagcattatgtccgccgaagcccagcgaattgctcatcgcatagcgcaggtctgcttcccggccctcattggccacgatgtccaggtcgcagtccgcatccggcttggcatagttgatggtcggaggaatgtagttttcctccaatgccttcaaggtgatgatcgcttcgatggcgccgcttgcccccagcagatgaccggtgttggacttcgtagaagacatcgccagatgatgcgcgtgctcgccgaacgccagcttgacggctgctgtctccgtacggtcgttgagcggggtgctcgtgccatgtgcgttgatgtagtcgatgtcctccggcttcaggccggcgtccttcaccgcctgtaccatcgctctggcgccgccgctgccatcttccagcggagcggtgatgtggtgagcatcgcaggtcgcgccatagccgattatctcgccgtagatatgggcgccgcgcgccttggcgtgcgcatattcctccagcaccaggatgccggcgccttcgcccatgacgaagccatgacgttcctgatcgaacgggatgctggcgcgcgtcttgtcctcgccctcgcacagggcgcgcatggacatgaagcccgcgatggccagcggcgtgatggccgcttcgctgccgcctgccagcatgatgtcctcatagccgtcccggatcttatggaatgcttcaccgatcgcgttgctggcggcacatgccgttaccgtggaagagcagtgccctttgcagccccagtcgatggcgaccgtgccggctgccagattgatgagcgtcatcgggatgaagaacggagagacacggctcggccctctgctctccatgtttttctgtgccgtctcgatcgtctcgatgccgccgatgcccgaaccgatcagcacgccgaagcgctccatatcctcttcttctgtattcagcctgctgtctgccatcgcctgcttggccgcgatgcgcgcaaactgggtgaagcggtcattgaacttcagctcgcgcttgctgaagtactgctccatatccagatccttcacctctgccgcgagcttgaccttatactcagcggtgtcaaaatgcgtgatcgcatcgatgccgcacttgttttcccggatgccctgccacagctcggcagcggtgttgccgatgggtgaaacagcacccatgcccgtcactacaactctgcgtttcatgtttacctcctacatggccattccgccatcgaccgaaatcacctgtccggtgatgtagctgctcttgtccgatgccaggaacactgccagatcggcgatatcatccgtgctggcaaaccgcttcatggcgatcatgctcatggccgcctgacgcgcctcttcgctgagcaccttcgtcatctccgtctccacgaagcccggtgcgatcgcgttgacgcggattcccctggctgccagctccttggccgtggacttggtcagtccgatgatgccggccttgctggcggcatagttcgcctgtccgatgttgccggataatccgaccacgctggacatgttgatgatcgaaccgtggcgctgcttcatcatgatgcgcgccacatg

SEQ ID NO: 4433 - DNA, 32759 bp, Unknown
  16S sequences of unknown bacteria
ggcccgcaacgttcccccgcagcagctcttccagcgtggagcggttcgcgtcgccggcttcgctcctgctctgccgcatgccgttcgcgtcatacgtgaacgcctgacggtacccgtcgtagcccacgtagttcgtcaactggtccagcgcgttgtaggcttagatgtccgtcagcttgccgtagctctggctggatagcgccttttcaaccatgcttccgttcttgtcgtacttgtaggcgattttgtcccgaccgttgaccatgctggtgagctggttgcccttgttgtacttcatcaccagcgtggtctccgccccgtccgtgccggtcgtatggttcgtgattattaggtagcggagcatgttgagaatctaagcgggatatgagactattgtactaatgcaaatttattttctcccgatatgtttatccgcttctatttgcaatagctttgtagcgggtcccatatagttttctgctttatgaagaatatcttgattattcccaatactttccaaaatcgtagtcgtaaagacatccaaaagatgttgttctccatatctgcataccctttcaaataaatcaaacatatcatgaataagattcaagtcctgattactttctagcaaatcaatgatataaggcatgaaaatgtcctctatcgcaactgtttccaaaactctcccatactgcgttttcatttcttcatattgcgatattgtttgtgggaataatttcaacatttcttgaaaaaagcaatctgattttaccatcatcattatatctcctaatcaaataatccaattgcatattgcaaatcatctcttaaagctattgctatatctaaatcatttgaacccagagtcccactagagattagcctatttagctgaattaacctttcagttgctttagttaagtgcgtggatataccgttattaaattcttcaacaaggattgcagcagtaccaccatctcctaccgtagcaccttccctatacagctgattaataattcctcgcagttccgtattcgttgtggtagttaacagtttttctctggttgtacctgtaagttcaatccttttatccaaaataagacctatttcattcgagaacgcagaatttggcttttcattaattatgattttatcatcagaattcttaaacgcctcatcaaacgttccggcgggtacttggcctctgggcaaaccgccataccgatctgcccagcgaattaggtcctgagaagtgacaatactcccatctttaagtacgacagaccagccgccgccaaaggagaacgctttgagcaggagattgccgcctgcgccaatctgtgtggccatagaatctccaaagagcagaagctttgcatcgtctaccataccgaacattatgaagttttccagattacttgcaagcttcaaaagattttcggagtggacgatacgtatatagcggtcgacatggggctgtaatgtgtactgataaaccagttcaaaagctttttccggatgacctttgtgttccctgagcagcatggaaatttcatcgccgacggacaattcccaactttgaatgacgctctgatctctatgggcatcaatcacgttctgcaatccctgtgccgtcgtcacagtccgaatactgccatccgggaacttatacgtcatagaccccgtggaaacaaggtccagcgttgtgcgaaccaaagctggttcgccatactttatgatgaaatccacgatctcctgctgtgtataggttccggcagggagcacggcgcgtcccaaggaatttcgggaagtcggtaataccatgcccttctctacagtatagatctgctgctcagaaacaaccggctcgtccttctccttctcaacccccatataccgggcgcaggcgctgcggtagatagcgtcaacctgcaaatgatagtccggggccgtcttgtcgagcctgctgatctcctcctgcgcttccctgtacatctgcgtggctttgttccacgcagtggataccgtgtccacaatgggctgtgcggctttgcgtatcgtccttgctacgctctttaccccggaaaccaccgtgtttacgaccttttcgccaaagattgcggtcgccacggttttcaccgcgtttccgatgccgctgactaccttctgaaccttgctgccgatagaggacagcacgctccccaggcttttggcggtcagcccatccccgtccgcaaagctgaccgggctgttataagtgaacagataggcattgaaggattggggaatcagcagattggcgggatagatgtctttctggctgaacctgttcaaggcaggctcatactgccttgcgcgcagattcagcatgccggtggcggcgtcgtaggcttcggcgttgtaggtaaagccgctgaccttcacgccgcccatctgctcgccataggcggtgtaggcgaaggactgcaccttcacgctgatatccggcagggcagaggcggcggcttcaccggcaaccggcgcagagatcgcctgcgccacggacccctgtccatcgtagatatagcgggtcacgccgttttcactgtacgccgcaatccgctccagcccgtaggcataggccgtcgtggcagaagtcccgttagcttatgtgttcgtttcggaaatcgtctcgacccaagtttttctgtcaaacgaaggcatcaaatatccgcatacgcgggctcggttttagtcgaagtgatacccttccaaattgaaaacaggaatctcttcatccgtttcgatttcccgggtaaaatggagattcccctctcgatccaccgctgcccctcctgaaatggcaacaatattttttaaattaaattcgctaaagctatcgctggtaagtattttcccttcaaaatccaataaaatcaaatttgaataataataagtaatctgttgtatgtcagtccatgttttttctaaaaatcgatctccgtataagctataaacagtagcaacaccattttcatcaagaaaagctatttcatctccagcattcgaaagcgctacttgtttaatatcagtcagttttgaaaacgcgtcaccaatggtagaaaggatatttccgtctttatcgattcctatcaggtcccagtttccttctatcgcttttaagttgttccattgatgcttttcaaaattttctttctgattctcaggtaatttcccggcatatacaagcgttttgttttctcttactgcaaaagttccccaaacacctgcctctacttgtacaatctttgaccattcttgtgtattaagttttccttcataattatcccctgttgccacaacagtaccatcttttttcaatcctacaacagaatttgagctagaagatattgaaattatttccttccattcttcaacctctggatactcttcctttgcgatattgttcataaatacagttccgtcatcacatacaataaagcactcttcgccgacaaaggatatgcgccgtgcaacctcttctatagaggatgcgcatccatgcaaggggcttacaagaagcacgattccaatcacaagcatcgaaagccttttcatagtcctcttctccttttattccaattctgtataatcaatgtcacgtaaattaaaggcatattgataatcctgatacgctgaatcgaaagaaaggacgtttatttttgtcatctttttattatagtcatctgttacacgctcttcttcagcagtggcattattcggatatgcttttccgcgaatgtctataatgacatctctataaaccacacctcccaattcaatttgagtaaagtatacggcctgatgtgtaaaaactccctctttgttaacaatacacagttgcattccatcataacgttccatatctttggttacttcacgctgattggttccctgtgagaagcttttctctacatacgttcctatctcctcgcctttagaaaaggcatttgacgcaaaccattgcccttctgccgctcttcctgccagtgaaacacaatcatattctgcatcatttattttgtatgtttgctctccgctgtatgttgcgccgtcttcgtaaacctgggcaataaaggacttcagataggataccggcatcttcacatcggcagggttgttccgcttttcagtaatatctacttcatactgttctaccggtgctatatacccttttactgtagggagcccaaaatcaaggcttacatcataatcccctgtctcgtctgaaaatgcactggacgcatcgttgagattgggaacataattctccgctgttgccttattatattccgctgcataatccttctcaactccgcccttccggtttaattccgtggtgatgttctcgatatcatgggcgctcataccggcaaacgttgtgctgcacaggctcctgtactcctcaatggataccccgttctcttttcttccaacttcccgatgcagattggctattgattgatgaacctcatttcgggccttttggaactctcgcagcgcgctgctgttggccagaagatcccgattgtaattggcaaaaccaactgcggatttcagatcgctgctcaactgtgcaatcgtttttgactgtttttgccctgctttttgtcccgactggttctttgtatttgtatatgacttcaacttgttggtatggctttcaagtttgcggcttgcgttcgtcttcttggcctgcggggtcggctgtttatccacaaagaactgtgcggcttcatccttgtccgcaggacgcattccgtcggggtcgatccagttgatgggattgttgtaagtgtacagatagcggtgaatggatattgtcagcatggcatatccacgcatcatatccttgccactaaaccgccccaccgccggctcatactgccgtgcgcgcagattcagcatgccggtggcggcgtcgtaggcttcggcgttgtaggtgaaaccgctgaccttcacgtcgcccatctgctcgccataggcggtgtaagagaaggtctgcacctgcacactgatatccggcagggcggaagcggcggcttcgccggcaaccggcgcagagatcgcctgcgccacggacccgcgtccatcgtagacatagcgggtcaccccgttttcactgtacgccgcaatccgctccagaccgtaggcataggctgtcgtggcggaagtcccgttggcgtatgtggtcgtttcggaaatcacctgatagtattcctgcgtcaggtcatacaggtattccgtcgtcgcccattccagcccggcgggcacgtccgcttcgtccgcattcgtctggctctgtgcaggttccacgatctccggcaggcccgcaacgttcccccgcagcagctcttccagcgtggagcggttcgcgtctcctgcctcgctcttgctctgccgcatcccgttcgcgtcatacgtgaacgcctgacggtacccgtcgtagccaacgtagtccgtcagctggtccagcgcgttgtaggcatagctatccgtcagtctgccgtaggtttggctggacaggactttctgcaccatgctgccgttcctgtcgtaggtataggcgattttgtcctttccgttcgccatgccggtgagctggttgcccttgttgtacttcatcgccagcgtggtctccgccccgtccgtgccggtcaggaccttttccgtcatgttcccggccttgtcgtaggcatagtgctcgccataccccgtcgtttgcaggaattccgtcagctgtcccgccgcgtcgtaggcatagctgctggccacggtcgtgccgttctcccgccggatctcacccgtgatgtacccgttcctgtcataggcgtagctgaacgcgatctcgctttccccgtgcgtgacctgttccaccagattccccacgctgtcatagcggtatgaagttgtcaaggtgctgcttgcggtctcagtcctgcgccccgccgcgtcgtaggtataggcagtcacctcgccatccagccccgttacgccggtcatgcggttcatccggtcgtaggtgtaggataccacacgcccgtcggggtacgtcatcgaggtcttgtttccgtactcgtcgtaggtatagcttaccacatccccgttcacgttttcaacggaaaggagatacccgcgttcatcgtattgatacgttatgcttccttcggccccggagacctccgtgaccatgccgacgtcattatagctgctttccaccgtctgcccatcgcccacgttctggatgagcaggctaccggtcctgtcgtacgcaaaggtgagcacggtcccgtccgccttggtgacgctttccagccatccctccggcgtataggcatacgtcaccctgttgcccagcgcgtcggtctcggtaagcaggttgccgttttgatcgtaggtgtagcgcgttacgtgtttcagcgcgtccgtcaccttgacgatgttgtcctgtgcgtcatacgcataggccgttttgttccccagctcgtccgtcaccccggtcagccggttcaccctgtcgtactggtactgcttcgtgttgccttccgcgtccgtctccgcaatcacgttgcccgccaggtcgtaggtcaggcgctgctccgcgccgttggcataggtcaccttctccagcaggctttccgccgtgtacgcaaaccgcgtctcgttccccagcgggtccgtctcgcccgtcaggttgcccagcgcgtcgtaggcatacgcggtttccgccccatccggcgcggtctgcttcaccagccgccccagcaggtcgtattcgtaccgcgtcacccggtccccctgcgtgacgctgagcacattgcccatggcgtcatattcgtatgcagtcgcaagccccgtgcgcggcgtggttttcaccacccggccaaggaggtcgtattccgtggtgtctttgcttccgtcggggtagacggtctccgtcatcctgcccgcgaggtcgtaggcaaacgtcacccggcgcccttccgcgtccgtgaccgccgtcacgttccccgccgcgtcgtattcgtactgcgtcgcgttcccgtttaccgacgaccaggcgatctgtcccgcctcgttatagccgtaggccgtgacgcagccctcggggtcggtcatgctcagtgcccgccccgcgccgtcatactcgtagagcgttacggcctttccgggcgcggtaattttggtcacgttccccagcgcgtcataggcaaactgcgccttctggccctgcgcgtcggtgatttgcgtgacaagcccgtttttgtcatagcgataggcggtggtatgcccgttggcgtcggtttccgatgtgacgcgtcccgcgcggtcatagccggttgccagcacgccgccgtttttctgcacggccgtggtggccctgccgtttttgtcatagcccagcgcaacggtctgacccaacgcgtccgtcaagccggtcaggttgccgttttcatcgtagccgtaccgcgtcatgcctccgtatgcgtccagcgtatagacgaggcttcccacgctgtcataagcgtagcgggtgaccgctccgtccggcgcggtttcagaaaccacgcggcccagtgcgtcgtaggcccaggcggttacattgcccagcgcgtccgttgcggtgagcaggttgccgcatgcgtcgtaggtataggcggtctgtgcgcccacggggtccgtcacgcgaatcaggcggcccagcaggtcgtatgccagctctgttacgccgcccagcgcgttcacctgccgcacggggcggcccatgcggtcgtattccacacggatctccccgccgcccggcaggctgcgccgcgtcaggttgcccgccaggtcataagccatggactgcgcaatccctgcggggtcggtgaccgtcagcggcaagcccagcgcgtcataggtgtattcggtcacgccgcccagggcgttggtctcggtgagcaggttgcccgccggatcataggcgcgggtggtgacattgccctgcggatcggtcacggtgagctggttgccgttttggtcgtaggtataggtggtgcggctgcccagggcatctgttgtgcggctgacctgcccgttccgagtataggccgtcttctgcgtgcttttgtcggggaggaccgtctcggtcaggcggcccatggcatcgtatttgtagcgggtcacgttgcccaggggatcggtcatggacgtgcggttgcccaggccgtcatacgtatagctgactgccgttccatccgcaaacgtctggcgcagcaggttgcccttcgcgtcgtatgccagcagcgtcacatggcccagcgcatccgtcagggcggtcatattcccgcttgcgtcatacgcatagccggtttcgttccccagcgggtcgatggttttgaccagctgcccgttgacgtattcatagcgcgtcacgccgcccagcgcgtcggtcttttccaccatgcggcccttgtggtcataggcatagcgggtcacgccgccgtcgggcgcggtttcggcggtcaggttgccgttttcgtcatacgcataggtggtaacccctccgttgaggtcctggaggcgggtcaggttgtggttggcatcgtactcccgcaggatgctcccgccgtttggcaatacggtggcggtcagatcgcccgccgcgttataggcgtaggtggtgacgttccccatcgggtccgtttcactcacgatttcgccgttttccccgtaggtaaacgccgtctccccgcccagcgcatccacaattctggtggtgcgcttgcgttcgtcatagtaataggtgacggtattgccctccgcgtcggtcgtcacggtatggccgtcggcgtattccatccggtagcttccgccggcggcgtccgtctgggcggtcacgcggtcctgactgtcatagcggttgagcacctgacgcttgccgttggcgtcataccaggccgtcatgcggcccttgctgtcgtactgataccgggtttccgcgccgttttgatcggtgaaggagaccaggttgttgccgctgtagcggtagttcagctcgccgccgcccggcagggtgagctttacgatatgcccgttttcatccatctccaccagcagctcttcctggctgggcgacagaatcttgatcagaagcccgtcttcatcccgcatcaggtgcgtctggtgctggccgccgtcccgctcgatgcgcttgagcaggccgccggaggcaaaggcgtacatcgtgccgtccgtcagcgtgatgcggtactcagtatgcgcaaggtcgtaggaaagtgtctcgtattccgtgctgttgctgacgaacgttccgtccggctgatgatagaagatgatttcgctgccatccgcgcggcggtagcccacgctgccgtcgttaaacaggcgcaggtgctggctgtattccgtggcccactttgcgccaaagggcccgtcgctttcgctggactgcgtgttataggtgcgcacgatctccagcgcgcttgttcccagatccggcaggctgaagtcggcggtctgaaggaagaagttgccggtgttgaagttcaccggttcaaagccaagcgagcagaagcggtgcggtcccagcaggctttcatccagcgcaaaggacacgctgggcggattggcctccgtggagaaggtatagttgccgccgtacaggtcgttgaggtattcggactgcgtgaagtccgccacattatggacgacgccctcaatgcgctcctccgcgggaatgaccgtgacagcggcgcgcacacggccgcttgcacgcgtcaggatatgcgcaagcccgtcccccggcgcgctgtactcgcgccgcgcgcgcacatggtacacggcgttttcctgatagtcgaaatcctcatgccgcgtttgccgcgtggaagcgattttctccccgtttcggtagatgtcgaaccagacctcgttggcgcaggtggggtcgtcgcggttgggatcgctccaggtaagcacatagcggcgcagcttttcattttcgtaatagccgccccagtcggccgcctgcacattatagggcgctttgatcaggcgggtggacaggccgatcccctgtgccgttacgccttccagatgcagggcgcgcagcgtgacccctgcgggcagcgtggcgcgcaggtacagcgagcgcgtcgcccgcggcaaaagcacatagccgcccggcgcgcagtccgtccaggtggcgccgtcataggaataggcataccgcccgctttcaacggtgttgcccctaagattgaggcagagggtttcaaagcgtatggcatacgtatcgccgggcagttccagcctgccggtttcgtacaggtctgtggcgttcagcgtcgtacgcagcagaatggacgccgacgcgccgctggcatggaggcggccttcgccgtccaggccgagcgccgtaacagtatgcacgctgtcatcctcaaagggcagaaggtcggcggtgaagctgttgctgttccatacgccatccacatacagccgctgggtggtgagcgcggtcgcgctgtcggttgtcaccgtgggcagggcgacggtatattcgccgccggtgaggccaaatgccgtcacgggcctgagcagccgcacctgaaagtgcagcggattcatttcatacacgcccgttatatccaggccgtgcagcgtggtaccgctgccgcgcaggctggcccgcaccgcgacggaggtctgaggcacatcgaaatagacgtcatatccctcgcggatgccatgccagcttgcgccgccgtccacgctgtattcatacgagatggacccgccgggtgccaggctttccaccgtatgcaggcgaatggccagcaccggtctgggagcggaaaacggcttggaaaccagcgtgccggagccacccgtgacctctgcgcccatctgggacagtgtcagtccgtccgctgatgcaattttgctctcgtccttccagatatcgctgagaatcagcacggtggccattccgggggtataatgcaccacgccgccgcgatcctcggagatcaccgacaggctgtgcagggagccttcgggatacaggatgggatggagtgggaatttcagatgcgaggccacgccggcgggttggccgtcaaggatataccggttatcgtcctcatagccggcgtaatccgtggtataggaagcttccttgtaggcggtggtgacgacctcgccctgcgtgggcgcggtaatggtgatttcgcccatgatgggccttgtgctgtggtccgccttgatgtacacgccgcgggcggtgctggtatggcccgcctgatcgtttacggtcaggacgatctcgatggtttcgccgtccgcaaattcgcccgtgtccagaacgccgagctgttcagcgctctttcctacgctgtcctccctcacggtaacggtctttctggaggaacccacggcagtcagcgtccagtccttgagggacagatccgccgccgtgccccagatatccagtacaccggtgacgaccgcgccatcctgcggagacagcaccgccgcctccggcgcggtccggtcaatgagaaaggtcagcgcctgggacgccctgttttccagcgcgtccgccagatacagcgtcacggtatgctcgccgtccgggagcgtggaaacgtcgatggtttgctcgccgcttccggcagcaggcagcggcgtctccacaccctgatccaccgcatagctcatggccgcaaggccgctataggggtcggcagcgccttcccacaagagtttcacctgctccgtatcggcccagacggatggttccagcgtcaccgtctccaccgtaggcgcgctgcggtcaatgaacagggtggctcttccttccgcgcccacattgcccgcgatatccacgccccgcaccgcgacggtatgctcgccgtccgcaagcgcggagatgtcgatttcaaacccggaaaaggttttgtccgacagctttgtatcggtataggcgccgccatccacggcgtattccacgcgcagcagatcgttcaggtctgcgatgccggtccaggtcaggctggcggttgcctctttggtccagctgtcaggcaggattgtgacctgcggagccgccggcggggtgcggtccaccttgaactgcgctccggcaggcgcgccatagttgccgtttgcgtccacgccgcggatatagaccgtatgcgtgccgtccgcaagcgcgcccgtctggagcgtgaaggagccgttggcgctgttgctgctcgtgctctgccagttccacgccgcggggtcttggacggacgatggattgaccgcatattggatctggccgcctacccccagcgtggaggcatgggtgggcaggtccgtaacgcccgcccatgtgaccgtgtgtgcgctggcgctggtccagtccacggggcttacgctcaccgtgacgggcttgttgggcggcgtggtatcgggcaggacggcattggccctgccgaaggtagagccggtttgcccataggcgttggcgggctgaacggtaaaataatagttcaggtccgactggtccgtgcgcggaatattgggcagctcctgccctccgccgttccagtggatggtgtagtttccggcggccatctccgcatcggtcggccagagcgccttgccccgggttgaataggaggtgacgttgccgatatccagatactgatattcgcttccgttatagatgcccaggcggtagccggcggccagtggcaccgcgttccaggacaggtcgatatagccactctccgaattgacgccatagccgtaggcggtcgccgtaacggtgggcgcgggtaaatcatcggtgtaatcggccgagaaggacatgcggtccgcgcgcggaagcacgtcggaggaacagatgcgcgcccacgacgtatcgctggtaatggcaaagccaaagttttctttctggtccgaggtgttgaaccaggcggaaaagatgcgcgtaaggtctacggtgttccagcccgtatgcagcgtgatggtctgggtgatctcgctggaaagggagggccgggtattgtaggtgatggtgggcgtgttccagcggctggtgacaaggctcacctggaaggtaccgccgccctcgtggacgtagacgtcccattgggcgttgagaatcattaggccactggtggtcggaaactctgacacgccgccatccccgccagcaaatccagttagggaaggcagaatataagctatatagccgttgcccgcatacaggtttgtcccctcacgattatgatccttctgggctgacccctgtggcacggtatggtcaaaatgccggtccggctgggaggcggaaacatagacgtctccgatgccggtcgccagatcgttatagtaatgtccgctgggatcgatgacgacaggataggcggcctgcgccatccattcagcatccggcgtataggtcaaccggtagcttccgccgccgccgctgatggacaccgcgatgttcgtgctgtagcggccggaggcgtccgtcatgttgggcgcttccagtttggccagcatatttccctgggcatcgcagagcaaaatctcctgtccgctgagggaggcggtcaggccgctggtatgcaattcgtaggcatagacatggttgcccgtgaaggcgcttacgacgatgtcttccttaaagcccgtggtaaaggccgtcagatggacatccgtcacttcgtcaaacaggccggggaacgccacggagcttgcgccgccgtttgcgctgcgcatttggctgatgggctgcgccggaatgctctccgggcggattcggggttccggcgtcggctgctgggttgcgcaggggcttggggagggctccgttagcggcgcagaagacgtttccgtggcggcaggaagcggttccgttgtggcccctgcgggcggctgagaggatgcgccgggcgtttcagccggaaccacaggcgattcctgcgggggttctgcggttgggtcagccggcggattttcggcgggcggtggttcctgcgcaggctcggcggtgggatcggcagccgggttttcagcgtctggctgatcctgcgggggttcgtctgccggcgggtttttagcaggcgggtcagcagcaggcggcccggcattttccggttcctccgcagcgggaggggccgacgcctcctgtgatgcgggtggctgctgttcctccgctgcggcaatcgcaatgccaaaggcccaatggagcagctttgctccaatcgcttccggggcttcctgcgggttttctaattgaggtgactgcggttcggcagggggctccggctgcggagtgggttcaggatcgggctgcggcgtgtcgtccggtatggcggaaggcggggaaacaggctcttctacgggaacagccgtgatttctggcgcgggttccggagtagattcttggcccgagtcaggatcaggctcaggagtaggaacagagggttcctccgatggttccggcacaggcgatggttccgccgaaacatccggagacggtgaaggctctgcggtggaggaaggagcaggggtcacggatggtatgagtgtttccgtagcttcaggacttgcggaaggcgtagaaggatctaccggcgcaggagacggagttgacggtgtcacggatgccgtagcggatggctccggctctgcggatggagcaggcgaggcggatggtgtgaccgtcggttcctgcgatggcgtggcggatgcggagggcgtaggcgagagagtgggcgtcatcgaaggagtcgggctgggcgtaggggtaggagtcggcgtaggctcaggcgtggccagaaagtattggtccagcatcagcggcgacaggctgaaaccggtatctccccggctggcagataccagggtactatcctgataatacacgccttcgatacgggtattgacttcgccctgggcattgacaaagtcgccgccctgtccgaccaggcttgtgctctgccgttccagcggcagcagctgttcgtccccctccattaccccgaagtggacggtgtgcacctccggcacagcggagctatgagtcgggtgggcaagagctgctccgttgttcaagacgagaatcacggtcagcacgatcgcaacgagcctgtttttcatgtgtctacccccatcaagccgatgttttatcctttgttcatgaaaaaacggcaatcacaaatcagcgtttggaaggtcctaacgcgcgcttttataactggatttctattaattcatttttgtcattaacaatatgctgttttaccgcattctttcgagcacatcgcctgcttccctactcaaccagttcccagtctccaacccattcctgcgttgagcagttatagaggcggcgatacaacttgccgtctatgaatttgtagcgccattccaatgcgggtgcacgcataaggacgggtgtttcttccgcgcttgcggcggatacgagtgccgaaggcggaagccaactctcgatccacaggcttccagcacaaccagtcacgacaagcagggcaacaacaagcagctttctgatcggtttcatggtctctcccccttactaaaaattcttaacaggtaattcctgaaaatcttccggaatgcttgttaatatacccatatgtgtttcctgtatatacagatcatatctcccatcctcccgcaacaccagataggcgccttcatcctttggcgaaaaggtttcagccagaacatcatccggaatgtgatagggctcaaacacaacaaagaaggataacgccatcatgacaatacacagcagcgcaacgacatggaaaagcggactggtcctggggcgttcgagaacataccggaaccttgttttgagcgaacactccttgccggtcataaggcctaccgcaaacggggaaggggttcgcctgctgcacttggcgactttcagcagggatgacagatatgcaagccgctgactttcatccagttctttcgtcaccagatcgtccgcacgcagttcaagcgccgcattggtctgtttgctcagcgcgccgatgaaaggaatccaccagtataccgcagatacaatttccacaaacagcttaagcgctatatccccggaagcaatatgagccagctcgtgccttaggaccaagctccgctcctgctcggtgaaagaaagcgccggcaacacaatctgtggcttgaacaaaccaatggccaaggcattggaagcatacgaatccgtgatgcagcgaacctttttggtccggcccaaacgattgacgatggtaagcgtttctgtaactggcagcgaacgcaggtagcgcctataccggtactgggtcaatgccagaccggccagccgcaccgttgaaattgctgccacgaagcataacaaaactatatataacgggaaagcgggtaaataaggaagttgaatcgtctgattgaaaaagcaggttacctcaggatatatccgagatatgtaaatcgtttttgtgactttccactcaaagggcagtagcatgcgaacggccagcagcacgcagccggtcatcacccagatgcgacctggtctgtcaaggcatggcgctgcatgtgtaagtgcgctcatcagcaccaacagcacacggcacagcacaacatgggtacatatcgtggaaagcgaaaaggtcatctattttccctccctggtcaatagctcccttctctgcgcgatcattgcctccagttcctcgataaccgcttgctggtcttcttcgctgtcaatcagccccgcaaagattacaggagcgggcatgttttttcgcagactacgaaatcgcgctgagaggtcctcaaaggcagcattctttgctttttccgtaggcctgtagctacggcacaataccttgccgctgtagacaatctgcgcaacctcgatataaccccgtttcagcagggaacgtacgacgctttgcacggtattgctgttgagcgattcgcttcgtgcaacgatctccgatgccgtgagggatgtctccgcggttaacagctggttcaaaacagcctgttccttgtttgtaaatgaaatgggcatttataattgtccttcctctatatccagtatatatatagtatatttttattgtctcagtctgtcaatatcatgtttgattttttatcatgaatcattcataacgagacaagccccatactctccagttatggatgcagcttcctcatgcgcagatcagattggcgaagcatttttttgaagaaaggcgcctctgctttgccacacatcttctcatttccgtttcctaaaaacaggcctcttagaaaagccccgaatccacccgaaaaatgcgcacgagcaaagaggaatcagcttgctgaaagtacataagacaaggcatctgcagggagaaaaagcttgcgttcagcatgacgcagacccgggtgatttttgcagcttcttataagagctgccctgcttgctaccaccgttctccaaacacccagcccgtgcctcccgctgaaccatgcgccggatcaccctcgcctttcggtcccagtcgatctctgaccatgtcagcgagcaggtatcgctcaagacgcaatagcgggaatactcgtcaatggcggtgtactgatacagtttcagctgcagatcggcaatacagcgtcggggtacaaccttcacgcgatatgaacacgctggccgggatattgcatttgctcgtatggtttgggtttgtagggtttcttcttctctacctgtgctgtccagccttcccttcgcatcacccgccataggctttctacggttcgtgtatatcctcgtttccgcattcgcgcccatagctccacgatccccacgttggggtttcatcggtgcatatcagcgatgagcttaagctcctcttgggtatgctggttgggggctgtgaggacgtcgggaccggcaggccagggattgcagggaaccgtcgtagcgggcacgccagaagtagatgtaagaccggcttttgttgtacttccggctggcacagcttacaccgtacttctgcgcgtaggtgagcagagaatggcggtatttcatgtcctgtgttatactgttcatgaggcttgagctccttccttagttggtgtcgcaactcaactataccagatgggcgctcaagtctcatcctttttcccttcactgtccaatatgtattgtagctctacatgcaaggttttgtctgcctttgggcgtggttgacattctgttttggttcgtgtatatttaagaatgcttgagtcatgatggattcttttgtctgtcatgctcatgctgccgtaaaagggattttatttcggcaacattccttatttccttttgaaaaggaaagtgcccgcagaatggcggttctcaaggcagtgctgtctgctccggatgaaccgtctgtgcggcaaagggcagcgccgcgtcagatgctgaacctttcgcagtggcagggactgtcccacatattcaccagataccgcggctcaaatgccccggacggcgaagcatttccttttttactattcttcaaggaaaagcagagtctcggcctatccggcgcgctagccggtacctggaaatatagaattataagggacggagttcatgattcaaagaaatcaaaaaaagctgaatcggctgaacgtggtgtcagacggcgcgctgattgtgttgtgctatctcttcgcgtcatggctgtggctggatgtgatcaaaaacaaagcaggcaacatggcggcgctgagcagtctgaacgcaagaggcatgctggccgcggtgatttacgcattatggacggtttttctactgaccctgttccgcgtctatcacacaagccgtgtacacaggtcagggcgtgaatccgcacgtatcctggcgggtaacgccattgcgttggctacagcggcctcggcactattcctgtttcgtctacaggatttttcgcgcggcgtgcttggcgtgtactttctctccagcagcgcggtgctcatcggtaagcgaaaggcagtacgctttttgcttcgacacatgcgcgcacgagggtacaacctcaagcacatgttggtagtcggcggaggcgatctcgcgcggcgctacgtggcaaacgtgcaagccgagccgtcgctgggcatccatgtggaacaatgcctcacaccggatgacggcctgctggaaaagcttgaaaaccgcctgtatgatgcgggcatcgacgaggtgattctggctcttgcgccggacgaactagatgtgacgtcggatgtgatccaagtgtgcgaaaagtgcggtaccaagatcagcgtcgttcccttctacaacgacgtcatccccacacgccccaccattgacacggtgggaaacctcaaactgattcagctgcgtactactcctctagatgagccggtcaacgcgctgaccaaacgcgcctttgacatcgtcgtaagcggacttttgctggttgtcctcagtccgttgtttcttctcctggccattgccatccgactgtccagtcctgggccggtgttgttccgccaggaacgcattggtctgaacaaaaagccatttatcatgtacaagttccgtagtatgcgcgtcaacgacgagcaggacaccgcatggtcgggcagtacggacgaccggcgcacgtggctgggaagtctgttgcgaaaaatcagcttagacgagcttccacagctattcaacgttttaggtggcacaatgagccttgtaggccctcgtccggagattccctattatgtagagcgcttcagggagacggtgccactgtacatggtgaaataccaagtacgccccggcatgacgggttgggcgcagattcacggtctacgcggagacaccagcattccggcccgcgtggagcacgatctgtggtacatcgaaaactggtccctggagctggatatacgcattctgctgaaaaccgctttgggcggaatggtgaattgtgaaaagatattagaataagcagtattaataaataagcttaattaatgatttaggataactataatatatgagaattttttttattatcttaacttggaattctcaatctgtaattgaaaaatgtctgaacagcatattggcctttcagaagattgagacaagaattattgttattgacaacggttcaaaggaccaaaccgcagcgattgtgcagagagtacaagaaaaagccaagcgatcttcagaacggtttatgttggtccaactagttaaaaacagaggcacgactttaagtcggaatataggcatagcaattgcattgaatgctgcaaaggacaatgattgtgtctgtatcttggactctgatacggagatttcagagcaagctataaatgctctcgcaaatattttgcatgagacgtcttcagtcggtattgttggcccacgcatggttactcgagaaggatgtattcaaccttcggcaagaaaaattcctacagttcctcaaaagttaaaatggcttaaaaatacttgtgagatggaacgtatatttaagcaggatattgaaaaagcatcccacatatatactgattctgcaggcatatatgcaggatatctcacatcggcttgttggatgatgaaaccctccttgtttaaagaaattggattgctcgacgaacagatattctatgcacccgaagatgcagaattttgtatcagagcgtggaagaacggaaaaaaggtgctttattgtcccaacgtatgcgttgtccatcactggcaacgtctgtcgagaaaaaagctatttagcaagcacaactgggaacatctcaagggtttgatgcacatgtatattaagcatcgttttttctttagcgatataaacattcggcgacaagtagaatctcaaggtcccgactttgcacagataaacttttaaaaagataagtgagggattttacaaatgaaaaaagtattgtttgtttttggcacacgtcccgaagccataaaaatgtgtccgcttgttcttgcttgcaagaactcttcccaactacagacggttgtctgtgttacaggacaacatcgacaaatgttggaacaggtgctgaatgcattctctgtaactccagaatacgatttgcatatcatgaaggaacgccagacgctgtttgatgtaaccaccggcgtcttggaaggtgttaaaacagttcttgagaaagaaaggcccgacattgttttagtacatggtgatacatcatcaacttttgcagcagcgctggcaagtttttacatgcagattcccataggacatgtagaagccggcctacgtacttatcacctctattctccgtacccagaggaaatgaatcgtcagtgcgtgggagctatggcaacctatcactttgcgccgactttgcaagccaaagagaaccttatacgagagggaaaggatcccaaatcaatatttattactggaaacacagctattgacgcacttcattacaccgttcgcagcaactatcagcatccgatattggactggtgtggaaataaccgactcattgtattaacagcgcatcgtcgtgaaaaccttggaaaaccgatggagagaatgttcagagccatcaaaagaattgttgacgagatggaagatgtccgtgttgtctatcctattcatatgaacccagtggtcagagaaacagcatatcgtatttttggtgatgatagtcgttttaggatcattgaaccaatggatgtggttgattttcataatttactgtcaagggcctatctggttttgaccgatagcgggggaattcaggaggaaacacctagcctgggcaagccagtattagtgatgagagacaccactgaacggccagaaggtatcgcagccggtacgctgcgtcttgtaggaactcaagaagaaactatttatcatgcgttctatgaactgcttacaaacaagcaaagctattataagatgtctgttgcggcaaatccttatggagacggtcatgcctgcgaacgcattgtgcatattttgataggagaaccgtccgaagagtttactcccaaaggatcaggtgctgatcagtaactacaaaaaaacacgaggaatgcacgttaatgaaacgagaaaaacaggttgagctgctgtttatcaatcctccggcttttgaaggacagggcaaattttcaagagaaaatcgcagcgctgctgttacaagaagcggaactctttattatccattatggttgatttatgccgctgcgctttgtgagcaagaaggatttaatattgcttttttggatgcggttgcaaatggcataagtaccgaggaaagcctcaagtttgtccagaagcatcccagcgcaaatgtagttgttattgataccagcaccccctctatcgtttcagacatttcatttgcagacaaagtaaaatctttgcttccaaaggcatttgttattcttgttggcacacatccttccgttctcgcccaagaaacgctacagatggggaatctatttgatgctgttgcgcggcgagagtttgatcagacaattgtacagatcgctcacgcaatttctaatggggaagatccttataaggtaaggggaatcagttttcgtacacaagataaaaacattgttgaaaatccagatatgagctatctccagaatttggatcgtcttccctttgcagcagaattcatacatcggcatctagatgtacgccagtactttttttctgcatctgcttatcccgaagtccagatatttactagtagagggtgtgccaatcattgcaatttttgtgtttatccgcaaacgatgcatggacacttgacgcgtatgcgttcggaagaaaacattgttgaagagtttcggtatattgcagagaaaatgccggaagtaaaagaagtcgttattgaggatgacacttttacaacagatcaagagcgtgtaaagcgcttttgtgaactgttgattgcttctggcctgaataaaaagctgcgctggctttgtaatgcccgtgccaatttgaaggcagaaaccatgcatatgatgaaaatggcgggttgcaatctggtagtcgtaggcattgaaagcggaaaccagcagattcttaataacattcggaaaggaattcggcttgagcaggtgcgtacttttgtgaaagatgcgcgccacacgggattgcgtgtgcatgcatgttacatggttggcaatcgtggagaaacgaaagaaagcatgaatgagacgctgcatttggcaatggaattgaacacggatacggcgcaattttatcctttacagcccttcccaggtacggaagcttatcaatgggcaaaagaaaacgggtatattcatgggggattttcggattattgtaaggcggatggtacacttaattcagtccttgacttgcctgggctgtcatcgtcagatatgacgtcattttgcgattttgcacgaaaaaaatactattgccgtcccaggtatatcatgcgacgtctctggataggattacatgatatcgaagatttaaagcgatctataaaggcttttttaaatttaagacattatttatatcgaaaataggtgaaaaagtcacaatgattaaaagtgctttccgaaaagtaacattgccagttcaactgatcattcataatacagatctgttgaaacacttggtaggaagagaagtcacgcagcgatttcgaggctcctatttaggaattttatggaattttattatgccgttaattatggtgtctgtctatacttttgtttttggatatgtatttaaaggcaaatgggactatcaggtttctgacagcatgattgaatttgcgttgacgctattttccggtattatggtctataatgtttttagtgaagctgtttctgcgtctccacttttaatcattagcaatgtcaactatgtaaaacgggttgtctttcctctggaaattctctctgttgccaacgtagcagggtgccttgtacaaatgatctttaatgcattggtcattttgctaggaaaactactggttatgcatcagtttgactgtttttttctatttttgccactcgttcttatgcccctagtttttcttgccttaggattttcttggaccctatctgcaataggagtatatatacgggatatcaaacaaatttcttctgtactgacgttgatttttggttacatgacaccgatattttatccattatccgcagtccctgaagcgctgcaaggcattctccgttggaatcctttaacgacaattgttgaaaatgcgcgccgtgtcctcatttatcatcagtatccgcagtgggaggccctaacggtcgtttttttggtcagctatggttttatgttgctaggactgtttatatttaagagaatccgtccgagctttgcggacatggtgtagaggttgagctatggatagtcaggaatttgcaatcactgttgaaggcattggaaaaacgtattgcatgtttgaacgtccaacagatcgtcttaggcaggcatttacgaagaaaaaactgtatacagagtttcaggctctttatgatgtatctttcaatgttcctaaaggacaagtagtggggattgtggggcgcaacggatcagggaaaagcacattgctccaaattattgcagggacactcatgcccacctgcggcacttgtcatgtaaatggaaaagtggctgctattctcgagctgggaagtggctttaatcctgaatatacaggacgtgaaaatgtctatctttgtggaagtatttttggaatctcccgtgaggagatggatcgtcgttttgagagaattgctgcttttgctgatataggaaggtttattgatcagccagtcaagacctattcaagcggaatgtttgcacggctagccttcgcagtaaatatcaatgtggatgcagacatcttaattgtagatgaagttttaagtgtgggggaccatttctttcaagctaaatgtatgagtgctatgaatagcatgattcgaaatggagtaaccattttgctggtgtcacactcccaagcgacagtcaaagcactgtgtgataaggcgatcttacttaataaaggcacggttattatggaaggcaattgtgatgctgtaatggatcgctatatgcaaattagtctctccgaagaatcaaaaaagcagcttgttaaggacattgcacctgccaataacataacgtcgcaagatgcattagcaatgtttcaaagccaattgcagcctccctttgccaagcgtgtgacagaccgctttggaaaacaccagcttgaactgcgcgaagcagctttatttcagtttggcaaagaaactgttgtattagaatcacgtcagactgcgaccatttcacttttggtttatgccaatgaaaccgtgtacgatgattcagaaattggtgtggtcattcgtacttttgagggcgttgaattatttgcactcaacacattttttaaaaactttagggtgccaccagttaataaaggtgagctactgcgcattgactttgagtttgatgtcctgttaggaccaggcaaatattctgctgctgctggtattcgcacacccgttcaatcggagtatgaagacaaagtcttccacgccgttatctttgatgtggtaaatgtaaccgcaagccccattccgcttctgtttgatgtgccttattctataaagattgaaggaagtgcagacaatggctgattttaattatcttccagtctttaagaagtcacaaattgaagatattattagggatccgcagtgtgcgtatacctatctacaagggcaatcatttgagcgcatcggactcgataggttttatgctattgcgaatgacatagagcgaaattacggaaaatgctatggttttagtgtgcttgatgtaggctgcaacaacggtcttatttcagatcttttagcgtgtcaaggcaatcgtgttttgggcatcgacagttgtatcattgatacccagggacgctatgaggagcttttaaccacttttggtagtgagcactttgcgacgttgcaaaaaaaagaattatatgatttgcttaatgaaacaaacgattcctatgactttgttttgctgctgagcgtggcgcatcaatgggaatatggctatgccaatcaagaaagcagcagaattcgtgaatccgagatatcttatatgatgaacgcattgtggcaacgtacccacaatgcaatttattatgagtgcccaatcaatgaaccgggattccctgaaaattatggcatttcatttttgtcacgctttattgcagattatcataatataagcattgtcaaggtatgcgagacagtcgcatccaatggttatattcgtcatctttaccgactatcccgtcctacccttgtttctaaacccaatgcgtctgaaaatcaagagaagaaaatccattcctggcaaatgatccggcgcgatgggggggcttctgaagaagaagagatcatgctggtttctattaagcctatcgtcaggacctgcaaggatctcacagggtgtcagaataatattctaaccgctcgtcaactctggaaacgtattatggataataatccagagcatattgtccggatacaccgtattttgccggatgatcgagccgaaatcagtgtcgtgcatggatggcctttgcaagagatctgtacgcaaccagaatggcaacaacgggaaaatgcttttgaaaaagcaccggttttgtccattgagattgtcaaaagatgtcttagcgacctgactcagggactaatcggcttgcataatctgggaatcgcccatggcgatccctttccctttaatgcaattctccatcaagatggtcatgggacatggatagatctgggaaatatttcagacctgtcggagcaaattatatatgatatatatatctttatccagtatacggttatgtacatgctgatagaagcatgcgaaacaagcgaagcgctgctaaaagatctttctgaactttccgagagccgatcagaatattttttgtattcgcttaaagaattgtttgatcgtccccgaaaagacatcagacccaaggtcatagcagacgattggatcattgcgcaaagtatttcgcatctgttcgatgttcttgcgcagaacgaacaaacagctcttacatttcataccatgcctgtacgatcaacatggatatattatgaccgatttatccagacggatttgctgcgtcatagtattaaaaatcagcgtaaatttctgctggcttatgaagcggccacaatgtatgaggtccaaagactcagggtatcaaaagatgaagcagccattgatgcagcagaggccagatgtcaagctgaaaccgtagcaaaggcctcctttgcgtgcctccatcgagctgctcgacaagccttaaaccgtgcaaaggagtctgcgcaggaaagcgctctagaagcccagagcatgatcagagaggctcaggaagcagcagcacaagcccaagaagctgcagtaaaaattcaggagtctgccagacaagctattatacgggttgaaaacgaaaaaatagcagtagaaaaaaaacttcaaaagatgaaggataacctgctaaagccgcattctatccaaatggaggaatcaaaaatgaatgtatttgttcaagcaaaaaaggaagttgcagaaattgaagatggattaaaaaagatcaatcaatccaaaagcaaccgctatatgagaatgttacgttatgtagtaaagtcctttgcatcccttcgacctaaacagattgctgcatgtgttagaactgttagcctctttgctatgggcaaacgggaagcaatgcataaggtaaacgagggcgacctactggtacagttgattggcaaaactgcgttactcagacaagagatggagcattatgcagaatcggaccagtccagtcttgcaagctcagatatgctcttggatgacacggcgctgctggattttgctcctccagaaaatcggatggatacgcctattgcgagaacaggtaaacgcgttgcatactttaccaacatgctcttggactgggacgacctgcgaccccgtttcggaggcggggaacggtactgcctcatgctctcccgcttattaaaaaagcatggttttgacataacgctttatcagctgggaaggcaggcgggcgaaggagaatactatggattcccagtaaaaattcttcccattggaaaaggctactcggagtttgatcaagacgcatctaatgctttttaccaaatttctctggactatgactatgtaatatacaatgctcctgaactgtcatcggctcggatgcgcccagatgcgttagccatttgccacgggatttggtttgatcacaacaattatggcagcaacattaaatttcgaaagaacaaatggttttcactgttgtatcgcgcttttgcaaatccacaggcaattgtttcagttgatacgaattccatcaatgtgattcgcgcgctgtggcctgaactggctaccaagatgacgtttattcccaattttgcagatctgtctttgttctatcctcctgccgaaaaacgcaataaccaaaaactgattgtgttgtttccacgccgcagccagattaatcgcggaagtcggctgttggaaagcatcctcaagcaaattccacatgatgtttcattttattgggtaggtgagggagacgcttatgacacggagctgatcaaagacttggccaaaaaagaccaccgcctgcattacaacgtagcagattttgattcgatgccggagtggtatcggaaggcagatatcgctgttattcctacgattgcatgtgagggaaccagtctctcctgtgtagaggcgatggcgtgcggttgtgccacgatcgccacaaatgttggcggtttgactgacttgatcattgacggtcatagtggtatctccgtcaatccgaacgcagaggaaattgcgcgggcaatcaatatgctgatagaggatgcacaactgcgagagaagttgcagcgcgaaggcgctaaagaggcagagaaattctccgttgcgcattgggaggagcgttggcttaaggtattggattcgttgaaatggcttgagccggagcaaagcaaaaaaaaaaagtaattcttacgaaaaatgcaatacatggcggagtcgagtcactgatcctgatggagtcggaaggattaccagctgacgtgcttgtctgcggtggaatgaacaatgtggagggaacctgcccgttttcatatatctatgtcagcgactacttggagctgagacgccggcttagggcatatgacgctgtggtgtatcattggcttccacagtgggcggttactgccgtcaaggatagcggtttgccaagtgtagaatttgtgcatagaacggatacatgcgattgcgacaagaccgttccaacgcgcattgtttcgcactcgcagtttgtatgcaactacgtgaaggaaacttaccatcgaaactgttgccttgtgccgaatgtgacaaatacggacttttatacgccggcaaccggtcctaagggcaaggtgcttggcgcggtgacgagctattacgacactaagggcatagatttactgatccgcgcctggaaacgggtttcggcaaaacatccggattatcgttttgtgatctatggtagcggtgatcgggcgcgatacgaagagatggcaaggcaactggaatcgccagtggaattatgtggccccgtgagcaattcgaaggaggcatatgatacatttgcactggtcgtttctgcttcgcgtatcgaaggcttaccaattgcactgttagaagcactctcatgcaatctggaagttcttgcctccgatatcgaagggcatcgtatcatcaacgagcttgttgtccaggagggtcttgatgccccgctgcatctgtttaaagctgagaatgtggacgacttggtagaaaagctggatgagatgatcgtttatgtggagagcggcagaccctgtcacaatcgcgaggctgcgttgaaggttttttctgcgcatcgtcatatcgaggcattacgtggtgaaattgaaaaggcgatggaggaaaagagaacagataaaccctgcggaatgctcaaggacgttcacgatgtgaagagcacggcatggagaattgacgagcaaggccaaaaaataccggtgtctttccctgcaaaatttacttatatgagttttttgatgataacaattccattttcccaagaagagaatcgtgtaatgtgtacggcaaaagttgaattgaatgaaaaaaccggtgtttggcggcaattcaatggatacgactcctggaagcatagtataaactgccagggagaaggtattctgatggatccggcttcaagatttgttcacagtgtctatgttgcaaaccagcatgaggcttcacttgattttattattcgtccggatcagggaagaaccattaccgtgatggggattcagatacaaaccggaaaggcttgatatatgaaaacgccagctcaactgttgacagcacttaaaatggtgattcgcaatgaagggccagggtatgcagccatggctgtgggctataaaattcacaggcggctcaaaaacggactcgtgtatcctttgtgcaagaagcattatcaaaagataatccaagaggcacttgcaggatgcaatcggatctttctttggaaaagttcttttggatggcaaaacattctttaccaaaggccacaacatattacgatggctcttgctaaagctggaaacactgttttttatcaagcgtcgtggtcccgagataggcacattgaggacctgacacgtattcaggatggcgtttatttgtttaatgccgacaacaaaacattttacaggatgctgatcaattcacttagcgagacaccatgtccaaagtaccttcaggtttattcaaccgacctggatttgtcgcttcatgatgttcagcggtttcgtgagaaagggttcttctggctgtatgaatatgtggatgatcttgcaccagaaattgcgggtagcacttcgcttccacatcaaatcgtagaaaaatacgaagcggcgatgcatgattcgtctgttcccatcgtggtaacggcggacaggcttgctagggatgtcattgctcatcgtgggaaaaaaaacgtttgctatgcttcaaacggcgtgaatccagatgatttttcccgagaaaaatggaaagggcctgttaaaaaggaatttgaaaatgtactaaaaaagggcaagccgatcgtaggttactatggtgcactggccaagtggtttgactatgaactgctacgtcaggcggcattagcactaccagaggtggagtttgtgctgattgggaagaattatgatggaagcctgaatgcttctggcatcacacagcttgaaaacgtgtgctttctgggcgacgtgccatatgcgcatttgccgcgttatgcgggctgttttgctgtgtgtaccataccgtttgaaatcaattccattacgaatgccacatcgcccctgaaactttttgagtatatggcacttggcaagccgattgtaacaacggatatgcttgaatgcagaaaatataaatccgttttctgtgcaaaaaatgcccaagaatatatccacctcattaggcatgtgcttgagccctcttttgcggaaaacgtggcttactttgatttgctggcgcgcgaggccgcagaaaacacatggaatgagaaagcacggacaattttggcgatgctcaatgcctacgaacaggacaatatgcatgaaagttttaattatctccttttttgaagaaacctacacgccatatctcgtgccctatcaaagagtattgcgggaaatgggcgttatgtatgacatggcctgcttttacagagatgggtttggcgaatttgaggaaatcgatacggtgtatggtcacaagtatatctatcatcatgcgacgacggccaataggctgacaaagctgttgccagttcttcgctttggaataatgatgcatagcatattacataagaataattatgataagttgattgtgctcacatccgttccggcatttatgctttgtggtcagcttgtcgggaaatatgcgaatcgatatatctttgattatcgggacctgacatatgaacgattccgcatattcaaaaaaaggattcaaaatgtagtcgatcacagttatatcagctatttttcttcaccaggcttcttcgagatctatcctcaaaccgaaaagaccaaactgagtcacaatttcgatctggcggatcttcaaccacagctcttgccgatgcctgatcctcgcggacgccccatcgtcattggagcggtagggtatatccggtattatgaggtcaattgctccatgcttcggcaactgtgtgatggcaagcaatatcggatgcgctatattgggacccgtttttctgattgtgatcttccttctttctgtaagcaggaaggtatcgggaatgcaacattcgagggtaaatttgagaatagtcagaagcgcgaaatatacaaagacattgacatgatcaatgcggtttatcccgtatattcgcatgaagttgcaccggctatt

SEQ ID NO: 4434 - DNA, 32759 bp, Unknown
  16S sequences of unknown bacteria
cctttgcacattcgcaggtacatatcttggcagtgcggttattgcacagattgttcttaaagcaacaggtgccatataaaacttaacacattaaggcggctttaagccgcctttttcgtcttgaaagacaaagtgaaataatgtataattaaaagcatatattatgaattataaagtaaaagaggagcgttcctctttgtaaaaaccaagaaagcgaaaatttatgaattattatcttattgactatgaaaataccggtgaaaccggacttaacggcattgataagctggatgaaaattcccttgtggttattttttacagtgtaaacaacggccgtatttcgtttgaaatgcatcaaaaacttatggaggccaaagcacggataaaatatgtgaaagtggctctcggagcgaagaatgctttggattttcagctgtcgtcatatttgggttatttgatttctcaagatcgtggagataccttttacattatcagccgtgacaacggctacaatgccgtaatcaggttttgggagggctacggcataaaacagcagtacagcattgtaagaagcctgcctgcggccttacctgccccggaagaaccacggcgggaacaggttgaaaatgccgccatacaaaatattgttgccgaggcggaaattctgccggaagaaaaaccggaacagtcaaagcctcgccccaaaaatatcaacggcagaaaaactcttgtaaaagtgagagagaaaaacgacaacccggaaatgcggcggcttgaagaaaaggtgagagcctacatagaggatgcggaaatccgggcggaggttgcgcctcttattgaaaagtacaaaacaaaaatggggcttaacaatgccattgtaaaaatatacggcacagaaaaagccggtgaaatatacaaaaaaataaagccgcttatcaaagacaaaaaaggtactgacaacggcaacgccgtttgatatgggcggtttataggaatattaaaaaagatgcagtcttttacgattgcatcttttgttataattcggtttaaaattattcttcggcaaattgttcgcaaacatactgagccagcataatgcctgcaatatttggggcaaagggggtagacccaggggcatggcggccgttgccgtcttttgttgttttgctctccggcggatatttgttaaacaggcacatatggtccgttatgcccctttttctcaattcggtgcgcataacccttgaaagaccgcagccgttgccggcagttttgtctatagtgtcaatggtaaagccgtcaacggaaaatcttcccccggtacccatggcggagataatctttatattgtttttgtggcaaaattcaatcaaagacaatttggccttaacggtgtcaaaagcgtctatgatgtaatcggcacccaattcttttataaaatccaaattgtcccggtcaacaaacatattgtaggcatttacggtgatatttggatttatccgctgccggcgggcttttgcaacatctacctttaacttgccgatactttcaacagaggatataagttgtcggtttaagttggtttcgtccacagtgtcatagtctatgattgaaatgttttttatgccaaagcgcacaagacattcaaaaactgcgccgcctacgccgcctacaccgataagcaaaacatggtgatttgcgattttattgtatttttcttcccccatagccataatggttctatcgttaaaactcaaaattagcactcctttataaaacatacccttttgatttgttatttctataatgaaaaggcagtctgaaaaacagactgccgaatttttataataaacccatcgtgccgtcacggctatattagaacccagttgtcaaaaactagggtggatacgccccgtccgtaatttcctgactcctcaacccaattggggaggcacgcaattccgttagcggaacaagaacttccaattataaaagtttgtaggattaaaaataaccgtgatttatcgaacacaacaggcttataagtaatattatgtccgggaaatattctattattcccagtcgaagtaatcctttaatatatctttgaaaatttcctgaacttcataaagttcgtcgtcatcttcaactatatcgtatgtcaaaaagccttcttcgtcctcgtcgccctctttaaaaatataaacatagggttcggcttcaagagccttttgcggatcgtcaaaatattccattgctgctatataactttcaccgttgtagtctgtgcgacccagaacttcaaactgaacttcttcgtcgttttcgtcaagcagtgtaagtatatcggtagtcaaatcctcttcgggcagatattcaagttctttatcgtccatgagtaagacctccttttctcttcgtatataattataacattttatttcagtaagtcaatattctacttgaatttttccgattttcacacattattatgaaaattttgtacaatttaataaactctctaaaatttcatactcttttaagaaaatctatgatataataatacaataaatatttccacggagattaaagaatgaaaaaaatttttgcgttgatgttatcttttgccctgctttttacggcttgcaatggcggtgtaacatttcggtcaaaattggatgtagataccggcgaggtgcaatttgcacagccccaaagcggcgacaccgttgcggagatagaaacaagcaaaggcactattaaagtacttttgtttcctaaatatgcccctaaggcggtacagaattttgtttcccttgcccagtcaggatattatgacggcgttacatttcaccgtgttgtagaagattttataattcaatccggctccccggacggctccgcaaacggcggcgacagcgtgtggggcgtgccttttaccgatgaattttccgaccttttgcacaactacacaggggctttggcaatggccaacagcggccggaacacgaaccgcagtcagttctattttgtgacaacgccggtaggagagatgagcgacgaaaccgttgcccaaatggaaagtgccggttggcgcagtcgggttatagagtcctacaaacaggcagggggcttgcctcagcttgattacagatataccgttttcggccaaatttacgagggccttgatgtggcgcttagcatcggccgggttaaaaccgagggtgaaaaacctaaaaaggatgtgacaataacatctataaaaataactacggttgaataaaatttacagataaaaatacctccgagtcacttagttgtggctcggagattttatgtatcctaatttttgctttgaatatgtaaaatccccggaaatcacggttaatcaaagcggtcgcttgtttttactttaagctgtcttgataatctctgcttaatttcatcatttctttaaaaaattccaaggcgtaggggcggtaccgttcaggggtgctgtccaccacattttgcaaaatagcctcttctctttttctgtcaagggtaggcagaccgtttgcttttttataccgactgacctgtgccgaaagctccattctatttataaaaagtttcagcatttcatcgtttatgccgtttatttcttttcttatttcttcaagatttaattgttccacggtttagtcctcccaaaattcttcaagtgtcaggtcattttccattatatatttagccacatctttgcccacatagcggtagtgccaaggttcgtaaactatgccggttacactttcttttccctttggaaagcgcaaaataaaaccgtagtcggcgcagtgttcgtacagccatttaaaggtgtctgtttcctcaaaactctgctctaagtcggagttatatgtgtaccaatcacttgaaactatgtccgtggcaaggcctgtgttgtgttcgctggtgccgggaatggcaacccattttgccgcttcttcttcggcggaccgttggtcatagcctgcgttgagatatgcctgcaccttgcggttgtaaagcccctgctggtagctgattgtgcggtaggtagaaaccaccataatcgggtagcctgcccgtttagcgtctgcaagcatctgctcaaaatcgtcggcggcacgcacatcaaataatttttccgtgccggctatggctctggtggtaacatcaaaatcgctgtccaatgggtgatttacatttacaagggttgtaaattcgttttttgcgggctttgggtttgtctcctcagaagaggagttttcctgcgacgagctgtccggggttgaatcggaactttggctgtcggaagtcaccggggtttgggatgaagaattttcaaccccggagcctgtaataagcccgaccaatccccttattgccagcagagcgataacacccaatacaatggttatcaaaattgaactgccgtttttctttttgcttttatttgatttataagtagccatatttactttacctctttaattcatttcaccaagccggtacataaccagtgcagtgccggcaaccgcagcagtttcacagcggagtattctgttgcctaaaagaatattttcccggccgacggcagacatctcatcggcttccctttggctgaatccgccctcgctgccgattattaccgcaactttttcccgatttgtaaagtctacggaatttaagggctttgccccttgctcgtagaacaagatcaccttgtcgaagccttttaacattggcaaaatttgtttaaatgttgcggtgggggcaactgccataggttttgaacgaccgcactgcttgcaggcctcgtcgcttattttttgcaaacgccgtgttttggcatcgtcctttttgcttttttgtgccacacagaattcacttacaaaaggcacaaagttcacagcgccaagctcgcaggatttttgacagataaattccaatttatcggatttaggcaaagccataaatacggtaagctgttttttcggctctgcgggatttgagaatttctcccggatatgaaatatcacttcccgtggcgttacctcttttgcggtgcatttgtaatcaaagccggcgccgtctgtaagggttacacagtcaccgggtttaaggcgcataacctttgcaaggtgggcggcctcatctcccgttacaaatgctttgtcgccatcaacggcggttaaaaaatatcggtgtgccatattttctccttatatggtggcctcaatgcaaacccagccgtttttctcgtgaattttaagtattttaagacccaaagactgtaattttgcaacaacctcgtcttttcttgtgtcgataataccgctggtgatgtacaaaccgccctctttaaggaaattcttaatcgtttcggaaagcatcataaccgcatttgcaacaatatttgccacaataatgtcatatttgcctgtggctttgtcgcttaaatccccgactataattttaaatttatccgcaacgccgtttaattgggcgttttcttttgcaacttttacggctgtggggtcaatgtcgataccctcaacttctccagccccaagcaaaattgcgccgatgcccaaaatgccgctgccggtgcccacatccaaaactctctcgccgccttttatgctcttgtccaaaacttcaagacaaaggtatgttgtttcgtgggtgcctgtgccgaatgccatgcccgggtcaagttttaaaacttttctgccggcaggggagtattcttcccaagaggggcaaaccgcaagcttttcccctatgtccatagggtggtagtattttttccagccggtttcccaatcttcttggtttacatattcaatttcgcatttgtatgtaacgcccagttcatcaaggcggttttcaagggtaaggcgggcgttttgagcgtccatttcaggtgagatatagtgatgtactattatctcatttctgtccttgtccaataattcctgttctataaggtcaacatgagcgatgttttcaacctcttgttcaaggtcggaatagtcctcaatctgtacgcccatagggcagatttccgcagagacgaaatcaaagatgtcctcaaactttttgtccgttattattttaatgtcagtccactgcatacagcgtcctccttttatcactttatgaaattgtatttaatataatgattatatactataacgcaaggcaaaatcaactgaaaatgggaattttgcgggaattttgcgggaattttccgggaattttgcgggaattttccgggaattttgcgggaaaaagtcgggaggaaatttaccctgtcctacgctataatataaaccgtaagctgcagattacaaaacaaacaaaaaaacaaaattaaattttaaagaaagcaggtaaaaatttatggcttatcaaaggggaaaaacttattatcttgtaccgagattttgggtttccagtacaacatcaagagaaaatatcttaaacaaaaaaacgaaaccccttgcacttaatacaaaaggcacgggtggtcactacaacaacagggactgcaatttgtggacattggattacagcacggatatgcagtggaaagttgaaataccggcggaaggaggttacgcaagaattttatgtgccggcgacatatcttacggcctcatctttcaaatgtatagatccttggggaacggatgaaaacaccccaaacggaaatgattgtgctttatctaactcatcacattttgttgcaatcagcgcagtagcatattataaataaatttgaataatttttgaaataagtaaccctaatttgtttttcataagcagattagggttgcttgtatttttaatttattttaaatcatcataataaggcagttgatcaaacacccacttgttattttcttttacaagcctaatttcacaatcctgaatatcactcaggtcatcataataaaagcttattttaaaggtcgcacttttaccgtttgattgtatgatttcaatgctgtttacatcatatgttgcccttacaccgccataatcaaaatacggccaaacatacaaaccgttatcagtctctatcatatacggtgcgtcctcatcttcaaacaaattgaaaaaatacttttctgctactctttcgctgtaaacagacaaaacatactcttttatttggcttattttgttatagtttttaactttcacatagtcatagcgagggtagggcgataattcttttggtaacatttcatcagcagtttcgctgagttgtgcaaaaaataaattcatgtcggcggcctcttgaattttatgagcagtatttaaaatgtcggttttattatctcggcaggcacaaaatgaagtgaatatgcacacgcacaacagaaaaagtactttaaatgttctattcataaaacttgctccttatcattctttacaaactgtatcatcataaatacggactatatctccacccgttattttcataaatcattgtataatcatagtattccgggtagtatctgtcggggtcatatttgtcggggtcggtgtacaatctgatgatagccgttgtatcgcctctttcgatgatttctccttttatataatcaaaacacggtacaatacttgttccgtttggactggtttgtatatacagtttgccgttaatatcttttagcataggtacatccaacaagcaatccggtccgtcaagaagaggcaacaaataattttccacatattccgcagataaatatttttttgcgcagtctgtaaaatcttgtatattatcaaattcccatacaggggcatagttatatgtcgaggtataggtttctccgttaaaagtgtaacttagctgaacaggcaaaatttcattttctgtatagtaatttaaatccggcgaaagtaaccaaagggtataattgcggttttccgctatatcttttgttatatttataaggttatcgtcggaaatatatcggtcggcggcatagccgtaatcgtatttattatcatctttttccacatacagtgtagccacattgtcaaacaaataattgtctgtttcgtgatttttgataagcgttatttttttataaacacatctgttatcatttcttattaaaaattttaaatgataaaaaatttccaaggtgtcatccgagattttgtaatcgtcaaaaatacaagtcgataacggattataggcagccgatatttttatcgtattgtcttcggcattatatgagtataatttgccgaagtccatttgagaaatatcaaagtattttgaaagatattttttaaactcatcaaaagatactgatgtatcggcagacgttatatttttacaattggcattttcgtaaaaaaaatacaaaaaattttcattcaaatcatttgcggaacagttgtttttcagtattccgccatcgtgatacacatctaataagtttttgacatctgattgagtgagtgttgaattttcgtttgaatttgaaatttcggcacaagcacataaaaatgcaaggcaaaaaataacggaaagcagggctcggattgattttttcatattttaaatgcctccttgcaatgaacttttgttatgaattacaaatattatcaaaaatataggcttgttttgggctgtcataaatcaaggttattactttactttgaggttgactgtcatcgcctaaaagaaattccaaatcgtaaaatattgttaatgatttatcggtaatgtcaagacttttaaaggtgaatttggttgtaagtccgtcggattctgtacagccgtttaaatcgagtgcgtctttatctttttcataataaattgaattagaaaagtctatatcggatatatcgaaaaaagacgacaaataatttttgcaagtgtcgatacttacataaaaatcattcggatttgaaaattctgaacattttgtatagtaataaaattgaacaaaatcgtttacatccaattgttttgcattgcaatttctctgtaatattctaccctcgtgatacacatctaataagttttcgacatcggattgagtgagtgttgaattttcgtttgaatttgaaatttcggcacaagcacacaaaaacgcaaggcaaaaaacaacagaaagcagggctcggattgattttttcatattttaaatgcctccttttgataggtcacaaaatagcggtgtttatttaaagtatattatattgtataaaaattgtcgacttaaatattgggattatgtttccacccgttattttcataaatcattgtataatcataatattccgggtagtaatggtttgggtcggattttttagggtcggtgtaaagacatgcttgtttcattttggttatgcttttccgttgttccgtttaaatatacagtgtagtaatagtctgtgcttgtcattaccataaaaaagtatctgtctatgttatatacatctgctgtatcacctttgctttcggagagtgctaccgatagttccgtttttggaaaatagacaaccttatctttttcattgtgaaaatatttttcgccgcacacattgttttttattataaaatcatcaaaattctcattgttttcggcaattaccgccttaaccgcatcctccaatgtcaaaattttaaaattgtcttttgataataagttattctctataacctcataaaaacttttaaaatattgttccggaggcatattaaatctgctgtctccttcaaaagacgggtatctttctgtgtacaaatcgcttatttttatcggacttcttgtttttacatagtgatttccgtcacttccggtaacatagaacacaattattttttcgcccacatcataaggggtgtccatttcaagactgccgaccatatgatgtaatctgcccatgacagcattttcttcttcggtatcaaacatctccgtttcaccgggatatttgaattcaaattgagctccgtcatcacacaagatgattttataattgtctgttacagtaccgattttatagtctatatcatgattaaaatattctaaaaattcgtcaatttttgattgatttattccgttaatgccgttttcgtcattaaaatcggaatttgaactgtttgaattcacagaacttgtgttcggtaatgaattgatacatgaacataaaatagatagatataatgcgaaaaaagaaaatattttaaatatttttctcacgatgtcctccttttgggaaagtgatatatctttgaaaatattacacaataaacttagcacagtaaaaacaataaaaccgtctgttttacaatggggtaaaagatttgtttaataatctcgttttccacctgatatactacatttttccatatagttgaatttccacacatcgttttcttttaccagttcaacgagatagccgattttacgctcaccatcggttcccaatatatacaaaaatgcaatttgttcatcgtttgccgtgtaaacatcacacagttccgtatcatcatcttttccggggccggaatacggtccgtctacatctattgccgctaaatacccattgtaatttttgaacgccctgagaacacgagcggtttccctctcggtgcaaaattctgaaagctttttttcaaaatcagtgtaattggcttttgtaaccatgtaacgacaaatgcggggatcatcttccgaatatgctgcatcaaaatacacatcatttccgttttcatctgttaatcttccgtactcttcttcaaattgcccaaatccgatagatgtgggagatgtaagtatataccaaagtaaatcgttattttcctcataaaccttttttgcctccggcggcataaaggaaagatcgttgtatttttcgtaagtttcggaaatcgcaggggcatactcgctttgagaagatgtgtcgctgcttgaagtgccgttttccgattgagaagatgatatttcgtctatttggcttgacgatatgtcgccggtttggcttgaaatattatcaccggaactgctgtcttgctccgtcttaacacaggcggaaagcataatggttacggcaagggctataaataaaaatcttttgttctttttcataatgtcctccttttttaaaaggtaatgcatctttataactattatacaataattttaaacttacagcaacttaaacaatacaatatatcaagtgtcggctgtgatttattcggttttccgtgtattatattgtttaaattattcaaatttacagcgcagttctaccacaacaccggctattgtaaccggcaaatttcgacattcgattgcggtgtagtgaattggaaagtattctgtgtttgtgggaatcagggttattccgtcccggtcgaaaaatacttttttaacggtggcttcctctttgcctacaagcacaagtgcaatttgcccattgtgcgcagtgctttgcctgcgaataataaccgtatcgccgtcgctcattttaggctccatgctgttgcctttaattttcaaggcgaaaaaatccccggttctggcaagattttcatttatattttcgtaacctaaaatacattcttccgctgtgtttgggtatccggcacggacatagcccacaatcggtatttctttattttctgcgggcagtgaaaaaataggggctgaacctataagttcctcaaagcttacgccgaagaaatcgcacattttggcaatggctgtgtagtccggtttgcgccgaccggtttcccacatggctacggtgctggtggaatagcctatcatctttgcaagctgggcttgggtaagcccttttctttttcttaaaatggcaatatttttcatatgttcacctctaattctattatatcacaaaaagtgataaaacaaaataggggaatatacaactaaaaattgttttttaaatagtgttgacaaaatatagtagttagtgatatacttaaaatcacaaatagtgaagttaaacacatagtcggaggtgtaaatatgtataagcatgcggtgattgatttgttaaacgaatattctgttttaaagcgaaaagcgaatttttcatggaaaagagcaaaagagttaaagcaaaaacttgcggaaattgaaaatgaaggtgttatatacgaagaaatctacaatgaatatttagaatgttgcagagattattacaaggcgcaaaaagccgtaagtgaaacagagtattacctgtcttttttggaatatgaagagcgaacggctttggaatacttttatataaacagagggcctcgtgcggcggacaggctgtgtatgaaactttccgttgaaccaagtactgcttatcgcataaaagaccgtgcaattaaaaagatgattatgtattgtttcggcgcagggaaaaattgacgatttaaaaattttaatgtattattcaattaagaggtgcaattatggaaagatgtaaatggtgtttggaaagcccggaatatatgcggtatcacgataatgaatggggcagacccagccatgacgacagagaactgtttgaatttttggttttggagtgtatgcaatgcggcttgagttggagtttgattttgaaaaagagagaggcgatacgcaccgcccttgcaggatttgattatgataaactttccacatttacacgggaagatgttgaaaaatcaatgactgttgaaggaatgataaaatcaccgcaaaagataagagcaatggtagaaaatgcaaaggcttataaaaatataatcgcagagtacggcagttttgataaatatttatgggcttataccgacggtaaaacactttgttataaaagtcggcttttaggtgtgccggtggcacaaaatcggttgtcacagaggttcagccgtgatatgaaaaaggcaggttttaaatacttcggccctgtggttgcctattcgtatttgcaggcagcggggttgataaacgaccatgcggaaaactgcttttgccgccggcagataatagaaaattatccgattgaatttgttgacgaatgatttttgtgaaacttttgaaaattacaaaataaactgttgacaaaattgctgtgtgctgttataatatatcttgcttagagaaaagcacacagttaaatatcgcggagtggagcagtctggtagctcgtcgggctcataacccgaaggtcattggttcaaatcctttctccgcaaccacagccgacttaaacagtcggcttttttatgttcaaaaagggttatgagaccggccagcgagctcgttgggttagcgaggtgaaaacagttctgtgaactgttttctgtgagcggtgtcgcccaaagtgggagccgacagagccgagaggcgaaaggcggcgacacacgacggcgaccggcacggagtgataacccgaaggtcattggttcaaatcctttctccgcaaccacagccgacttaaacagtcggcttttttatgttcaaaaagggttatgagataggttttattgttaaacccggcgcaatgctgtaactttaagcgaatatctgtgacatatttcgactttaagatatcgtatttcatccttgacaatataaaaattttatgatatattctggttaggcagtgataactgctatattttataacaaatggttagcatatgctaaccaagggagagaataatgaaaaaaattttatctgctgttttggcgatgtctgttcttgctctgtcattggtaggatgcagcagccggagcaattccgacagtgttgattcatcatctgttgacagttcttccgcagaaaattttggcgtttggacagaaattgcaggggaaaacggcacaacttatccgaacttatttaaagttattttaaatgatgacaactattcctattggtatgactacacggctgccgttgtaggtgagaacgccgcaaaggacacagttgactatttgcagggctttatcagcgccgatatttacggacaggaagctgttgacgcatattcacagggagattcattcctttttgactgctggtatattaacgatgttgacacattcagatttgaggacaacaccgctacaatcacaaaaatcgacggtacaagtgaaactcacgcttacgaatatttgggcgtttatcagattggcgaaaacgaagttatgaaatatcagggtcaggaattctgcccggcttttgatgttgatgtttacaagtcaacagatgccgcaggcgacttcacatacttccttttccgtgatgacacaatggctacaacatggcatactgaattcagatacggtgacgaccttgaagaattgcagaaatacttggagggtaaatacgcatactggctctgtgcaggtatttccgaaaatccggacaaacagacattggaagatgtaatttctttgttctgtcttgaaaatatggattactctgcagaacgctcagccgaaaatcttgaacaaatcagcgaatttgtaggcacttgggacgcagatttaagcaaccggggcgaagagtccgcaaatacagagctttacaccgttattgacgaaaatggcaacggcgagacatatacggacggcgaaaagacagccgaatatgccgcttacgcttatgacaacggtgaaaaaggcgacggcaagggcatttatgtggcacataattcagagggtgaaacaagccacgccgaatatacaatagaagaaaaagacggcaagacagtgcttacatttacaaatgatgagggtacaatctcttacatcaaaagataacaagtagatacaagataatggctgcgcttttgcgtggcctttatttttacacatactatatataataaaacaaaaccgcatctttcgatgcggtttttaattgatttagataaatattatcaacagtattttaccgtcaactcgcaaatatctgcggctttgtcgcagtattctgcggcgtcaaagtgctttacaaccaaagtttcggttgcctgttcgtctgcattgtcgctcattgcacgaatgataaggaacggtatatcgtttttgcaggcaatgtgggcgattgcggcgccttccatttcaacgcagtcagggtcacaggaagcctttatagcgttctttgtccgtgtgtcacctacaaatttatcacctgtggcaattttgcccacaatgtattttgtatttgtttcctcacaggctctgccggcggccttaataaggttttcgtcgcctttatagctgtcaagatatgggtagtgctggtcaatcattgtgatttccgcatcgtgatatacaacctcttttgaaaggcaaacatcgcctacgcctattttgtctgtcatatttcccgcaataccgctgaacacaatggcctcaatgccgtattttgtaatcataagctgtgtggcggcgccccgggcaactttgcccataccgcattggcacaaaataactgttttgccgtgcatatcgcctttaaaaatgtcaagaccggctaccttttcttccgaaagatttgaaagtcttgattttaaaagtgcaacttcctgtggcattgcaccgataatacctattgttttcatataaataattcctgttctttttaatttttgtaaaaatctttgtcccatgggtctttttccggcggtatacatttatcccacggttcgtggccgtcataaatatgactgaaatgcatattttcgcccctttttaccttgtgggtgtaccgggtcttttttggtcgggcagtttgccttacatcaaaatcacggttgaccgcacctttttttgtttgggtgttttttctaagggcagtttttaaatctcccgttgaaaatgcaggttttaaactgccgccggcgttgccttttttcttgttcacagcgccgataattccgaatatccaaaaaatcgcaacaataatttctaaaccgtccatcttaaaccccctttaagatttattaaacattaaagcggaacaatgttacatcgccgtcctgcattacatagtccttgccctcgctgcggataagacccttttctcttgcaacggccatggatttacatgccataaggtcgtcaaagctgataatttctgctcttataaagcccctctcaaagtcggagtgaattttgcctgccgcctgaggtgcctttgttccttttttaatagtccaggcacgaacttcctccgggccggctgtcaaaaagctgataagtcccaaaagtgagtagctctgctgaatgagtgtgtcaaggccggagacatcaagacccaattcgtccaaaaattctttcttttcttctcttgaaaggccgtttatgtcctcttccattttggcgcagataggcagacagccactcttgtcccgccgtgctttttccttaaccttagggtagtaggggttgttttctatgccggagagcaaatcatcgtcggacacattgcaggcgtaaataaccggctttgcggaaagcaaaggcagttcgtcaaaccaggcctgttcgttgtcgctccggggttcaaaacttctggcgtttttaccctccataagaaaatcacggacgcttgtcaaaaagtccaccttatcaaggagctttctgtcgccttttgcggcattttttgttctgtccaaggctctctctacgatttccacatcagagaggataagttccaaatcaatggtttctatatcacgcaaggggtcaacggagccttcaacatggataatgtcggtgctgtcaaagcatcttaccatatggataattgcgtcaacctcacgaatatggctcaaaaatttgttgcccaaaccctcgccgtggctggcgcccttaacaaggccggcaatgtcaacaaattctattgtggccggtgtgtactttttagggttgtacatttccgcaagtttgtcaaggcgttcgtccggaacggcaacaactccaacattaggttcgattgtgcagaaagggaagtttgcgcttgccgcacctgcgtttgtaatggcattaaaaagtgtacttttgcctacattaggcaaacccacgataccgagtttcatatttattaaatctccttttacgccgaaaacaatctttcggcagtttacttaattgtatattgtaagtatatcatactgttttatttttctcaacaaattttgcaaaaatagccagtgcggctttttgaataaacggaaaaagaaatttcaaaaattttttcacggctaattctcctttcacttgccttaaaaccaagtattgtctatatatttattgtaacaaaaacaagttttggtgtaaatagtgcaacggataaaggaatattaaatttttataaaccgaagtcacaaatgtaataaattgttttatattgataaataaagtaaagaataaacaatgaaaatcttttttaaaatattaaaaatcgtaaagttcataaaaaggacacaaaatatataataaattcttgacaaatacaaaaattggtaatacaatactttttgcgacttttcgcaaaaactaaggagataagaaaaatgaagaaagttttatcagttgtactggcactttctatggctctcggccttgccggttgctcttcaaaaaacgcttcaaactcagtttcaggcacatttgaaggcacagcaaaaggtatgcagggtgatgtagttgtttcaatgacagttgaaaacggcgaaatcaaatccgtagagcttaaagaatgctcagaaacaccttccgttgcatcagtagcaatggaaagaattccggcagaagttgtagaatatcagacttatgaagttgatgccgtaacaggcgctacactttgctcaaacgctattatgaatgccgttaaggacgctgctacaaatgcaggcatggatcttgacgcactcaaagctaacgctcaccacgcagaagctacagaagacgaaacacttgactgtgacgttgtagttgttggtgcaggcggcgcaggttactcagctgctatttcagctgcacagaacggcgcaaaggttatcatgattgaaaaatcatcagttgcaggcggcaacactcttatgcagggcggcgctttcaacgcagttgacaaagaagcatcagcacggagaattacttcagttgccgagctcaacacattgaacggctacttggctctttcaaaggacgacgaagctcttcacttcgaccagttccctgaatgggcagatgttcttgacgaacttcagtcagacatcaaggctttccttgcagaaaacgcaggtaagaaagcaggcgaagatatgcctggctttgactcagttgctcttcacatgtggcacatctacacaggcggtctcagacagatgcttgacggcagatgggttgcatcagacatcaaccttgcaagaacacttgcagaatcagctcttgattcatacaaatggacagttgatgaccttggcatcacaggcgcttacggcgcagacgcaggtctttacacagttctcggcgctatgtggccaagaacacacaaatttatgacatctactccgcttatcgatcagctcgataaggttgctaaggaatacggtgttgaactttacacagaaacagcaggtaagacacttcttacaacagacggtaaagtttcaggtatcgaagcagaaaaagcagacggtacaaaggttacaatcaacgcaacaaagggtgttgttctcgcttgcggcggttacggcgcaaacgcacctatggctaaagaatatgacaactactggggcgacaacctttcagaccgcacacttacaactaacgtaggtacaaacacaggcgacggcatcgttatggctcaggaaatcggcgcagacacagtaggtcttgacgttgttcagcttatgccttcttcatcacctatcaagggtacaatgacagacggtatctggggcgacgcttcacagcagatttggattgacggcgaaggcaacagatttgtaaacgaatatgcagaaagagacgttcttgcaaaagcatcacttgctcttgacaacggtatcttctacatcatctacgcaggcaacgaaacaaacgaagacggtttgctcacaggcgcttcacttgacaacgctttgttcggcacaactattcagtcaatggttgacaacggccacgtttggtacggttcaactcttgcagaacttgcagaagcatctaagacatctgcaggcggcgcaactcctgcatttacagaagaagcattgcgtgcaacaatcgaaaagtacaacagctatgttgcagcacagaaagacgatgacttcggcaaagaagttctcgcaggtgctatcgacatcgacgctatcgaagcagatcctaacagaggctttgtaatctcaccaagaaaagcatctatccaccacacaatgggcggtgttaagatcaacacaagcgcagaagttctcgacaaagagggcaatgcaattccaggtctttgggcagcaggcgaagttacaggcggtatccacgctggtaaccgtctcggcggtaacgctgtagccgatatcttcacattcggtaagattgccggcgaaaacgcagctaaataattttagttgtaattaagacacaagttattaagtactcaaataaaaagttcgtccgtaagggcgaacttttttgttatgttatattgtattgtgataaaatcaaatgcagaatataaaaatgatattgtgggtttaatccacaccctctaagttaaaaggcggaataaaactttcactggcggattctccctcctgtataaatccgttttcaacccctatatcaacggcgtaatttaccacattatcgtattcttcccaggttaatttgcggttgatttccgggtaggcggaaaggtcggtacagggggtgtattggctcataatgcttataaaaattttatcgccgtatgtatcgtacaggtactttaccgccttttttgcgctttccgtctgtccgggcataaccaggtgccttacgattacacccttttgaataatcccgttttcgtcaaatacacactccggctgttggcaaaccatttcctcgatagcggcttttgaatactccacataatccggggcagaggaatatttttttgccgttttgttgtcaaaatacttgaagtccggcaggtaaatatccacaatgccggctaacatttttatggtttcggctttttcgtaactgcttgtgttgtacaaaatcggcagtgtaagcccttttgcctttgcaagctttaccgcctgtattatttgcagtgtatagtgtgtgggggtcacaagatttatgtttaaagccccttgactttccagccttaaaaatatatccgccaggtgttcaacggttatttccttgccgaagccatcatgggatatgtctttgttttggcagaacacgcacttcatattgcagccggaaaagaaaaccgtgccgctgcctctctcgccggatatacaaggctcttcccacatatgtaaagccgcacgggaaatttttaccttgtccgtcattgagcagtatccggttttcacactgcggtcaatattgcagtttcttgggcaaatattgcaaatactcattataaatcaatctccaaaacaacggggcagtggtcgctgccggttacatcggcacgaatttccgccttctgtattttatctttcaggctgttcgtcaccacaaaatagtctatacgccaacctgcgtttttctctctggctttaaagcgatagctccaccaggagtaagctccctccaaatccgggtataaatgtctgaatgtgtctgtgtgtccgctgttcaaaagccgggtgaacttttctctctcccggtcggaaaatcccgggttctgtctgttggtctttggatttttaaggtcgatttctttgtgtgccacattcaaatctccgcacaggataaccggctttgtctgttcaagggtaagtatgtaatttctcagcttatcctcaaattccatgcgataatctattcttgcaaggccctctttgctgttgggggtgtagcaggtgataagataaaacttttcgtattccagggttataagcctgccttcgtcgtcggtgtagtccggcatgccgaattttgcgttcaaaggcttgtgttttgtaaaaattgccgtgccggaatagccttttctctcggcactgttccaaaactgctcatatccgggcaggttaagttctatttgatggggctgtaattttgtctcctgtaagcagaaaaaatctgcgttctcggcagaaaattcttcgttaaatccctttcctatacaggctctcagcccgtttacattccatgaaacaaacttcataattcttgaaatctccgtcttttatttttgctattatactatatttggcaaaagttttcaaattattgcataaaatactcccttatgttaatatataactattaaattttggaggctttatatgatacctgaggaaaaaagacaggctgcggaaaaacttgtaagttttatgccctactttgtaaatacaaaatatgaagatgccgttcactgggttaaaaacgacagcgagcttggctcggtaggggaatcttacccggtttatgaaaaagagtttgcggatattattcgctttataatcacatcggggcttatggacccttattacggaaacacaatttcccagagctttggcggcgaggctgatttcggagagatggtagacgccttggactatgcaaaatttgaagtttgcgccgccttgcttacggcaataatcaaaaatgaggaatatcgtgagggctctgtggcagaggcttttcacgaaagatggttttacaccatactttacagaataaaagaacttttggaagaagagtaaaaatttgaaaaatacaagtaaatacaaaattgtttggattttaaccttgcggctgtctttggcgtatgtgttttttgcaggcaaagccgcaagaggcggaggaacaagttactattctcaggttgggtcaacaaatatcacaaaggcgaaagttacggaaattttagacgaaaattacgaaaaaaccgcctataaagataacgaatatatgaccgacaggatagttttgtttaccgcaaaggtgacatccgggcttaaaaagggtatggaaattaccgccgtacaggttatagacagtatgtacccggtggagcaaaaacaggtgcggaaaggggacagagttctccttgcacaaaaccaatacacccaaatgagcagtgtaccctatatgttttcggagtattaccgccttggctttatggctgttttgggcgttttatacggcattttgcttattttaatgggcaaaagcaagggggtaaacactgttatttctctgacattgacggtgggggcagtgttttgggtgtttgtgcctgcggtgttaaacggcaaaaacatatatgtttggcggcggtcggttaccttgtttataattgtgatgacggttctgtttatcaacaatttaagcgataaaacatacacagccgcaataggctgtgttcggggtacggcagttacggcggcaatcaccttggcggtgtgctttggtttgcatctttccggtatgataaatcaagaggccatgtatctgctgtttttaaacgaagcaaaccccatagatttaaaggcggttatatttgcctcggtggttttcggcgcagtgggtgcggtgatggacgtggctatttcactttcttcctcccttgcggagataaaagaaaacgcaccgaatatcggggcaaagcaaatatttaaaagcggtatgaatataggcaaagatatgcttggcacaatgtcaaacacattggttttggcctatataggctcgtctttgtcggttacgctgttgctttttgcttataacagcggcaacggcacggcacttatgaacaccgagatgatcatagttcggctacttgaagccttggcaggcagtttcggcatattgcttacaattccattgacaagttttgtctgcggtatattttacggcagtgaagaaaaggaaaatttacaataacacaaattacacacctgtctataatattattagataaaaatagacacaaatgataatttgtctataaaagcagtacagggaggagttatattgacatacttttggcttgctcttgcggtggggcttatagcaattgaagtaggcaccgtaaatttagtgtgtatttggtttataataggcagtgtccggggattgctgactacatttttcacccggtcttggcttattcagctgacggtctttgcggctgtaagtgcaataagcctgtacataacaaagccgctggcagaaaagtttaacagcagacctcatgtgcctacaaattccgacaggcttatagggaaaaatgccatggttgtaaaaaagataacaccggaagaaaaaggcagggtgtccgttgaaggccttacatggctggcccggtgcaaagaagatgtacggcccggccgggaagtaaaaattttgaatatagagggcgcaacattgatagttgaaccctttgtaaaacagtaagcgcacagcgcttgcacacatataaaaggagagttatttatgccattaccgattattattcttttgattttcattttgataatcattgccacaaatgtcgttatagttccgcaggcgtcggaatcggttttagaacgcttgggcgtttacaacaccacatggaccgcaggcgtacatctaaaaataccctttatcgacaggattgttaagcgtgtaagccttaaagagcaggttgtggactttgcacctcagccggttatcacaagagataacgttacaatgcaaatcgacacagttgttttcttccaggttacggatgcaaagctgtacacatacggcgttgaaagacctataagtgccattgaaaaccttaccgcaacaacattgcgtaacattataggcgatatggaacttgaccacacacttacatcccgtgatgttatcaactccaaaattacaacttctttggacgaagccacagataagtggggcattaagatcaaccgtgttgaacttaaaaacattattccgccgagagaaattcaggacgctatggaaaaacagatgaaagccgagcgtgaaagaagagaaagtattctccgtgccgagggcgaaaagcgcagccagattcttgttgcggaaggtgaaaaggaatccgctattctccgtgcagacgccgtaagagaacagaagattaaagaggccgaaggtgaagcagaggctatccttaaaatttacgaggctcaggcaaagggtattcggatgattaacgatgccaaacctaccaaggaatacattacattgcagagttttgacgcccttgcaaaggttgccgacggcaaggctacaaagattattgttccaagcgaattgcaaaatcttgcaagcatagcaacatctttaaaagaaattacaaaagatgacataaaagaaaagtaaataaaatatttacgcaaataagcatcgggcggtaacgcctgatgctatttgtataatttgtacaaaaaagtcctttaaattttgtcgtttttttgaaaataaacagactttaaaaaatttgttgacaatatggggcgtaggtgatattatgtgtgcatacctcaaaataattactgaggtagaggttgcgtttatcaacagtaactttgcggaggccggaagcctttgaagcaaagcgaaagggatcgacgccgaaattgcaggcaccaaagtctgcggttggggtcgcactcaataagtgcggaactgtcaacggggtaaacaataccgtactccgttggagcgctatcaaaggtagttgtgttaaggtgtactctctttcttaatttagagtcggtgcatttttaatgcatcgacttttgtattattaggaaaagagaggttttttatttatggaaaacaacaatacaaagcgtcgatttacggtgccaaactcatacgttatcatttttataatgatatgcatctgtgcggttatgacatggattgtccccgcaggtgaatacgacagagctttgaacgaagcaggcagaagcgttatcgttccgggttcatatcacgccgttcggtcaaacccgataggtattatcggcatattcagcgccattgaacagggctttttgcagactgccgatattatattctttataattttcgccttttcatttgttaatatgcttatgaaaaacggcacatttgacggcattatgggcgccgttatcagaaagacaagcggatttaatgtccagtggctttttgttatcattatgatgctcttcggtattctcggttctaccatgggtatgtcagaggaaacctacggtatgtacccggtatttatcggcatggctgccgccttgggctatgacgccattgtaggtgcgtccatcgtttatatcggcgttcaggttggctttgcatctgccacacttaatccctttacggtaggcgttgcaaacggcattgccgaaataacaatgagcagtcacatgcttatctaccgcattatctgctttgttctctttgaatttgttgccattatatatgtatggcgttacgccacaaaaattaagaaggaccctacaaagagccttctctacggcacggaatttgcaaagcttggcacagacaagacacaggaagaacttgttttggctcctcttacattaagacataagctttgcgccttggaatttgccgctacaatcggacttcttgtttggggtgttatcgcaaagggctggtacattgacgaattggctgttttgttccttatggcaatggttgttgtaggtattacaggcggcgccacacctaacgaaatcgcaatgaaccttgtagactccgcaaggggtatgatgttcggcgcacttatcgtaggtatttcaagaggtattcttatctgcttgcaggacggtatgattatcgacaccgttttgtactctctttcaaatatgctcagcggcttctccggcacaatgaatgcggttgttatggtgtttgttcagaacattctcaacttcttcattccttccggctcaggtcaggctgcggtatcaatgcctattatggctcctttggctgatttggttggcgtaaaccgtcaggttgcggttttggctttcagcttcggtgacggctactcaaatatgttctggccatcaggtgttgcaacagccgcaggtcttatgggcttgccaatcaacaagtggtacaagtggattgctccgctgttcggaatattcttccttatgcagattgttttgataacagttgcaacattcttaccattttaattaaattaacgggcgggttttacaacctgccctactttataaaagtttaaaaatattttacgaggtgtaattatgaatacaacagaacttaaaaaccgtgcggcggaaatagctttggaaaatgccaatctttatgaaacagtaagcagaacggtttatgacttccatgaactgggcaacaacgagtacaagtcaacggcatatctccgtgacgaactcgaaaaaatcggatttaaagtgcagcttccctatgcgggtatggatactgccataagggcagaatacggggaaggccacccgaaaatcgcatttattgcggaatatgacgctcttcccggctacggcccggacaaaaaccaaaacggtcacgcttgcggacacaactttattgcggcaaactgctttggtgcctgccatattttaaagcaacttaaagacgaaaccgactttgccggcacaatagtttaccttggcgcacctgcggaagaaacaacagggggcaaggttgaccttgtaaagttcggcgctttggaagatattgatgcggctattcaaattcacattgacggcggcgatgaaactcacacatggccacagacccttgccattgactccgttgaatttacatttgaaggggttgcctcccatgcggcaggcgcaccggaaaagggtgtaaacgcccttgatgccgcataccttacatttaacggtatcaacgctttaagacagcatatcaccccggacgccagaatacacggtattatcaccgaggggggcttggctgcaaacatcgtgcctaaccacgctgtggcacagttctatgtaagagccgaaaacagagcttatcttgacacccttacacaaaaggtaattaactgtgcaagaggcgcagagcttatgacaggcgcaaaaatgagcctcagatactttgaaaactcctttgacaaccttacaatcaaccagactttgaaaaagtttatggaggcaaaccttgtgcttgcaggtgaggaggacaagtacattgtaaaggaaaaacagccacggagcggttcaagtgacttgggcaacatttctcaggtagttcccacttgctatgtaagccttgctgtacacaacccggatggttcttcctgccacgaggaggcatttttgccttactgcggcgtaggcgagcttggcataaaggcccttcacaaagctatccttgcacaggcttacacagccattgatgtttttgcagaccctgattgccttaaataaattgtaatatttgttatattttatcaaaatataacaaattgtgtaacaaaacagtcccttgtgttaatacacaagggactgtttttatatttaaaatattaaattaaaagtaaagactgttttccggtaaaacatcgtttgatgttgcacgaacacccagttttttaagggtttgtgcatcacctgagcgaagcattacggaagaatgtaaatccgcaccacggagtttgggcagctgagcaagggcatattttaccattgggtttgttgttgatgcaactgccaaagcaagcaaaacatcgtccaatttaagggcggaaagttttgagcccaaagcatttctctttaaatcaagcaaaggcgcaagtacctgtgcgggaataagcaaaatctcatcgtttatatttgcgtaatatttaagggcgtttattgttgctgcgctggtggcgctcataacatcgctggccttgccggttataattttgccgtctgtcagctcgtaagcaacgctctgcttgcctgtaagctgggctttaaggtttgcaggggcaacacagggacggtcttttgccggtgtaagggaaagctggtgcataatgttttcaatgcgctcaacctgtgcgtgctgcactttgcccaatttgtaatcgcaaagggcggtgtagtatctggcaataatttcctggcaagcggcatatttgcaggcatcgtcgtcgattattgcgtaaccggccatatttacgcccatatccgtaggggaacggtagaagttttcatcccctgttatgctctttaaaatcatcttaacgataggaaaagcctcaatatcacggttgtagtttacggttgtttcaccgtatgcctccaagtggaaagagtcgataaggtttacatccccaaggtctgccgtagcggcctcataggccaaatttacagggtgtttgagaggaaggttccatataggaaatgtctcgaacttggcatatccggcaaatctgcctctcttgtgctcatggtaaacttgggacagacaaaccgccaattttccgctgcctgggcccggtgccgtaacaacaacaaggggttttgtagtctctacaaattcatttctgccatagccctcatcgcttactattttatccacatcacttgggtagttgggtatggggtagtgtttgtaacttcttattcccaaattattaagtcttgctataaagttgtccgccgcaggctgatgagcgtactttgtcaaaacaacacctgttgtctgaatatccatgcccttaaattcgtctatgagacgaagaatatccatatcataggatatacccaagtcggctctcacctttgtcttttcaatatcgtcggcggaaatacaaaatataatttccgtgtcactgctcaatgctttgagaagttttatttttgtgtccggctcaaaacccggcaaaactcttgacgcatggaaatcgtcaaataatttgccgccgaattcaagatacagcttgccgtcaaatctttctattctctctttaattctccgtgcctgtttttcaacataaagctcgttgctgaaaccttgtttatacatacctttcccctcattcctttttacaaataaatcttcaaaattatatcatttatccggctttaaaacaatgaccgaccgttgagaattttttccgcaaaaccgagcagtatttaggtaagttatacaaaatggcgcagctgagaaaaagttataaaaacatccacaaattttttgaaaaacctattgacaaagttcataagtgagactaaaattccagtgataacattcttaaaaaggagataaggtatatggctaaatacggttgcattgactgcggttggatttatgacgaagatttcggcgacgacgatttgggtattgaacccggcacattgtttgaagatttgcctgacgattttgcatgccctatgtgcggttgttcggcggaagactttgagattgttgattgattacatcataaaataacggcagggcataagtcctgcttttttgctaatatttttgaggtggtatatggaaaagcccggtaaaagccggataaaggcacttgaaatgcttaataacgcaggttttgaagcctatcttgtaggcggcagcgtccgtgatattgtcatgggcaaggcccccggtgacacagatataaccacagacgctttgccacggcagacggaaaaggtgttccgaaattttaaagttgtcaaaacggggttaaaacacggcacagttacggtttttattgagggagagccggcagagataaccacatatcgcaccgaaggtaagtacactgatttaagacatccggacaatgtgacttttacccgtaatttaaaccttgatttacagcgccgagattttaccgtaaatgccctttgcatggacaaaaacggcgatatagtcgatttacacggcggtatagccgacattgatgaaagaattataagatgtgtaggtgacccggagaaaagatttgccgaagacccattgcgcattttaagagctgtcagatttcgggcgactcttggctttgaaatagaagaaaacactcgcagagccgccgaaaacaaggcgtatttgattgaaaaaatatctcgggagagagtatattccgaatttaaaaaggccgttgtaggggcttattttcccactgtgttggaacagtatcggaatattttggatgtgtgtctgccgggggttcttgctatgaaaggctttgaccagaaaaatcaacaccatatttatgatgttttgacccacacatcaaaagtaattgaaaatgtaccgcctgtttatcctttaaaggcggcagcactgttccacgatataggcaagccgaaaacctttacagttgacgaaaacggcacagggcatttttacggtcacaataaaataagtgcccggataacaaatgaaattttaacgaaattaaaagcgccgggtgaggaaaaagaccttatatctcacttggtgctgtaccatgacacggctattgagcccacggaaaagggcgtcagaagggctttgaataaacacggtgaaactgtattgaggatgttgctgcggcttaaaagacgggataatttggggcaaaattatgaggtttacaatcacagccgatactatgacgaaatagagcaacttatagaccggcaaattgcaaaagaagcctgtttcagccttggacagcttgcggtaaacggcagaaacttgcaggaaataggcgtaaagccgtcgccctttacaggggagattttaaacacattgcttgaaaaagtgatagacggccggttgccaaacgataagcaatcgcttttagaatttgccaaaacgatgataaaacataaaaaataaacccccgaaaaattttcggggggggacaaattataaaatccagtctttgtcattggggatacattccattatatcgcctacatcgcagtttaaaattcggcacaaatcgtttattgtggtggttgtaacgggtttgttttttctgagtttatcaatagttgaagaggatatgttgtgttttttgataagggtataggtgctttcacttgatgctttcagcgttcgccaaaaattatcgtaaacaatcatacaaaacctcctctaaattattttttacataatagagtatggtcttgttgttgacaatagtcgtaataaagactataattttataaaagttataaaggcggtgattttatggaaaagaaaaataccgatagagaacaccttacaagattggaaaaattaaaggaacaatccccccaagagcaaaaagagcttttggaaaaaggcaaaattacccgattgcagtacgaagtaaacaggcggattaacatcaatataccaaaagacaaataaatataagcattaaaaaaacgaacccttttgtgggttcgtttttttgtatataacttaatccagttcaagtttgccggtgtaaagctgataatatttaccctgctgccggataaggtcttcgtggtcgccacgctcgataattctgcccaattccaaaaccataatggcgttgctgttgcgcactgtggaaagtctgtgggcgataacaaataccgttctgccgtacataagggcgtccatagcactttgaataatgctttcggttcttgtgtcgatactgcttgtggcctcgtccaaaataagaaccggtgggtttgcaactgccgcacgggcgatggacaaaagctgtctttgcccctgtgaaaggcttgcgccgtctgcggtaagctgtgtgttatagccatcgggcaggtgcttgataaagctgtctgcattggcaatcatagccgccgctttaacttcttcatctgtggcattgaggttgccgtaacggatattttccatgattgtgcctgtaaacaggtgagtatcctgcaaaacaatgcccaaagaacggcgtaaatccgcttttttaatattctttacatcaatgccgtcataggtgatagaacctttttgaacatcgtaaaaacggttgataagatttgtgattgttgtcttgcctgcgccggtagaacctacaaaggcgattttttgacccggttttgcgtaaaggttaatatcgtgaagaacaattttttcatcggtgtaaccgaaatcaacatcgtggaacttaacatcgcctttcagttcaacatagttgatattgcccttttcgtcaggtacacgccatgcccaacggtttgtatctgtctgtgtttcaacaataacgccgtctttaacatctatctttgcaagggttacgttaccgtcgtcaacctccggcttttggtcaagaatatcaaatattcttcctgcgccggccaaagccattacaatggtgttaaactgctgtgtaacctggctgataggcatattgaaactgcgcacaagctgtaagaaagaagctattgtacctaccgtaacgccgcctataccgctgattgccataacaccgcctacgatagcggttattgaaaagttaaggtg

SEQ ID NO: 4435 - DNA, 2158 bp, Unknown
  16S sequences of unknown bacteria
ccgcgcagcccgttggcttgcagcccctgacgctggatcagcacgaacatcatgagcgccagcgcaagcgtcacgctgaggttggccgtgggcagcggcaaagcgagcagccccgccaggttggacaacgccatcatcacgataagggtggcaaagaaggcaaagcgccttccggacatcttcgatccgcacaggctgcggcacagcgcatgcagctgcagcgcccacagcgcgatcccctgcggggcctcatgcggatcaaggcgagccacccgcctgccggcaatggcgaaaaacacgatgagacatgccgcgatcgacagccagaccagcaaagacggcggtacatcgatcacgaagatcccgcatcgcacgatcatgcgatcacctctccttcatcacgcagagcaggatgctcagcttatgcgccagcagtccggccagcacccacaacggatggatcccgccctgcatggccaaaagcagcagcgtgccgtaaaacagccagcgcaggacatagtgggcgaagacggcggcggagcgtgtatccgcacacagccgctctgccatcgcgcagatcatgaaaaacccgatcagcccgcccagacagccgatccatatccccgctgcgcatgccggaaacagcatgccggccaaggcggccatcaacagggaacaacggatgatctgccgtcggtatcgttccatccgttcgcatcctttctcatctgccccttagtctggccgcatctcagcgttctatgccaaagcagaaaaaaaagcagacgatcagcgatcatctgcccgctctgtcgatgcgccgggctcccatggccaacaggctgccgatccacagcatggcggccatgatggcaagatagtcccgaaaaaagaagatcagcggctcctcatcatcaaaaaacacgaaaggcgtcttcaggaagagataatccggaaggtcccggctgaacagcgcgtaaacgccccacagcgcgaacagcgtgcccagcgtccatagcaagatcttcctgcgccgggaaggatgggaaaagcgccggaagatgagcttggtcaccgtctgccaatgcacgccgaggtgcaggcccatgaaaagaaagccccagtaagcagagagcatatgcacgcttcggcccagcgccagaccgccgctgatcggcagcagggcgaatacctcgcgcgagatcggcaccgcgctgagcatgagcccgagcatggcgatcagcacaagcgccgcacacacgctctgcaatatgcggtaggcggtatgcttcccgctgaacaaggccctgctccagcgccggttgaagacatgatgaagatagatctccatgatatgggcaaagacgccgaagctgctggataacacctgcggcatgctgcaaggataggatggatccatgagggcgaagcgcgggttcagcctagggtagtcccgcgcgcatctgacgtgcttttcctcattggtgatcaccgctctgccgctacatgcgctgacgatctcagctcctgcggcgatgacgcccagcggaagcggatcgacgctgatcacgccgggatgcgcccaataatcttcccagacatcatgcgcacagcgcgcggccagcgatatccctttgccgcagtcgatcacggcatctatgccgagcgccaggatcatgtctgcctcgctgaccctggcggcgtctgcgccggcgagcacctgacgataagtcaaggcagatgagaccccggaaaacaccgcggcgagctttccttccccacgcaggatggcgcttacttcttcgcctatgccgctgcggctgagctctccgcgcgcacagacgagcatcacccgctgatacggcgcgcagaggctgccgagatattcccgcacacagcctctgccgaaatatacgctggtctcattttgaaagatgaagttgcgcataagatccttcctttcccgctcacatctgcgcttcccagaaggcgacggcctcctccagccagccttccgcttctgttcctatgcctaagccaaacccatggccaagcgttggataatgatgaaattccacagggatgcctgctgcggcgagcgcggcgatgcgccgctgcatgacacgccagttcgcgatgccgtcttgttcccctgcgc

SEQ ID NO: 4436 - DNA, 16513 bp, Unknown
  16S sequences of unknown bacteria
tctcttccgcgccgcggcaatcccgatttcgggcattcagttcattaaaaaatccggacacgacagaaaaggaggatacggatgaaatcgatacataaatttttagcctgtctattggcggtcgctgcggttttgcctgcggcgtcctgcggctctcctcgcggaacgacgagcgtcgatgaaaacgaggatgtggagtccattacttatttcagaaacgagatcgaatcgttcaataccgcccgcaagcagaacactcccgtctatgcggcgctcaaaagcgcgctcggcggcgtggacgtggaagtggtcacttcgggcggaggaagctgggaaacggtactttccaagatgtggttcgagagaagtcttcccgatatgtttctcacggagggacccgattcccccgaattttataaaaaactcatcaataacggcgacgtgattgcgatagacgattacgtcaacgaaagcacgaaggaggaatatccccacctttacgagaagatgcgggaaacggcgtatcttgcgaacaacctttcgtatgcgaagggcaaacagtgggcggtgccgtgcggctgggagctggaaaaatccctgtatgtaaggcaggactggatagataatctcaataaaaagctcgcttcctgtctggtgggggagggcgtcatcgcatcggagtcggaatataacgcggcggcgatgtacgaaacgtataagtacgacgttcccgaaacgctcatcgatttttatcgcctcgcccgcgcgttcacgctgtacgatcccgacggaaacgggaaaagcgacacttacggctacgagtcggaatcgaacacggatatggacgcctgggtgtatgtcgcgttcggctgcggatggcacaccgaaatgttcgacgaaaaaacgggcaaatatatcagcagcgaggtttcggacgaggcgatgtacgcgacggcttttctcaacaggctcctcgcggaaggatatatgaatcccaattcgctcacaaacgacaacggcaccaagcagaacgatttttccacgggcgtcagcggcatgatttttgcgcacaattggctcaataccttcgtggggtatatggtcgattcctatcacatctcgatagaggaggccacggcgaagatcgccatgtgcgatccgcccaagggcaaagacggcaagttcggtgcggacggcggttacgacgatttctggcgcttcacctgcatcaacgccaatcgcagtcaaaagcgcatcaaaacctgtttaaagctgctcgatttcatgtactcgcccgagggactcagtttattcgaatacggcgtggaaggagtccattataaagtggaaaaggattccgtgacgggcgaggagaaaaaagtcaacctcatgggcaccaacaaagcgggctttttgtatagcctcggcgcctatgacagcgcctatcagttgtattctctgtcctggtggacggggcattactactgcgaatacgtcacaaacggcgacatcgtttccgagcgtcagaagagatccgcacagtatgcctatcaggtggattatccgtatcttcaaaccgccctttacgtcgaaaagataaagggattgcacgactatttcgacgaaacgacggtcgggatcatgaacgacgaaaggggaaggtattggcaggcttataacgaggaaaaatccgaggaaggctataaattcaatttaaagacgttcggctgggaggacatctacgatatgccccgcgccataaagacggcttggaacagctatgtccaaaattataacggcgagcgcagcggcactgccgtttatgaggaatacaattcgtatatcgaatcgggcaaagccgtgaaaaagaatgcgaactgagtgaaggcgcccgtaaaaatcaaaaaatcggttaggagaaaataaaatgaaaaaacttttcggctttctggcagcggtcgcttttctggcggcaacgggaatgagcgcggcgtccgtgaccgcgcgtgcggaagaaacgacgcacgtcgtcgaacccgaaacgaaggtctgcgcttcgttgacgccctttgcgtggtacgagttcgacgattccgaaaatctcggcaaggacaccatgggacgcttcgatctgaccgtcgcaaagagcatcgcgggcacgatcgaacaaaaggaggacggcggcgataaatatgtggaacttcgccgcaacaacgaaacgaacagtcaaagcggcgttcttttgtacgcgccgcagctggacaaaacgggactggatttttccgacgtcattcgcgattctttcagcgtttctctgacgtttcgcagtcccgcggcgacgggcacgaacggctcccattacgtcctgtccgtagggcgctacaacgacgcggtgacgatcgttccctggcacaacgggtttcacgtgcagacttggacaaaacagtttatgctttcggacgatgtgacgcaggaagaagtggacaactgcaaaggcaaagtgcagatcttggcaaacgcctcggaatgggtcaacgtgacggtcgtgggcgatcatgacgacgaaaaggtatatatttacgtggacggggaactcgtgcagagcgtggacacagaaaacgtacagctttccaatcagggacaggggacgctcggcgccgattacaccttttccatcggcggtcagtgcgccgtaaacggcggcggcaacgaaatgcacgccgacgcggacataaaggactgcaaagtattcgattacgcgctttcgggcgataatgtcgcggcgctcgccgcgggtacggatacggagtacaccgggccttccgtggcatctctgcccgagctcgacacggcgggagtcgattttcagctcaccgaccgccatacgatcgcagatctgatggacgagatgaagacgaacgtcaacgtcacgctcgcggacggcacgaaggaaaaggcgtcccttttctggacgacgctcggctctgcggaaaaaatttacggcatcgtacagagcgccgcggcaaatagaaaaggtctgatgtatgaatacgacgtagcttacgtagtaaaacttaaatacgattccgacgcggttgtaataagcgatttcaaggtgggcgccgcttctcacgaaccgacggaaaccgtaatcgtggacggcaacaagcggctttccgtttccttcaagctggatctgaaagaggggtattcgatacgtgaagttttgtatgcggacgtaaacgaatttctggaagacgaatggcgggaagaagggtacgtgtatatcagcacgcgctacggcgccgtgatagaaatccgcacgacgggcggcggctcagacgactcttcggcttccgcttccgattcggaaacgagcggcggcagctcgggcagcgcttccgcggataattccgcgtcgcaaggcggatcggggtgcggcagcgcgatgggcggcgttttgttttgcgcggtgccggcgcttttcgcggcgctgagttttaagaaaaagaactcttgattttgcttccgctttccgtccgcctccaagcggggcgcggaaagcggagaaataataagactgaaaaaaggatttttttcgtatgagtaacaatttcggagaatgcgggctggataccgtatattacgaggggctgcgccgctttgaaaatctcggggaggcgttcgcgtgggaaaggcaggtattcaaggaagacaacacctggaataacggacccgtttcagacggcatcgttctttctccgcacatgactttgaggataaacggcagggcgatccccgtatatgcctcgcgcggcactttttccgcacattcctacgcttatgcggaagtggaggatgaggcggagggattttccctcgccgtggaaataaaattatcccgtcgccgctatcaggtgacggtgcttcccgaaagcgcgggaataaaaacggctttttcggacgagggcgagataaagtctgaaatcgcctctttcggctcgttcagtttcgtcttcgacaactgcgtattttcggcgctgacgcttttagtgagaaaaaaggaatcgtatagagtccccgaggggtacgccgttttgcagctgactccggggaggcattcgcttgcggaaacggagttcgtttcggaaaaaacggtttatcgctttttgaagggcgtccattacgtggactgtataaaactcccgtctgacagtgttttgcagatagagcgcgggacgattttgaaggcgtacgggaacacgcgcggatccgtcgtcgcctcgcggaataccaaaaacgtcgtcgtgtgcggctcgggcgcgctggatttttccgagcttcccaacggcggcggggtgggattggatttcgtaggcgtgaaaaacctggaagtgagggggcttacgctcgtcaattctcacgcctggacggtgtgtttcaccaactgcgtcggcgtaaacgtccgcgaaattgccgctttcggatatagaatgtggtcggacgggatcatgctttccgactgcgcgcacgcgcggatatacgattgttttctccgcacgggcgacgatgcggcggaggtaaaatccacttcggacggcctggtggaaacggacgacgtaatatttgaaaacgtggcggtgtggacggacaaagcgtgcggtttcggcgttgtatacgagaacaaccacgatacgaaaaacgtgcggttcagaaattgcagcgtcgggtttgcgcttccgaactggtccgatcatttgggctgtcttacggtctgtgcgggaaacaatcccgctgcggcggactacgacgtgtattttgaaaatttcgaaattttttatacgctttgctctcccgtcaccctctgcgctttcgagggctgcatacgggatattcatatccggaacgtcaaggtgaagcactgctttcacgacgcgccgatttatctttgtatcaaagacgagaagagggcggagctgggcaaaatttattgcacagatatagaaatcggcgatagacgcctgacggaaagaacgcggaaaaaattgatccgcgtgtccgttccgaaaggaatgatttttgacgaaaacaacgtcgtcatcgacggcaaaaggaaaacgggagaaaaatcgtgaaaagaataacggcaattttgataagcgtgacgatgtgtatttcggcagcgttcttctccgcctgtgcggaaaagacgtccgattccctcggttcggacccttccgcgcagagcggaacgagcggggaaaacagcgaagacaaagcgccgaaaggcaaggtcgagggcgtcgaatacgcggcggaaaacgtggacgacatcgattactggtcgacggaaaacagcttgaacaacgacgcctgccggctcgcgggaatcgtccgttccccgtattttgaagtgaggataaacgccgccgaggtgtccgtatttgcggaacgcacgacgcgtggcgtccattctttcgcgtatgcggacatttacgacgccgaggacggtatggcgctcgacgtggagatcactacgcacgaggagcggacaaatcccgtcgtccttcccgaaaacgcgggagtgacggcgactgtgcagggaaagacggtcaaggctcgcatcgtcgaatacggcgcgtatacgttcactttcgacagggacggcgttttgaaagacggatctcagcttccgttgaccttgatgatcaaaccgcgggaagagccggtcgttcccgcaggatatgccgtccgcgagatagagccgggggaatatcccatctcggagatgacgttcaccgaggaaaacaccgtgtattatttcaagaaaggggcttatacgatcgacggcatggagattccctccaattccgtggtgtattacgagccgggctgcgttttttccgtcaaacctttgacgttggacgaagcaacgggcaagcccgccgtcggggatattatttccagcaagcgcacggaaaacgttaaaatactcggccgcgccgcctttgatttttcctaccgcgcgggcaacgacactaattttcgtttggcgttttctttcgaactcgtcaaaaatctttccgtttcggggctgaattccgtcaactcggcgggctggacggtctgtttcaccaattgcgaagacgtttccgtgcgcgatctcatcgtcatcgcttacaggacgtattcggacggcgtgatgctgtccgactgcaaggacgcttccgtatccggctgttttgtgcgcacgggcgacgacgcgatggaggtgaagtccacttcttcgggaagcgtcaaaacggataacgtcgtatttgaaaacaacgcggtatggacggataaaggaattgcctacggcgccgtttacgaatccaatcacgatcagagaaacgtaatctggcgcaacaacagcgtaggatttgccttagcgcagtggacggatcatctcggatgcacgacggtgtgtatggagggaaaatccgccgatgtcgtaaacgaggatctgcatttcgagaatatcgagatttatacttcctattgccccgtgactacgattgtgctccataacggggggacggtgcggaatatttattttaagaagataacggcaaaatacgtcagcctcaatccggatattttccgcggggcgatagaccttatggtgcgcaacacggatcggggggacatagaggattttcagatcaagacgctgtatttcgaccatatagaaatcggcggggaaaaactgacgaattccaataaaacggagatggtaacgcataaatttgcggacggtttcgttttcgattataaatatatccgcgtagacacgcagctgtaagaaagaaattcgtaaaaggagaaagacatgaacaatacgcgcaaacgcttggcaggaatttttgcctgcgctttgacgggagttttgctgtcggcgggcgtgaccgcctgcggcaaagaagaaaactaccgctctattttcacaacgcccgagtatgccgtcaacgcgctctctttcgaagagatggacacctatgaaggggaggtcagaaagggcagcgacagcaatcagggcgcgctcgaaaacggtatgattttatccccttatctcacctgtcaggtcaacggcaaagaggtggacgtatacgcttcccgctgttccacgggcgcccattccttctcttacgtggacgtcacggaagaaagggtgggactggatattcgactcacgctcgccaagacgcgtcaaaaggtggtggttttgcccgaaagtcgcggcgtgaaagcggaaatgacgggaaagacggtttcggcgcggatagaggatacgggaagttactccttcgcgttcgacgacaaggaggacagagcctttacgctcatcgtcaggcgcgcttccgattttactccgcccgagggatatgaagtggagtatttcgaaccgggcgcttataccgccgcgcagacgacgtttacggaaggaaaaaaggtgtattggtttaaggaaggcagttacgcgctggactctatctctctcccttcggacagtattctttattgcgattacgcctatttttccgtgacaaatgcgaccaaaacgtccgccttgaaatcgaacgattcgaaaaacgtcaaagtgctcggaaagagcgtattcgatttcacgggaatcgatcaggacgtcgacggcaaggggacgtttgacttttcgggcgtgcaggggttcgaatttgaaggggtcacttcgatcggttcctgcggctggacgtttaatttcaaccgttgtacgggcggacgcatttccaatatcgcgggctttgcttatcgtacgttcacggacggcatcatgatcgccaacagctcggatatgcgggtttcggacagctttatgaggacgggcgacgacgcgtttgaagtcaagtccacggggacgggcgcgtcctttgacattgtctattcggattgtcatgcctggaacgacaaggcggtgggcttcggcgtgatttacgagatgaactatcccgtggaaaacgtgcgctttctcaattgctcggtcggctttaatatgcccgtttgggacgtcacccgcgccgccgcttccgtctgtatgtgcgattatgaaaagggactcaccaataaagacatttcctttgaaaatttcgaggtgtattactcgctctgtcccatcatcagtctttgtctgcacagcgggacgctggaaaacataactttcaaaaatttttctctcgcccgcagctatgcggaataccccgtttacataaaattcaacgccagctatctcggcggcgcaaagcccaccgaaaagcggctgtgtaaagtaaaaagcgtatatttcgacgatgtgaaagtggaaggctcgccgctgtcgtccgaaaacattttcggggcggatctgcccgattcgctctatctcgacggcgaaaaatatcaggaaaaataagaggcggaaaattatgaatagagaaatttcggtaatcgaagcggtttctcccgaaaaacggaaaacgtgcggcggaggaaacggaaaaacgctgctgcgcaggatgcggctcaattggcagatttacgtcatggcaatccctgtgatcgtcttttacgtaatattttcttatgtgcccatgtacggcattgtgctggcgttcaaggactatcttcccaaagacggcattctcggcagcgtcaacgtcgggtggaaacactttgaaacgctttttgcaaacccgtccttttcccggtcgataaaaaatacgctggtcatcagcgcgttaaaattgattttctgctttcctgtgcccgtcctgttcgcgttgcttttaaacgaatttcagcacagaaaattcaagaaggcgatccagacgatgatctatcttcccaatttcatttcctgggtcatcatcggcggattggtccgacagcttttcgccacctcggggggcatgatcaacaatatcataacggcgctgggcggctccaacgttccctttctcacaaaatcctcttatttttatccgctgctccttttctgcgagatatggcacagcgcggggtggggaacgatcatttacatagccgcgctctcgggcgtcgatcctaccctttacgaagccgcgcgcatcgacggcgccaagcgtttccgactgatgtggaatatctccgttcccaccattttgccggtcgtggtcgtgatgcttctcttacagatcggcggcatgatgaacgcgggcttcgattcgatattcaatttatataacaagacggtttacgacgtggcggatattatcgatacgctcgtctatcggctggggctgagcgagaataattacgaactttcgacggcgctcgggcttttcaaaaacgtcatcaactttgtcctgatcatgggcgccaatctgttggcaaagaagataagcggatacagtatgtattcgttcgactgaggaggaaagaatatggataaatcgaaaagcgaactgtatacggcgacgctggataaggagggcaaaatcgtctgggtgaagaagaaaaactcgatgggggcgttcgattatttcaattacgcgttttttatccttttcggcgtgatttgtctttttcccgtcgtttacgaggtgctgctttcctttgcttcgcgcgcggattatctgcacttcaaaatcatcgtctttcccgcgcatttcaatctggaagcctataaaagcatcttttttcaaggtcaggtgggcagatcttttctcatctcggtgggactcaccgtgggcggtacgctgtatagcatgattctcaccagcctcggcgcgtatatttttacgcgcaaacaggtaccgggcatgaaaattctctttacgttcgtcattttcacgatgtttttcggcggcggcctgattcccttctatttcgtctgcaaggacattttcggcaccgataatctttgggtgctcgtgctgcccttcgggatcaatacctttaacatgatcgtacttcgcaatttcttttctcaggtacccgaaagcatcatcgaatcctgccggctcgacggggcgagcgaatttaccattctccttctcttcgtcattcctctttccaaggcggggcttgccacggtgattctcttttacgtggtcggcaaatgggacgattggtattggccgatgatattcctcaccaagaacacccatctttcgcccttggccttggaacttcgcaacgtgctcaccatgggcgtggacagaccgatagaggacggggagatcgattggacgcagattttctcggaaggcaggaacgcggcgatgatctgcatttccctgctccccattttatgtatatatccttttttgcagaaatactttaccaagggcgtcatgatcggcggcgtaaaagcttaattaaaaatcaatataaggaagtaaacagatatgataaaaatcacgattctcggcgcgggcagcgtcgtattcacaaaaaacgttctcggcgactgtattctcacgccggagctgggacccattcatctcgctctgcacgatatcgaccccgtgcgactccaagacgccgagaaaatgctggaaaacatcaataaaaattacggcggcaaggcggagatcacttcccattccgatcgcaaagaagcgctgcgcggcgccgatttcgtcatcaataccgtgcagataggcggttatgaaccctgtacagtcaccgattttgaagtgcctaagaaatacgggcttcgtcagacgattgcggacacgctgggcatcggcggcattttccgcgcgctgaggacgattcctttcctcgaagaggtcgctgaggactttcatcaggtctgcccgcacgcgatgtttttaaattataccaatcccatggcgatgttgacgggatatatgcagaaatatctggggcttaataactccatcgggctttgtcacagcgtacaggcgtgtgtaaagggactgtttaattccatcggcatggaggaatacataggcaactgcaaatgggaaatcgcgggaatcaatcaccaggcctggctcacccgtattgtcgatgggaaggataacgatctgtatcccgaaatcaaaaggcgctctttgtcgggcgaatatgcggaaaaaatggagtgggatctcgtccgtcacgacgtcatgcaccgattcggctattacaatacggaatccagcgaacacacttcggaatatactccctattatatcaagtccaaatatccccagctcatcgagcgttttaagattcccctcgacgaatatccccgccgctgccgcgaacagatagaaaaatggcggaagatgcgcgaggatcttgtcaaacacgatgtggaacataaaaagagcgaggaattcggctcctatatcatcaactccgtcgtcaataacgttccgctccgcgtccacggcaacgttttgaataagggattcatcaccaatcttcccgccgacgcctgcgtggaggtcgcctgccttatcgacagacaggggattcatcccacttacttcggcgctctgcccgaacaatgcgcggcgctcaaccgaacgaatatcaacgtacagaatatgacgatagaagccgcgaaagcgcgtaaaaaggagcttgtctatatggcggcgtatctcgatccccacacggcggcggagctttccctggacgatatcaagagcctctgcgacgatctgttcgaggcgcacggcaaatggattccgcagtatcgctgatacaaagataccgatacccgaaggaaagactcggggcagcgggaaacggcagggacgaaaataattttcgttcacactgattaaaaaaatcgcatagagccggcgaaacgcttttttagccgactcaggagaggaaaaatgaaaaagaaaaaagcatccgcgcttttttgcgcgattgtattccttttttgcgcctttggcttttcgggcttttccgtcgggtccgcgagggcggaggccgcgacggacaacagactggtgaagacctaccaatcttcttcgaggatacagaacgaacctaccgtcgtttgcgacgtgacggacaaggcgactttggaaaaactcaccgcgcaggacgaacggccttccaacgccattctgcgtttcgacgcaaatgcggacatcaaaggtgcaaagggggaggtgctcggcagtttttccgaggtgttcgcctctttgaataaaacgatcatccccgtgctctgtcttgcggacgaggctgcggcggacgcggcgataaaatttttaaaagaggagatcgatattctcgatctcgccgtcatgtcggaggatccccttctcgtcaggaaggtgaaggaacagaacggtaaaatacggggcatcgtttcgtatcccgccgggcgggaactttacgatatcgtcaggacgacgaacaaaaattacgcaaacgtagcggtgatcccgcagagtatggcgacgcaggaaaacgtccgctatattcacgcccgttttaaaacggtatgggtgagggcggacggcagtgaaaaaaaggacctgtacgattgcgtcggcagcggggcgtatgggataatttcttccgattttcacgcggtctataacgtcttaaacgaatattggaaaggtctttcccgaatgcctttcaacgtggcgcaccgcggacttcccaatgagtgcaacgaaaattccgtcagcgggatagaggcggcggcgaagcacggcgccacgcacgtagaactcgacggatatcttacgacggacggcgaaatcgtacttatgcacgacgacagtatcgatcgcacgacgacgggcagcggaaaagtggagagtatgtccctggcggaaattcgccgctataagctctcgcagtttaagcccgaggaggagattcccaccctcgacgacgcgattcgcaccttaaaacaaacggacgtcgtgctgatattggaaatcaagtcgtcgaaaaaagaaatcgtcgatatattgaaaaggaagctggaagagtacgacttttggcggcagacggtcgtcatctccttcaatccctctattttgtcgaaaatgaaagactcgcttcccgaagtgcccacggcgaatctcaatgcggcaagcgcgtcgtcgtttgtttccgttctcaattggatgggagcatacaatacgggcatagacacgccttccacttcggatatttccttcaacgaggccactttgagagatcggggaattgtcggctggtactggacgtattcggattttgcgggtatcaacggagcggcggcgaggggattcgtaggcgttacgaacaacgacgcttcttcctatgaaaatatgcccatgtatgtttcggcccctgaattctgcgcggcggctcttacggaagaagccgaacttcccgtcgtcgtcacggagtattcggggcaaaaaagggaagaaacgggaatcgtgttttccttcgaggataggggaaaatattattccgccgtagcggcatataaaaacaaatccatgacgcactatctgtatacccaaactttcaaagtctataaagagggcgccgtttcgcccgtaagactcaacgaaagaatagacgccctttcttcccgactcgacaaaaacagcggcggggagatagaggaactgaaaagattgttgtcccttctgaccgacgaagatcaaagttcgctcggtacggatgaaaagctcgcgctgctcgaacaaaagtttaccgaacttcaaaaaaacgagggcagaggctgtaaaagctccctgccgatgagcttgtccgttttccccgcgcttttgctttttcgcaagaaaaaacgtccctgaacaaaggaatgaaagcgcggaaagatcagaagagaagcggataatcgctgaaaatagttatgaaaagacacttcgccttgcgcggagtgtctttaaaatataaacagagtttatagtagagaatttctgtctttaaaggttaacgcgaaacaaaaaacaggaggattcaacgggacggatacgcctgtttttgtgttttttataaacaatccggcaaaaaaagtcgataaaaaatgccgatatgaaataattattttttatatggggagaaatcctgtttgactttttcggcaaaatgatttaaaataggaataagaggataggatagaaactaaaaaacagatagcgcggatttttcgtcggagctttcgttcggagcgaaaattctcacgctttcattttttatatccggcgaggtggcataaagggaaagaatcggacaataaaaaatttcgtctgcacggattgcaggcgagcacggtaaaaaaacagacaacaaggaggtatagacatgaaaaacgaatattcggaggttacgccgtacatacgggatctggcggaattatccgcccgcaataacggaattgttcccgaaatgtatgcgcagcacaaagtcaacagggggctgcgcgatatcaacggaaacggcgtcgtgaccggtcttaccgagatctctcatatcaaagcaaaagaaaaagctgccgacggcagcgagattccctgcgcggggcagcttttttaccgcggcatcaacgtgcaggaattagtacagggctttttaaaagactgtcggctgggttttgaggaaactgtttatttactgcttttttcggaattgccgagcgcggaacagctgtcgcgtttccgtcagactttgtcggactatcgcacgctgccgacgtctttcgtgcgggacatgattttgaaagctccgggaaaggacatgatgaacattctttcgcgcagcgtattggcattgtatgcctacgacgaaaatcccgacgatatttccattcccaacgtgctgcgccaatgcctgcaattgatagccatatttcccatgctgtccgtatacggctatcagtcctatcaacactatcatctgggaaagagtttattcattcacctgccgaagcccgggctttccacggcggaatgtcttttacagattttgagagaaaacggcgagtattctcccttggaggcaaagatactcgatcttgccatggtgctccatgccgaacacggcggcgggaacaattccacgttcaccattcatgtggtgacctcttcgaatacggatacctattccgcggtatccgcggcgctcggatccttgaagggacctcgccacggcggcgcaaacgtcaaggtcgtgcagatgttcgacgatatgatgcggagcgtagatatagagaacgaaggagaaatcaaagattatctcgtaaagcttctggacggtcaggcgtttgaccgcacgggactcatctacggtatggggcacgcggtgtattcgctctccgatccgagagcggatatgctgatgaaatgcgccaaagatctgtcgctggaaaagggctgtgaaaaggagtatgccctgtatgaaacggtcgcgagattagcgcccgaaatcattgcggaaaagcgcaggatctataaaggcgtcagcgccaacgtcgatttttattcggggctcgtctatcggatgctggaattgccttacgaactgttcacgcctatttttgccgtttcgagaatcgcggggtggagcgcgcaccgcatcgaagagatccagaacgcgggcaagatcattcgtcccgcctatatcaacgtgaagccgaaacgacagtatattcctctcatcgaaagaaaataaacgacggtttaggcagtaaaaagcgggaaacttccgaaaggagttttccgtttttttgggagggaagttgatgaaaaattcccgcatcggcgcaatccgacgcgggaagaaaaaatttttttaggataacttagagccgcagtggttgcagaaggcgctgtccgcgggaatttcctgtccgcagtgaggacagatcgaaacgaagctctttccgcattccttgcaaaacttgctgcctttgttgttcaaggtcccgcaggaacagcggatttcatccttcgtgctgtcgctcaatccctccttgacggcggaagcgatatcgcgcacggcgggagtgagctcttttcccgcctcgttgataacgggcaccgattcgtttttgacatagcggctgatctcccgcctgaaagcgaaggaagtaatggcaaagccgattcccaaaaggggaagaccgacgaatgcgcaccaaaatttggtcggcatatcgcttccgcccatagaggcgaaaaagtcgatgagtccgatagctgtgaaaaccgcgccggcaatcagacagatgaaaccgacgattttcagctttttcttgatggaattgtgcctttcccgatcattatactcggggcgattgttgttgtccatgcttttcctcccaagatgataaagttcgttttacaaaaatttttctgtaaaaagaccccgaagcggtattgccgtcggggtctttttgttaagaaatggtggacgcgaaagggctcgaaccttcgacctctaccatgtcaaggtagcgctctaacca

SEQ ID NO: 4437 - DNA, 9091 bp, Unknown
  16S sequences of unknown bacteria
ctgtccggttgtccgctttacgttggtaatgccctttaccaaaatatctacttggccaggctgtatatttccacctttttcctccatatatttgcgcacatatccataagcgctcttgtctgcaataccgattacagtgccggcgcggaaaacattttctttcccgaacatttcaatgaccttggcaaaggctctcggctggtattccccggaaaaattcaggtcaatatcaggaaccttatcgccgtcaaaccccaaaaacacctcaaacggaatctcatagccgtccttaatcattctggcgccgcatttcgggcagtttcgatctggcagatccgggccgcaagccgcgccaagatcttttgtatcaaaatcagaaaacttgcatgccgggcaaacatagtgtggcgccagcggattgacttccgaaatgcccattgcttttgctacaaatgaactgccgacactgccgcgtgaacctaccgtatagccgtcgtcattgctctgctttaccaatcgataagcagataaatacaacgtggaaaaatcatgctttgtgatgcttcccagctctttttccaatctggcttcgacgatctccggcaagggggcgccataaatatcctctgcccctttacgcgcaatggagcagataagctcatccccattttcctccctgggcgcagccgtatcctgtggataagggccaaagcctgtttcaatggtatctactatgcgattgggcgcgtttacaaccacctccatcgcctcatcttctcccagataggcaaactcatccagcatttcctgggtggtatgcagatacagcggaggctgctgatcagcgtccgtaaatccttggccgctcatcaagatacgacgaacatattcatcctgtggcttgatgaagtgtacatcgcccgtagccaccgtcggaattcctttttccctacccaacgcaatgatctttcggttgatgttctgcagatcttcttcgctatggacccaaaagccatctctatcgtcatgcagtaaaaaggcattgtttccaatgggctgtacttcaaggtaatcgtaaaaatccaccaaatgcctttgcgtcgtctcatccaattttccaagaacagcgcggaatacttctccctgttcgcacgcaccgcctacaatcagaccttcccgatgtttcatcacaaggcttttcggcataacgggatgccggtggaaatgccgaagatgtgcctctgttaccaatgtatagaggtttttcagtccatttttatttttgaccagcagaatgagatgattggtgggcaacgcttttgtgcttgccgatccattgagctgagaaaagcgcttagcgccggccaattctctgagcctttcccacatacgagctgtacaagcagcatcgtccatggcgcggtgatggtgcagctgttcgatcttaaaatgcctgcacatagcatccagcgtatgccggcgcacatccggcaccatcatacgggccaaaggaagcgtatccactaccgcattggggaaatccagtccgtaaaccttaccccgatttcgtataaacgatacatcaaatgttgcgttgtgggccacaattgggctactgcccacaaattttgcaaatgcacgtaaggtttcttcctcagatggcgcttcggccaaatcctggtcggtaatgcccgtcagcttcacgatttcgggtggaagctttgccaacggctttgcaaagctttcgaatgtctcgattgcttgcccatctttccagcgaacagcgccaacctcaatgatctcattttcctttttatctagccccgtggtctcaatatcaaagacgaccacttcgccaatctcttcgtcttcacctgtaaaagcggccatgtcgttggccatgtatgcctctacaccatagatcagctttaagtccttaccggattttttcaacgccatattggcatcaaaagcaaacgggaatgcctgcacgacgccatggtctgtaatggccagccctgaaagacgcatcccagccgcagtattcaccagttcttttgcatcggccaagccatccaatccgctcattttggtatgggcgtgtagttctggacgatggaatggaagatcgccgtctcctcgatcatgaaacggcatatacgagatctggttggcccatacaacctcttgccgagtatatgtatccagcctcacgatcccacgtacaaacactctttttttcttggaaagcacttcaacggcatacgccgccgccttattttccatagaggccaaaatgtttaccgttccatagtaatcggtcaacaaaaaggacacaatactttcatccttggagcgtttttttcttgcctcaacggagagagcgatcccctccagatttacccggcccagttctaacgtcaccatcgagagatcatctgtctttttgggaaaaaacggttcgcccagcagcgatctcgttttttctgttttttccgatttggccgacgacctggcctttttcggcctcttttgtttttcctttgctttggaaagctctccggttcgctccaaagagtgtgatgcctcattcggctttggtgcctgttcacattctattttggccggaaaatcaacgagctcagtacaaggaacgggatccgccagcttttctttttccacaaaaaacagatgacatccaccggtcgtttcctgcacaaattgcagcaattcttcatatcccggcatcatctgtatcacatctttgaggttgctttcctcaaaagcgcagtatacgatcttcttttcttcattgtacttccaatagctctgactccaaaaagcgcaacaggaacgcatctctttttttgagtattcgacgcataaacgcgcaaactccctttcattggaaataggcatgcgcatagaaaccagtgtgttttcctggcctgtttgcaaaattaaatgcgcttgtattttagcaaattcagcataagacagcgccttatccgtatgcgcataaatatgtagctgttcccgtgttctggaaaatgcaattttttcaatccatacatttccgtacggtgtctcaatttgctttgcctggctcatagccgctcctgctccctttggcatgccaaccgtttcgcttcctgtaccaaaacggaaatcaagtccgttccttccacttttcctattttttggccgtgttggaagaggattgcatcccccgcagcccccgcaatgccgatatctgcctctctggcttccccagggccattcactacacaacccattacagctaccttcagtgggattttaataccggaaagcctacgttccacttccaatgcaatcttttccacttcaatgctcgttctcccgcaggttgggcaggcgatgacctctacgccttcctcccgcaagcctaccgccttgagaatacgtttggccacaggcacctcctgcagcgggtcgcccgccaaagaaacacggatggtgtcgccaatgccctccagcagtaggctcccaattccaacagacgacttcaccgttcccatagcacaggtgcccgattctgtcacacccaagtgcagcggatacggcgtttttttcgccaacagccgataggcttgtatcatcgtgggtacatggctatgttttacggatagcacgatgtcataaaacccttcttcctccaggatatgggcatgtcccagcgcgctttccaccaacgcttctgccgttggccctttgtatttttccagcagctgtttttccaaagaccctgcattgacgccaatccgaatcggaaccccatgctctttagccgccgctacgacattctgcaccttttctctactgccgatattgccagggttaatcctcagtttatcaatacctgcttctatactgcctaccgccaacctagcgtcgaaatggatgtccgcaaccaatggtacctgtgccctttttttgatttcctcgattgcctttacacaggcactgtcataaatgctcatgcgcaccaaatcacagcccgcttcggatagcgcttgtatctgtgtcacagtgctctctatgtctcgtgtatccgtgttcgtcatgctttggatacatacaggcgcaccgccccccatcgcaagagacccgatgtgtatctgccttgtttccatccaaacctctccttatctaaaaaacacgtccttcaccgatatcaaaatgataagcccaaacatcagacaaatcccaatggcattgaggagcccttctcgttccgggtttacccgccttctaaaaatcagttcataaaatacaaataggcatcgtcctccgtctaaacctgggatgggcagcagattggcgattcccaggttcagcgttgccatagaaaccatgagtaacatggttctgaaaccgctttcaatactcatggacatctcctgtacaaatccaacagggccgatcaattctccctccggtttggccccgccaaacagcccgacaatcagctgtcctaaaaattcaaacatcatacgggccatctgccatgtgacctgaaagcctttttgtattgcttcaaaaaaaccaaccggctggaaagcagcttgcgtttgtatccccaaaatggactgcccattgatctctactttgggaatttccagcatcagcgtttccccttcccgttcaacggttaacacggccgtctgtccggactgcgcaattagcgaggaaggcgtttcaaacaaaagagggtcctccccccctactcgctctatcacatcgcctatctgcaaaccgtatgcatctgcttgcgattgtgggagaatgttcataacggtatgccttggcataccaatagcaccggcaaaaacggcacaaagcaatacgctcagcaaaatatttgccaatggccccgccacaaaaatcaaaagccttttccatggcccaacggaataaaagctgccgggcacaggccctgttaagctttcctcatctggctcttctcctaaaaaacggcaaaaccccccgagagggattagccgcaatgtatattgtgtttctttgggcttccaggaaagcagcttggggccaatgttgatggaaaactcctctaccttcacacccgcggctctacctgccagcatatgccccaattcatgaacgatgatcaaaacgcccaaaatgagaatggcgatgatataagtcaaatacaaacctcaattcttttttatatggcttccataaattggcgaacctgtttgtctatctgcaaaatctcatccaggttcggttccttaccgccggtaaattccgacatggccttttcaatcagccgtgggatatcataaaaccctatacgatgctccctatatctctgcacagcgatctcattggccgcgttgaatgcaatcggagacataccgccctgccgacccgcctcataggcaagcgccaaacaggggaatcgttctgtatccggcgactcaaagtgcagcgaaccaagcgttacaaaatctactgcctccgatccctgatgcagcctattcggatatcccaaggccacctgaatcggcagcttcatatccgggactcccatctgagctaaaatcgagcggtcttggtattctaccatgctatgtacaatgctttccggatgcacgatgacctccacttgctctaccggaacatcaaacagccagcgcgcctctaatacctccaatcccttgttggcaagtgtcgcgctgtcaatggagatttttgtccccatattccattttggatgctttatggcctgctctactgtggctttagcaatttcgcccttttcccaagtgcggaatgggccgcccgagcaggttagcaaaatacgccgtatctctttgtctctgtttccttctaagcattgaaagattgcactgtgttcgctatccaccggatacaatctggcattgtgctgctctagcagcgcacggatggccgcgcctccacaaacaatgctttccttgttggcaacacaggtctttagcccatgacaaatgctttctttcaacggagcaaaacccggaaaccctactacggagatcaaactggtatcagcaccagaagcaagcatcgcttccacatgcgcgcgctctccgccgaatagcctgcaatccttatctatgtattctttggctgagttatacgttttgtcgtctgagattcccaccgctttgggatgaaattcttgaatttgttttaacaaaagaggtaggtttttatgagcagtcaacgccacgatgcggaattcctccggatgctcccgcacaacctccaacgcctgtgtgcccacagacccagtagaacctatcaacgcgatctcaatcatgccctatacgcctcctcgtcacgctgccagcaataccaaactaaaataacaatatacgataggcgctacaaacaaaatgctatccagtctgtccattacgccgccgtggcctgggaatatctttccaaaatcctttatgccgacattacgctttaccaaagaagctgagagatcgccaatctgccctgccacggcgcttaccaagcccagcatcgccatatgtagcaagctgacagaagtaccaagcacaggctgaatcaggtacccaaccaatacactggccacgatccctcctagagtgcctccaatagcgccctccacagttttcttcggactgattttggggcacagcttgtgcttgccaaatagcagccctgcaaaataggcaaacatgtctgtaacgcatgcgcataccagagtgacgaccaaagccagtcgtcccgcttctcccggaaaggtcagcatcataggaagcatagacatcataagacagggataaaacaacgcaaaaaaggtataggatgtgcttaccagtgttaaatccgcgcgcaataccttggttacaaagatcaaaataccagtgaccatgagcagcgccaagatccctttgattccaaaataatggatggaaaacggaagcatgaccacgaagaacaccaatgcgctacgcgataagtctatccctacgtgatgaaacgcctgccatacttcaaagactgcaatggccaaaaacagataaatggtaatggaaagcgcaagaccccctatgcatagcaccgtggtaatcaaagctgccaagatcagcccgataataaagcgcgttttcaaaattatcttcctcctacggcgccaaaccgcctatctctagacatatactccttgatacacgcccaatacacctcattggtaaaatccggccaatgttggtccgtaaacacaaattccgtgtatgcaagctgccatagcataaagttggaaagcctttgttctccgcttgtgcgaatcaaaagatctggttctggcagctctgccgtatacagttcgttttgtatggtggtctcctcaatgtcttctcgggccagttctcctttagccaccctgtctgcaatatgctgcacagcccgcaaaatctctgctctcgatccatagttcaacgcaatgtttaaaatcatgcctgtgttgtttttcgtcatttccattccacgctgcacttccataaccgccgtacgcggcagcttatgataatcgcccattaccactagttttacccggtttttatggagctcatcaatttctttgcggatatattctacaagcagcgaaaacaaagcgtctacctctggtctcggccgcttccaattttccgttgaaaaggcatacaaggtcaacacatccacaccgatatcagaactgacgcgtacaatattcaccatccgctccatcccggcccgatggcctgtggtacgcattttgcccctctgcttagcccagcgtccgttgccgtccatgataattgcaacatgctttggcatacgctgtatttcaaatggttcaaaccccttcggcagggggcctctcatttgtgacattgtatttctccctttttgcaattatttcccaaaggaagacccttcgggaaataatcagcagcttattcttcctgttctgttctaaaggcgcttgtcacaagctgaacagaaccattttgtttttttacgcgaaccacgcgctcatccgtcccatgcagggattttttcggctcttctgttttgactagcgtataagaggcgccctgtgcttccagcctttgtatcgctgcgcgcacaggcagccccaaaagcgttttcatcattagacctgcataatctctttttctttgtcagccagaatcttgtcgatctgcttgatgtgatcatccgtgaccttctgcatatctttttccagatcctttacgtcatcttcggtgatctcgtttttctttttcattttactaatctcatcgttaccatctctgcgaatcgaacgaatggcgaccttagcatcctctgcgatcttacgcgctgtcttcaccaaatccttgcggcgctcttctgtcaattctggaaaaagcaaacggatgcacttgccatcattggatggatgaatgccaatatcgctttccatgatcgccttttccactgctttaagctggctggcatcccagagtgtaatttgcagcagccgcggctccggggtagagatattcgccatctgattgatgggcgtaggtgtaccaaaataattcaccgtaatacgatccaatacatgaggattggcacggccggcctttaagctgcccaactcatttttcaaaacgccaatcgttttctccattttttctccagcaacggcgcaaatatctttttccatctgttcgctcatcataaattcctcctctttgtctctattctacccgcaaagaacttttcgtgcaataataaatcaagttttcaaaaagactattttattttgagtgagcattcggcgatgcattagcatccagcgacttgttagttatttcttgtatggttgccaataccttttgagaaaaagagattgcttttgcataattttctcttgtcacttcagaatttccctgcaacaaaatgatttcttttttgcaaggcgcctttaaatcggtaaaattcattgccataagcaactttatctccggcgtttctg

SEQ ID NO: 4438 - DNA, 2738 bp, Unknown
  16S sequences of unknown bacteria
ggttcttttgaaccccctgcttttatgaatgtcgccccctgcgccgccataaaaggtggactgtccgccctcgacctaaagcaggtcaagtgtcaggtcatgctttcaaatacctatcaccttcatcttcgccccggtgacaaaaacgtcaaaaccctcggaggacttcacgaattcacccgatgggacggccccattctcaccgacagcggcggatttcaggttttttcccttgcaaagctgcgtcatataaccgaagaaggggtggaattcaactctcacatcgacggacataaaatttttatggggccggaggagagtatgcaaatccagtcaaacctcggttctaccattgcaatggcctttgacgaatgtgtggaaaatcccgcaaaatatgaatatgccaaaaaatcctccgaaagaaccgtcaggtggcttgcgcggtgcaaggaggaaatgaaaagacttaattctcttgaggatacggtcaataaaaaccaattgcttttcggaataaatcagggctgcgtttacgacgatctgagaatcgaaaacatgaaacagattgcaaagctggatttggacggttatgcaataggcggtcttgccgtgggtgagccggccgaggatatgtacagaattatttcggcggtcgagccctttgctcctgatgataaaatccgttatctcatgggagtgggaactccggccaacattctcgagtcggtggaaaggggagtggaccttttcgactgcgtcatgccgagcagaaatgcacgccacggccaccttttcaccaaaagcggcgttataaacatcaacaatgccaaatacgccctcgacaccgaccccatcgacagggaatgcggttgtcccgtttgtcggaatttcagcagggcatatgtacgccatctgcttgttgcaaaggaaatgcttggaatgaggcttgccgtcatgcacaatctttggttctataatacccttatggaggaaataaggcttgctcttgacgaggacagatttacggagtataaggaacaaatgctgcccatactctcccgcagaatttaatattttgtaaatttgatatttttttcttgcaaataatactaatttgatatataattaacgggataaagttttggaggtaaaaaaaatggcaattgcaatggacaccgccgcaaacggaagcggacaatctctttggttgatgctcatatatatggccgtcattttcggcattatgtattttcttctcatccgtcctcagagaaagaaacaaaaagaagaggacaagatgcgtaacaacatccaaatcggcgatgaaataatcaccatcggcggtatttacggccgcgttgttgctgtcaaggaagattcctttattattgaatccggtcccgaccgcagcaaatacagaatggctcgttgggctattcagaccaatcttaccgttcatgccgacgatgacgcttctgcggattccaaaaagaaataaatcggaataattaaagacctctgcgaataatctttaacaggttatttgcggaggtttttttatgaacgaagaatatacaaaaaggattaagtgctgttttaagggcggtttgttcggacttatcgtcatgctgattttatacaccgcggcggcggttattctgacattcagagatttgaatgacggaacgctgaatttgctttcactcgtcgtgtgcggggcaggggggttctgtgcggcggcaaaggccggaaaggaaaacaaaaaggacggaattaaaatcggagtcatcatcggactcgggattttcgcagcgataacaattgtcgggttggcgctcggcggcaatttttcgctgcttaccttactgagacttgtcacggtgattatctgttcgattgcgggcagcgtgttcggagtcaaccgtgcgggaaaaagaagaatgaaatagcaaaaacggcagttgttgtatcaaaggcagctgccgtttcaatatatgatgtggtttacataaagtaatttacataacattcgcttaagataacataatgttgtttacataatcgtgctttgaaaggttaaaatttcgtaacaacttgatttttcccttgataattcaaataaaataaggtatagtatagaggttgagtttaacttgatcggagcgacgtgtatcatgattatgtcaatcggttttatcggggcgggcaatatggcctcggcaattatagaaacccttcgaaagacgggttacataaaacccgaaaacatctacatatatgataccgacatcgaaaaaagcaaacgtttcgcaaaatatggtatgcatatttgcaccggcgcaaaagaggcttttgacggcagaacatatacatttctttgtataaaaccccaagtcttccgagaatgttctcaaagcttttcgggacttgcaaataatacagactgtatagtctcgattatggcaggaattaagattttcgatattaaaaaggtgttcggtgacattcacacaattcgtgtgatgccaaacacacccatgcttgtttcgggaggcgcctctgctcttgtaaaaccggacgacgtttccgacgagttttttgctcctgtttttgatattttcaacagttgcggaaaagccgccgttgttgaggaaaaggacatttctgccgtcaccgctttaagcggaagcggtcctgcatatttctttaaatttgcccgtgcggcgcttgaggaggct

SEQ ID NO: 4439 - DNA, 32759 bp, Unknown
  16S sequences of unknown bacteria
tggggtcaagcgggtcgtagttccagtgcacggccgaccagtccacgctgctcacgatggagaagttggcggtgcgcaccagccggtcgtagcccagctgctcgggccacaccgcgcgcacggtatacgcgcccggcacggtgggcttttggtcgctccagagggcgtcgttgcccgcatccgtgccctgcgccgcataggtgatgaccgcggcctgttctgtgtgcgtgtcggaaacggccaccggctcggcgggcgtttcgccctcgttccagctttccatggtcacggagccgtcgcccaccatgagcaccgtcacggtgaggttatcgggcttgaagcagtagttgctgcccacggaggtgatgctggccacctgatagacgcccggctcggccttcgtaaggtcgttgccctcctcgtccagcagtttaaggctggtgacgctgccgcggatgccgccataatagtcgccgccgatgaagccgctgaatttcacactgctctggcccagggcgttccaggcgttggggcggctttcggtggtaaagcggatctcgccggaaaccgtcacttctttgggcagaatggtatagtcgacgtttgtgttggagtccgcggagaacgtgtaattctccgcgccctcgcccgtgggcacgagggtatacgcggatgccggccaggtgtttcgcaccgaagcgggcttgccatcctctccccacgtcacgctgattttctcttccgactgggggctcagattcacattggcggtgatgcccatgccgaccgggtccagcagatacggactgttttggtcaataaggtttcgactggccatttgcatccgcgtaatccggacattttcaaacgcgtcgttgccgttgtaaaccgcctcaaacgcaaaactggtcgcgttcaggggcagcttctggaccgtcgcgtagaggacggactgggcgcgcgtgggatcttcgctttcataaaaggagtagaagcgggcgttctcgccttccagtttgacgttcacgacgatggaagcctcttgccccgccggtatctttgcgaattcctccgccgaaccggcaaaggcaatgccttccacgcagaacgcattatgccctatttcgttgagggagaaatctgtgttgacggcagacgataagtctatttcttccatgtgatagtaaacgtcaccattgatcatattcaggatgttatcactattgtgactgaccacctcgtccagcacatgctggggtactcttatctctacatccgcatttgaagctaaagaataaagatttagacttatattcgatgcctccccctgcaactcaacgatacaagaaggatttcccgtaagccacaggtagcctgattcaattttgatgactccttcgcgcatggcgccttcaaaggtgctgccagagaaactcgattcagccgagtaattatccatggtaatgtctccatagacattacagccggatgaaatcataatgccagctttcatcactgcattcttcagatacagggtggatctatcatgcccggtaggaacgcccatgaatgttatgccttccgcgtgcaggacgccggaaaccacaactctgcctgacgttccgccaatgagcgtcgctttgctgcgtgcatacacatagacgttctcaccattcgcgttattgatcgtgcaggaagcaccgcttactacgccgcttcctacatagtcgcttcctacataaacgtcgccggaattgatcaccgtatacgggcaattgatgcccgactggatcgtgaggtccgcattgcgctccacgatcagcgtgaggttagtctccgcgtactcagagagttttctcaggatcacgtcggaaccgcttttgacggtcacggtcagggattcgcccggcacccgttcccagctcagccatatattggcagattcgccgttcctgacaaaatcgccctcataggggaaatccgtctcatcgccggactccgtctcgccattggccatgagcatgagcggcggcatggcgtaggtcaccgtggccgtgggcagcgccacggggcaggcggagccgtccgccagcgccgcctggaaggtatacgccgcctccagcgggttctcgtgctcggggatgtacgccgtgccgcccagcccgtcgccgacgcaggtccagatcaccgccagctgcgcggtggttccgtcgctgagcagcgccgtgacctccgcgggcaggcccagttcttccagcgccgcgccgtattccgccgtcaggacatacgccgccggttcaaaaccgacgatggccggttccggttccgcggtgggttccgccgtgggttcggccgtcggctccgccgtgggttcagcagtaggctccgccgtgggttcggccgtcgcggtgggcgcaggctccgccgtcccggtgggcgcaggctccgctgtcgcggtcggcgcaggctccgccgttgcagtgggcgcaggctccgccgtcgcggtgggcgcaggctccgccgttacggttggcgcggggtccgccgttacggttggcgcgggttccgccgttacggttggcgcgggttccgccgccggttcggttgccggttccgccgccggttccgccgtgggttccgacgttacggttggcgcgggttccgccgttacggtgggcgcaggctccgcagtcgcggtgggcatctccgctgcttccgcaaccggcgttacttcctctgccaaagccggcgtgggttccactgtcacaaccggcgtcgcttccactgtcgcactcgaaacaggttccgctgcggattctggcgtcacgcttaccgccggcagttcttccgacagcgcgaacggcgtcgccaaactgaacagcagacatacgcacagcatcacgcacaaccatttcttgaccgaaagggcgctcatatgattcctcctaaactttctttgttccatatatactctaaatcgcgaaaatctgtccgtttacccgccttccgcattcgcagatagattcatcaacaggctgacgcgaaaaatatcttcctcagcatctactgtcaagaacccatgatggcgggcgacggtcgccctcgccgactccaggccgtagctttcccccgaatgcttggtggacgcgaagccgtcctttttccggcgcacctggccgtcgtaaccgttttccacaatcacgcacagcaagtcgccgctcatgcggcagatcaccttcgcgccgcgtttcccttccggcagggtcagcgccccgtccagcgcgttttccacgaggttccccagcagcacgcacagttccgcgtccggaatgttcagttcctccggcagcgatacccgccaatccagcgccacgccccgctcccgcgccaacgcgtcgtagtaccccgccagcgcgttcagcgacggattggcaaagacaaaccggatttcctcgtgctcctctccgcccacttccttcagatacgccgtcaacgccgccgcatcgcccttggccgccagcccgctaagcacccgcaggtgctggcgaaaatcgtgccgcagcctgcgcgtctcccgaatatagccgcttagcaaagcgtactggctcgcctgcgcggccagaaagtggttttcctcccgcagcgccgcgctgtccgttatcgagcgcgcaattcggtaaaacagctcgatgagaaacgccatcaaccccaacagaaacaccaaaataatcgcgcccagcggttgtacccggttgaccaatatcgtatggtagtcttccggcatcatcgcgataaacagcagcatatgcgccaggggcaatacccatacgattcgccacacgctcgcctgcatgaagtgttccaccagccagcctacccgactggccatgagcggccacatcagcgccgccgtcaacatccccaatgccagttgcaatcccgctgcgatcagcgtaggcactgtgcctggattggctacctccacctgggccatcaacacatccgtaatgactgcgcaaaaccccatcaccgccgcagccagcagaaaaatgaacaccgccgggagaggttccacctctgtcaagcgacaatacaaccagaaaaacaacaacaatcccggaaccaacagcgcgttctccggccagccagtgagcataatcaccagcgcacccactgcggcaaacgccgtaattgacccgactgctgcccagagaaacgtacccatacttacgcgcagccgccctttcaccggagctagacatagaaatcctgctggcagacaaagcagcagctccacaaaatacctgccccatgcattccaacccatctcattccactccccgcgtcttgcggaatatgtactgatagaagcgttctctgatcggcatcttctcgctaagccgtatgggaaaacgctgagcgccgttcataacaaaacacttcccgtcaaaggaacgcacttcatccatgttgatcagcacgccccggttacaggccagaaagcgcacctcttctcccagcatcgtctggatttccccaaagggcatgtagcattttatctcccgaccatccgtcaggccaacatacacatagtgatcccgggcgttgacatagctcaccgcagaaacattcaccaattccacctgtcgcccaaccttgagcgagagcgtccgttccctgcgctgcacggcacgttcggcctcgtccagcacccgcgccagtcgcgccttgtctatgggtttgagcagatagtcaaatggatgtaccgggaaggcatcccacgcatattcgctcgaactcgtcaaaaaaacgatcagacagcccatgtcccattcccgcaggcggcgtgcggtctcaatcccgtccagcccatccatgacgatatccagaaagaccaggtcatagtgaacttccgaatccagaaaatgattgcccgaatcgtatacgtcgataaaagctgtctgtgaaaggcgttccgccaacatttcgctcagcgtggcgcaatcctgacgttcatcgtcaacgatcgctatccgcatccgcacctctcctcccataacacatttcacaataagtatatcacaataaatcgctaagcaggatccaaattcacgaagtgaaaatgggggtttcgcgaagcgaacagatttcatgaacccacatcctctaggcaaaaaaagaaatcctcgaacctgtcgattcgaggattttggtggtcgcaacaggactcgaacctgtgaccccatcgatgtgaacgatgtgctctaccaactgagccatgcgaccaaatattttgtccagcgaaatagttggttaatctgaacaataagctctaccaactgagccaaagcaccaaggatttatgtgaaccgattttagcgtttgatctctgtgtcacattcacagagcgcttcgcatcggatcaagcgattgccggaagctttgggacttctcttgaaacggcgaatataagtatagcacagcagaccgggcatgtcaagaggaatttgtgggtagaaacgaaataaatctaattttaacaattgtaaagctgggaagcggtgcaatgacggcttttcccgcgaaaactggcgcgtttggcagttgtcaaatcggcaaaacgtggtataatacaagagaaagagaggtgtatacccatgaagcgattcttttcactttttgttgcactgctttgctgcttgacgctgagcgccacggcagagacgcaagcgccggaaacgcccgaggcccagactgcccgcgcggtggtagaggcggttgccgcggaagattatgatgcggcggtagaattgttttctgccgaactggccgccacgctcagcgcgcaggcgctgcaggaggcgtatgaacccttactggcagtgataggaacctaccagggcattcattccataacccaatacagtgcggatggagccgaaattgtaatggtgcagtgtgcctatgagaagagtggcctcatgtttaccgttacttttaccagtggttctgtcgcgggtctctttatgcaattggtggccattccggaaattgatggtctggaagcccccattgatagcaccacgcgcgaagaagtggcgctccgcccgggcgcggaagacgaaaccatagccacgcttttgattcccgatggcgaaggcccatttccggcagtggtgatgttggccggttccggcccgcaggataaggatgaaaccagcgccgtgaacgcggcgaaccgcccgttttacgacatcgcggaggaacttgccaggcagggggtggcctccattcgctatgacaagtatacgtatgcgcacgcggcgaatatgacggaggacgagattgcccacctgaccattcaggaggaatacatcaacgacgctgtggcggcggttgccgcgttgcgtgcggacgcgcgcattggcgacatttatctgctggggcacagccagggcgcgatgctcgtgccgcgcattatgcaggcaatcgaagcgcaggaaggcctgggggaaatcgcgggcggcgtgatgctcagcggttcgcctaagccgctgtggcaaatttccatggcgcagaatgtggcgttgctgggcgatgaacagatggaatcctatgaggcgattctcagcgagcagattcagctcgccaattcgctggatacgatgacggaagaagaacttatcaccaagacggtctttggcgtgagcgcatattatcaaaaggacgaaacgtctgtcgacgcggcccaagccgcgctggaaaatggccgccgcctgtttatcgcccagggcgatgcggattggcaggtgacgacggccgacggcatagaagcctggaaagccgcgctcgaaggggcgcagttcccggtggaataccatctctatgaaaacctcaaccacttgctgatgacccaggaaggcagcgtcacgcgtacgctgatggactatgcgctcccgggtcacgtttcgcaacaggtgatcgaggacattgccgctttcatccttgcgggcgaatgatgcgcattcccaattacggacacgtgctcgttgcgctttcgggcgggccggattccgtagcgctggcgttgctggcgctcgaatccggcgcgcgcgtttcggcggcgcatgtggagcacggcattcgcggcgcagattccgtgcgggacatggaatttgtagaggatttttgcgcgcggcagggcatagcgctctataccgcgcgcattgccgtaccggagctggcgcaaaagacgggtgtggggctggaaaccgcggcgcgcgaggcgcgctatgcctttttgcgcaaggtaaaagaacaaattggcgcggatgtgatcgccaccgcccaccatagggacgatcaaatggaaaccgtgctgatgcatttgtttcgcggttgcggcacgcgcgggctggaaggcatgcgcgcgaggagcggggatttggtgcggccactgctggaatacagcaaggcggacttgatcgcctatttgcgggaaaaaggacagccataccgggaggacgcaaccaaccgcctgagcgacacgccgcgcaatgcgttgcgcaacggcgcgatcccttcgatattgcgcgcgtatccccaggcggcgcgcgcgattgcccaactggcccgcgtggcgcaactggagggcgcgtatttggacgcgcaggcccgaccgcttttgcggcgggaattgtgcggctattcggtggacaaaagcgcgccggaagcgctggtgaaacgcgccatggcatgcgtgattccggattttggcggcgtgcaggcggcttacgcaaggcggtcggcttcgttgccgggcggctggcaggctgagacgtatgggaatcgagcgtattttatagcgcctgacgccgcgccgctatccgccgcgccgcttacggcaagcggtgcgcgcgcgaggggcgttgagattgtagccgcgccatgcgagggcgaaatttccgccgatcccatggcgcaggtgttttgcggagcggccctgtgcggggcggtgctgcgcagccggatgcagggcgactttatccggccgttgggtatggtagggcgcaagaagctgagcgattacatggcggatcgcaaaattcccgcgccattgcgcgcgttttggccggtggtggccgtggagagcgaggttctgtgggtggttggcgcgggcgtttcggagcgctccaaggtgacggcgtcgtgtggcgcgcgcgtgaagctcacagccaggtatactttggaagaattgggaggaatagcgcatgacttatgactttatggacgttcttatcccgcacgcgcaaattcaggcgcgcgtggcggaactgggcgcgcagatcagcgcggactacagcggcaaggacttgaccgtgatcggcattctcaagggttcggttttgttcatggcggatttgattcgcgccatttccatgccgctggccattgattttatggctgtaacgagctatggcgcttccacaacgtcttcgggcaatgtgcgaattctcaaggatctggattccagcataacggggcggcatttgctcatcgtggaggacatcattgattccggccttacaatgcaatatctgctgaacaatctggcttcgcgcggggcggcgtcgctgcgggtatgcacgctgctcgataagccggagcgccgcctgaccgatgttcgcgcggattacaccggctttgccgtgcccaacgaatttgtggtgggctatgggctggattacaaccagatgtaccgcaatctcccggatatcggtgttctgcacccggaaatttacacaaaagccggggaataacagttggaattctcagcgttcaatggtataatacgatactgagcgtatccttatgcggctgcgcgcaaattgaggcaagagtgcaaaactgggaggaactctggtttgaataaaaagacgatgaagtatctgcaggggccgcttatctatgtgctgctgctcatcctcgtcctttggcttgtgtcgatgatcggagcgccgagaatggaagagcccgaggagctttcctattccgaattgttggaatggatcgaagcggacttgaaggccgatgaagggctgagcgacgatacttccaaaacgatttccgatgtgatcatcgtgcagaacatgttggttgcccgcacggaagatagcgacattgcgcagtcggagttctccacttcgcgctacgatctgtacgcgacgattcccagcgaagaacagttctacacggatgtgaatgagatctataagtccgtgctgaaccgcgattccatttcgcccacggaatatacgttcaattcccgctcgcaattgccggcgggcacgccgtggtggctggaatttttgccctatttggtgctgatcggcgtgatgctggcattctggttcttcctgatgcgccagcagaccggcggcggcaagggcgtaatgaatttttccaagagccgggcccgtttgaccgatccgtccaaaaaccgcgtcacattcaaggatgtggcgggcgcggatgaagagcgcgacgagctgaaggaaattgtggaattcctgaaggcgccggagcggttcaccaaggtgggcgcgcgcattcccaagggcgtacttttggtgggccctccgggcacgggcaaaacgttgctggcccgcgcggttgcgggcgaagcgggcgtgcccttcttcacgatttccggttcggattttgtggagatgtttgtgggcgtgggcgcgagccgcgtgcgcgatttgttcgatcaggccaagcgcgcggcaccttcgatcattttcatcgatgaaatcgatgccgtgggccgccagcgtggcgcgggcctgggcggcggacacgatgaacgcgaacaaacgcttaaccagttgctggtggaaatggacggcttccagcacaaccaaggcatcattgtgatggcggccaccaaccgcgcggatattttggatccggcgctgctgcgtcctggccggtttgaccggcaggtcaccgtgaactatcccgacgttaaaggccgcgaagagatcctcaagctgcacgccaagggcaagccgctgggaaaggacgtcaatctcgaaaagctggcgcgccgcacgccgttcttcacgggcgccgatttggaaaacattttgaatgaagccgcgattctcaccgcgcgcgcgggacgcaaggaaattaccatgcgcgagatggacgaagcggtgatgcgcgtggcggctggtccggaaaagcgttcccaccggatcaccgaaaaggatcgccggatgacggcgtatcacgaggcgggacacgcggtggtttcgtatttcttgccggatggcgatagcgtgcacgagatttccattgtgccgcgcggcatggccgggggttatacggcgtatttgccggaagaaacgaactatatgtcttccgcgcgcttgaaggcgcgcattgccagcacgctggccgggtattgcgcggaaaagctggtgtttggcgacgtcaccacgggcccgaatagcgacctcaagagcgcgacgaataccgcgcgccgcatggtcacggagtttggcatgagcgacgtggtgggcccggtgttcctgggcggcgatcacgaggtcttcttgggccgcgatttctcgcaggcgcacgcgaactattccgaagaagttgctgcgcgggtcgatagcgaaattcgtcgattgctggaagagggcatggcgcagtgctatgcgattttcaaggatcacatgcgcgaactggaagcgctggtggaaattttgctggagcgcgaaaaggtggataacgacgaattcaccgctgtgatggaaggccgtgctttgccgaagcgtacgcaggcggcagaagagggaaatccgccggaatcggaagaggaggagaagcaggaaactgctgctcctgaagaagcgccggtgcaagcggaggaagacgcgcaggcagaggaaagcgcagaacccgaaaaggcgccggaagaaaaagatccggcagaggaagaatagtttttagacgtagaaaagggctgcctcttatggcttgtaacagagccataagaggcagcctgaattttttgcgagaactttatgcgaaggtcagcagcacatcctcattggcgctttcatcgtatccgttgcccgtgaaccgacgcgcgcgcagcaccacggtttccggttggcagaacatgtagtagacgcgagtggaatattgccatgcccactggccgtcttccagttccaccggtgcttcaggaaggttgccgaaggatgtagcgacccatttcgcaccgtctgcgctgagcagctcgtaggtccaaaaagtttcgccgtcgggcggatcggcgagggcggcgtccctgctttcatagatgcgttccagcgcaaaacgcgcgcccgcctcgctcatctccgcctgcgtcacgcgcagcgtgtagccgtccatggccacctccagcggcacaccgttcgacagagcagagcgcacttcgcccgccctcatcgtcatcggtacggacaggcgcatatcctccagcagtgggcagccgctttccgccggggaaaaggttcccagctctgccaaagcggcggcctcctgcgcattttgcgaaacgtcgtacagcttcatatccagcgtgaattctccttgccccggttcgaaatgcgaccagagcgtgccgtggaagcgggcgctagcgctctctccggggacaaggacgaggctatcccaatgcgctccgccgcaaacatcgtattctatgccgctgaaggcagcaaaaaattcgctggtgcttataaaaatggccttatccgtcaggttggttacgcgccaggtcagcgccgtgaaatcgtccaccgccagtacctgccccacttcaaaccgcagagtttcgttttcacaaacgacatccgagtcctgcgccagagaagcgatcttctcccgataggcagcgttggcggcgcggctggcttcggcgttttcttctcccgcatctgcctcatagagaaaaaggtcgcttaacggtgggagggcttcttccgcgtaggtgggcagcgcgcagggcacaacggcaagcagcaaaatcagggcaagcagtggtttcatcatggtttttatcgttttcatcgattttgtatcctttcacatggaataaggcgcggcaggcggtttgcccaccgcgcgaagccttagggttccagcgtcaattcatggttttcgtagcgctcctgtgtccagcaattgtaggcgcgtggggtcacgcttccgggcaattctttctgggttgcgagagagccgctctgcaccagcgaaccatccacgcgcacgccgcacgaaggatattattcagcgctttggctgctggcgagcgtattgtggcgattggcgtcatccagggtaaaaacaagttccgtctcctgccggttttcctcgtccatcgcataaccggtagatgcgtaggtaggttcatctgcattttcttcgtaatagccgtagagaatggcgtcttcctcacttgcggcgggaatgagcggcatcacgctgcattggagtgtgctcgtgaacgcgctgccttcctgttcggagacagtacacgtcagcgtcaacctcaacgtgccgtcttcttcccagtgccagtcgatggaatggatgaacgcttcacccagggcgtccaaagcgcttgagatggtcacgtaggccatctgcaagtcattctgttcggcgtattcgccgatggtcaaggaatttgtgctatctcccgtcaagaggtgcatcggatcttcgggcccatagccgggcacgatgagcagcagctcttgtttgggcgtcacgtctaccaccagataggcatattcttcgtcgtacacggcctcccgcagctggaaatcggccaactcgccggttccgccttcctggggtggctcagtggcaaggatctcgacatcttcttccgcatctggttcatagagggaaaggtcgcttaacggtgggagagcttcttccgcgtaggcgggcagcgcgcagggcgcaacggcaagcagcaaaatcagagcaagcagtgttttcatcatggtttttatcgttttcatcgatccttgtatcctttcacatgggatgaggcgcggcgggcgctcttcccgccgcgcaaagccttagggttccagcgtcaattcatggttttcgtagcgctcctgtgtccagcaattgtaggcgcgcagggtcacgctcccgggcaattctttctgagcagcgagagagccgctttgtaccagcgaaccatctgcctgcaggtgaacttcgcctccgcgcgtggctccatcggccagggcgttcccgttcgcgtccaggaactcgaaccatacgccatcctccgtggccgcataagcggcttcatcggtgacggtgaagtggatttcataatacaaggccatgggagaagcggtgaggcgcacggaatccacgcgcacgccgcacgagggatattccgcgctttggctgctggcgagcgcattgtggcggttggcgtcatccagggtaaaggcaagttccgtctcctgccggttttccccgtccatcgcataaccggtggacgcataggcaggttcgtccgcattctcctcgtaatagccgtagtaaatggcgtcttccccgcctgcggcgggaatgagcggcgtcacgctgcactggagcgtgctcgcgaacgcgctgccttcctgttcggagacagtacacgtgagcatcagcaccaacgtgccgtcttcttcccagtggcagtcgatggaacggatgaactcttcgcccagggcatccaaagcacttgagatggtcacgtaagccatctgcaagttgttctgctcggcgtattcgccgatggtcaaggaatttgcgctgtctcccgtcatgaggcgcatcgggtcttcgagcccatagctgggcccgatgagcagcagctcttgcctgggcgtcacgtctaccaccagataggcgtattccccgtcgtacacggcctcccgcagctggaaatcggccaattcgccggttccgccttcctggggtggctcagtggcaagaatctcaatggcttcgggcagcggggcgctgtcgctttgcccttgattcagaaagtcaaatagcccccagtgattggcggcggcaaatgccgctgtgctgatgattaggcaagcagccacggcgatggccgcgctaacacgcatcttgcgcttcacaggttttttctcctcctcgtccagcctgcggagcgtattcttcacggtggagacaaaggctgcgtccgggtcaccaaaggccctgcgaaagtcgcgctttttcatgaatactcctcctcagacaacaattctttcagttttgcccggccatttcgcatgcgggttttgacggttcctggcgcaatgcgcagggccagggcaatttcatgtatggaatatccctccatatagtggaggacaatgggcgtgcgcacattttccggtaagcacatcaacgcgtcgtgcagaatgggatctgcgccgggtggagcggtccgctcggggatttcctgcggcagttcgcgcttgtgccggtgaacgttgtagcactcattgatgaggatgcggatgagccatgttttcagataacgttcatcgcgcaaagtccttcgcttcttccacgccttttccagacagctttgcacggcgtcctcgcggtcgtatttgtcgcgcaggatggaatagctcacgcgatacagcgtatcggtaagcgctatgatttcctccgcaaaacgttcgtttgtcatggtacacctccaacctcttttgaccggtcatctgttagacggccggcgggaatgggcggtttttggcgcaggaaattttttgtgattttttgtcaatgggaaacgcggccagagaagcgagaaaatccgccacggcgggataggccgggcggattttttcgcgatggttctggcaatcggcgcaatcgcaaagcgccgccgcggtaagactggcgcaattgcgggcgacggctgcatgtgcggcatggcggcctcctgtggttaagtgtcgatccgcgtcagcgcgtggatgcttttgttgcggtacaccaaatcatcgcggctggaaaaatcgatcttttcccaaaatgcgttgcctgccgcgttgcgctggaaaacgaccagggcggctttatggatgccttcccgttccagcgccttcatcgcgtgcgcgactagcgcactggcgatgccttggcgctggaattcgggcaaaaccgcggcgtggtaaagatagccgcgccgcccgtcgtggcccgccagcagcgcgcccaccactttgtccccgctttccgccacgaaacaggtggtgggattgcgctttaagtatctggcaatgccctctttgctgtcatccgcggtattcaggcccatgccgggcgtgtgaatccacaggtcataaaccagttcatagtcttctattgccatctggcgaatggaaaccacctgacaaaacctcgctttgaaaaagcgtttccccataaacgcagaaggtttatggggaaagcaatcgatcctttgcggcttaaaatcgattatggcacaaagcgcgccgtgcggcaggccatttcgcggatgcttacgcggccaaagccgtctacgccagaagcgagcgtgtcgttgagcggagcggtccacttttcgggcagcgctttggcgcccagcattacgcccaggatggaaccggcggttgcaccgttgcagtccgtatcaaagccggggatcacggcaatgttcagcgttttctctagatccatttccccccagagcagggcaatggccacgatttgcgcgttggaaatcgtgtggcaccaatcgtgaccgtcatgctcatcccagcgctcgtgtacgcgcgcaagtgcgccttcccaatccatgccttccgcccgccaggcgaacacatctaccaaagcgcggtggagacggctctcgggcgggatttcgttcatgcccgcgcaaatggcttcgcgcggggttttcgcgccaaacgcggcggcaatcgtcgccgctgcccacatcgcgccatagatgccgtttttcacgtgggagatgcacgcgtcgcgccacgccatatccgcggccgcagccgggtcgccggggttgacatagccgtacaggtcggcgcgaatttgcgcgccaatccattcgcgataggcattttggtgcgtagcggaagcgggcggttcataaccctgcgcaaagttgcggtacgccacgcgctccgccgtgcacaggtgcaggatgggcaaattctgcatccagcattccgccacgtcttcaggcgcgaaatcccgcccataggtttccaggattttcagagcgatcagggtgtagttcgtgtcgtcgtcttccggcatgcaatccacctggtcgatgaatgcgcgcttttctagggcgatcctttccagctttgccgcttgcagcacgctatcgcttacatcagagcgcagatagtgctggatggggtagttgcccgttgcgcgcaaaaaggggtgcagtttttccgtgcgccagccctccacgggcttgcccagcaggcaaccgcaggcgcgggccagccagccgccataaattttgtccagcagcgcttcgcccgcgggcgcggcagtctttgcattgccctttgccaggcggcgaatggcgggaagatcgctaggttctatcgcgtcgttcgcgcaggggcaagcctgtacgcgcgcgtagagctccgcgctcaacgcatccctttccgcgctgtccggcatctgcgcggcgcggcgcagcccttcgatcagggccgcgtccatcgcacgcccttcctcacgcgcctgtttttcctcgttttcgatgccgcctgcgggccgcaaccacgcatggtttttgatcatatctggttcgcctccatttctattgcttgaacgaaatcgttcaggtagcccaagtcccaaagcatggagcaggaaaggtatttatcgcggatgtcgcgcgcgccgagcaaggcgtctttggtatcggcaagggaaacgccgatgcccgccggggtcatgggcaggccggcggcgcgcatgacgccgatgatgaaatcataactgggcaattcttcgcggatgatggagagtacttcatcccagtggccgatcagtttttccacgcgcgcggcgtgcttttgcggatcgtttttgtgtgtcttttcctcgatttgcaaaatttgcggcgcggtcttgccgaagatgcgccgcacctgggcttcccaggcggccgcgtcgaaattttccgttacggccatggcgcgcgcccggtcgggggtgaggcgcaggatcttttggtagatttgcatggtcagcttcgtgcccacgcccacctggatgccgtgcaggtcgctcttgtggccgcgctccagcgccatcatttcccacatgtgggagaaatagtgctccaggccgctggcggggcgggaaacctcggcaaagcccatcgccatgccggaaaggatcagcccctcggcaatcgcgcccacggccgcgctatcgcgattgggcaagccggcggcggcgtccacgcactttttcagcgagcggcgcacgagcttggccacttcctcgcaataatattcgccggtgaccaaatgggaaatgcgccattcgcagatggagatgtacttggctagcatatcgcccaggcccgcgcgcagcatgcgcatgggcgcgtttttcatgatatcggtatcggccaggatggcttcgggcacgcggttgtacagcgtggtcttcacgccgttcacgatcatgctggaggaattggaggcgtatccatccatggaaggcgcggtgcccaccaccagggatggcttgcccgtggcgtggcccaccaccttgcacaaatcgttgatcacgcccgaacccaccgccagcaggcaatcgcaggagggatcgagcgccatggcgatggagcccaccgcccattcgtccggctcgatttcctcgcgcgcaaaagtgaagggaacaaattcaatgccggcatctttcagcaccgcgtgcacttgctcgcctgccgcgcgcagcgtatgcgggtcgcacaccacaaagggcttctttgcgcccataacccgcagcgcttccggcagggcgttgaccgcacctgcgccgatcttaacgaatttgagcggcgttttatgcgttttgccgcatgtgcagggaaactcggctggcgcaatgagatgttcaatggaaagctcggaaaattgcatggaaatggctcctttcgcactatgacggtttcatatgtacgctttacagcaggaacacgccgcttgcggcgcagatgtcgcgcgtttcttggggccaaagcgaaacctgcacttcgccgatgtggcacttttgcagcatcagcatgcaaagccgcgattggccgatgccgccgccgatggtgaggggcaattcgcccgccagcaacgcgcgatggaaatccagcccggcgcgctcttcgcacccggcgattttgagctgccgtgcgagggactcctcgtttacgcgaatgcccatggaggaaacctcaaaggcacagccgagcaattcgttccatacgatgatatcgccgttgagcgcccagtcgtcataatccggcgcgcggccatcgtgcggcttgccgcccttcagcgcgccgccgatctgcatcacaaacacggtgcggtgcttgcgggcgatttcgttttcgcgctgcttgggggagaggttgggatacatgtcttccaattcttgcgaggtgataaagaacacgtccgggcagatgcagggggtcaagcgcggatacatggccgtggtggccagctccgtggcggccatggcgcgcacgatcacctttaccgtgtttttgaggtattctacggtgcggtcttcgggcaagatcaccttttcccaatcccactggtcgacgtaaatggaatgcagattgtccggttcctcatcgcggcggatggcgttcatatcggtgtagagcccttcgtgcggcaaaaaaccatagagcttgagcgccatgcgcttccacttggccagcgaatgcacgatttccacatcgccgttgacatcgcgcacggaaaagctcaccgggcgttccacaccgtttaggttatcgttcaggccggaatcgcgcgtgacaaacagcggcgcggaaatgcgcagaagctgcatggccttggaaaacgtgcgctcaaaggtatctttcacaaatttgatggcggtttcggtttcgcgcacatcgagcgcgcttttgtagccctggggaatgtagcattgggtcatattcgcacctccataggtgacagtatagcaaatttgtgttaaggataggcgcgcaggaacgatggaatgcgaattttttttgcggcacacgcgcttgcctttaaccgcgatttttggattttgcggcggacgcggcgcgcgcggcacggtatactggagaataggaatttgcattgcggaaggatggaacatacatgaagaaagtggatacgcatgtgcatacctgcgaagtaagccgctgcgggcacgttcccggcgccgagatggcccgcctctatatacaggcggggtacgacgccattttgatcaccgaccattttatcctcccagaggtggcggaaagtggcaaaacgccggaagaaaccgtggaagcccagatgcggggataccgcgcggcgctggaaggcgcgggcgataagctccaggtgtttttgggcgcggaaatccgtttttttggcggtgaagaggattttttgttggttggtttgaatgcggagaaatacctcgccattgcgcgcgccatgccgcggacgccaggcgcttgccgcacgctggcggagaacatgggcgtgcttttgtatcaggcgcatccctaccggaaaggccagcatcccgccgcgcccagcgatttgagcggggtggaagtgctcaatgcccatccccggcacgatagccacaacgatttggcgctcgcctacgcgcaacagcacggcttgcgcatgctgtgcggttccgacgcgcaccagacgatggacgtggggcgcggcgggatcctcgcgccggattgggtgaacaacgcggaggatctggccgcctatttgcgcgatacaccgcgcccacaatttttgtttagcggcgcgccgcaggcgtaagagccgcatcgacggcttgcatcaactggggcaagagctggccgctgcccgatggcacgcgctgcgtgccaaacaccacggtcagctcgcgggcggggtcgatgcgcagcgttgtgcccgccatgccgttccagccaaagctgccggcgcgttcgcggtattgcccgtttttgcgctcatccaccagcgtgcgtaccaaatagccaaagccgtacccatgaggcgcgtcccagaaagtggaaagctggttttctgtcaattggttttgccgcatgcgctggatggaagcgggcgaaaggatgcccgcgccgtcttgacgcagcatttcgccaaaggccatgaaatcgtccagcgtagaaaacaggcccgctccgcccatttccacgcgcgagtcatccagcccatagccgagcgcctctgcgcgcggcgcaaaggaaccatcggccacatagctgtataaggtggcggcgcgggcagcctgggcttcgcccaaggagaagcttgtatccaccatgccgagcggatcaaagaacgtctttttcaggaaatcgcccagttccatgcctgtgacggcgacgatgatgccgcccaacacgtcggcgctcaggccgtagagccaggtttcgcccggctcgaagcatagcgggcactgcgcgatggcgcgcacaaaatcgcgcgtgccacacgcgcgcatgtcgcccagcgccgccaattgcttttcatacatttgcgagatgggcgcaggggcagcgtcgggatagggaatgcccgatgtcatggtgagcaggtgctggatggtcaattctgtgcgcgcggggcgcagggttccatccggcatgagcacattcatgtgggcgtattccggcaggatggccgcgacaggcgtctctggcgcgagaatgttttgttcgcacagctttagcacggcagcggccgttacgattttgctcatggaaaacatgcgcatgacggtatcgcgggaaaagggcgcgcccgctgtcaggtcgcgcagacccgcgctgccaaagaagagttctttcccgccctggcgcaccagcgccgccgcgcccgtcacttgtcccgtttccacgatgtcatgtaaaaatgcttgtatcggatgcatacttgctcccatcttggcgcaatcagcgctgatccaattcttcgcgatagtgcggcgtgccgattaggccgatctgcgcgaaatccgccatattgtgccggatgatatagtcgatataagaggcgaacagccgcgcggtaaagagatatccggcgggattcatatggccgccgaggaagaattgccggtggaacgcttcgtcgtacacgggcgcgtgcgcgtttaggtcaataacgtatgcgtgcgggaaataggccgcgaattggcgcagcagcgcggcgtgttgcgccttgacttcctccctttcgggctgtgtcgcgtcacgcggcatggtaacgaaaaagaagcgcgcctttggctggatttcttgcaaacgcatgacgatttgcgcgtaatatcccgcaaaggtgggctggttctgccgccaatcctttgggttcacgtcgtccagcgagcccaggggcattttcaagccgaacaggtcgttcacgcccagcgcgaggatatagccctggcaggccaaatcggggttccaatagccgtttgtctcggcaaagctttcgcagtattccttggcggtcatgccgccgcgagaaaagttgcgcgcagtcagccccgccatgcgggccaggtactggccccaggaatattcgaacatatcgtgataggtcttgttgccgttcgcgtcgagcgattcgaattcgcctgaggacaagctgtcgcccacgcagcctatggtgcggaaaacgccgcacagccctccgtcggtcaccagggtatccagcggcttctcttctgcgcgagggaaaaacggttctatattcattaaggcaacctccctttgttattggcgaagatattgcagcgcgccttccatgttgatggcgctttcccaggggcggcagcgcgtgttttgcggctggccgccgtcgtaatattcggcccacatgccggcgctgtcttttaaagcgagcatatgcgcgagcaaatcgtccgccgcgagtccaaatcgggctgcggcatacaatagcaggccaaaatcgtatcctacgcaacggctgccatcgggcaaggagggcaaaacgccggtttggcggtattgcgccagatatgcgcttatctggctgcgcaggtattcctggctcaatagcggcgaatccacatagagcgccatcagcagcgcgctcttgagcgggatctcttgcgtgcaggccggcggcgtaagccgccctgcggccaggcagtgtgggcaaacgtatatgccttcgcccacgcgcttgagccagccaaaggtatcgccgttcgggcacatgccatggcggtatgcgggttccgtcaagccttcgagtcgcgcgagcgaattggcgatgtagccgtctttgcgccggaaattgtcctcaaactggcgcttcgcgtccgcgagagcctctttcgcctggcggatccaatcttctttttcttcggcgcgccgctgggccaaatagcgcttgccgccctcgataaaaagcattgtggcttcgaatgagccatggttgagcgcggtgcgcggcaaaaaaccgcccgccacataggtttcgtcgccattgaagggcagcatgccccgatgcaactggctgatctggcggcgcagcgcccaatccaacatgggccgctgcctgtcgaaaaattcccggttcccggtcgcttccaatagctttatggattgcaacagcaggtagccggtgatttccacggcgtcgttttcgtgttcgtgaaagctgccgggcacgccgatgccttgcgcgttggccaggcggccggagcgcgcaaacacatcgtgggaaaatcgcacgattgccgcggcttcctccaggcaacccatggcgagcaggccgcggaaagtgccgtattggtcgcgcacataggataggtgatagttgtgccccgcgagcacgccgccattttgcccctgctgcgcccggatgaggaaggatacgccctcgctcgcctcccgcaccgcttccgcaagcggatgcgctttgagcgcgggcacgcgctccagacggcgctggtggaatgccccatcctcctcgcgcgcagcgcgaaaaatttcttctggcgcggttgccagcgcgcgctccatggcctccacgcaggcgggatatgtttccgcgcccaccacgagcatgcagccttcgcgctggaaagtgacgcgcagcgcgtcttccagcgcttccacatgagcgcctcccgtgaaagcaatcatcatatagcggcgcgcgccgcagggataatcgttgtagtaaggcgtgcaggcgggtacgacgattagagcagcccacgcgcagccgggaaacagcgcggtttgcccggcaagttcgtgcccgtggaggcatagcttcatgcgaagcgcctcgcgcagccgccaggcgcgcagcaggcagacgggatggcgagcggcacattccgcgatttccccctggggcaggcggtgctcccataaattgcttcccggtaaacgccgggattcgcagcgcggcgcgccgccttcctctgcgataagggaaaacatcgttgggctggaatagggcgggccaaagacctgcacccattcgattcccctgccataagcgatggtctcgccgttgcccagggcgtgcagggcgcgatcggcccggagttcttgcatagcatacgcctcctattgctatagatttgctttaagactatgttggtcaggcatggctgggtgacaaggcattgctttagattttttgttttaattcggcacccagcgccttttttcctgccaaatctttcactttgtgcagctatctatggagaagcattggccattttggaagatgcgaccatttgcaaggcggttctttttgtgctatactgtagcatacacaaggcgggaaaggggatactacaatgcgggaacgggtgagcgaaaattgcgtcaataccacttcttttaaagaagaggtagaattcagccgtgaaacgccgcattctgttcgcgtaaaacgtttttttacggatgattcagtaacgcttcactatgctcccacgatcgaaattatcattgtcacggatgtggagggagaagtgatcgtggggcaaagccaccatcgctttctgccgagggatgtggtgatcattccgccgtattatacgcattctaccaaatgtcgcaagggctcaggcaagctaatcaatctgaaaatttctatggaagatctcaaagcgtttgtgaacattcccgctctgattgagtgggaaaacgccagcatatccggcgtgttttatgctgccgaactatacgatgaaatgagcacgatagtccggcgtttgatcgaaaaagacgacaatatttttgaacgcatgcattgtatgctggatatcgcagaaatattgatccgcgtcaatcagaaggcagggctagagcagaaaaggcaggaacaaaagaaggacgcgcgcatttatcagctgattcagtggacgtatacacattatggggaacgcatttcagtggacgaagtggcgcggcaggtcaacatgagtaaagggtatttttgtaaatttttcaagtccatttctggtattacgtatattgctttcttaaaccaagtgcgcatagaaaaagcgactgatctcttaaaggctgggtataacgtgacggaatgcgccatggcatgcggctttgagagcatttcttattttgtgcagatgtttaagcgaaatttgggttgtacgccagggcaatttttggctgctatatacacgcaaaatgacaatatcacgatagaataggtgaaaatattgatagctgcctgcaaggaaaaaagctacaatgatgttgcttgattgaaaacggccgacgtccgggaggaaaaacgcctttttggatggcggagatggtttggaagtgacggtttgtggcgcagaacgcaggacagcagggcttgatttttgattttgagcggttttctaccaaagacgggccagggattcgcacggcggttttttttaaagggtgcaatttgcattgtgcctggtgccacaatccggagggaattcgctctaaaatcgaattggcgtttcaagaggagaaatgcgttgattgtggcatgtgttttgcaatatgtagacaacatgcgcaccagatggcgcctgcgagacatcgattgcagcgcgacctgtgcaaggagtgcttggagtgcacgcagcattgtttttctgatgcattgcgaaaagttggacaatattattctgtagagcaagcattgaaaattttgttgcaggatgcgccatattatgccgcttcggacggtggtgttacgctgacagggggagaggttatgctgcaaaaggattttgctgcgaaattgctttctgctctccatgcacaggggattcatactgctatggaaacaaatctttgcgtcccgtgggaagagtatggcgctgtgctggatagtgtggatttgttcatggtagattgcaaaactatgcgaaaagaaacgttccagcgctatattggtgaaggattcgaacgagtatgtgaaaatctgacgcggatatttcacataggaaagccacttattgtgcgaacgcccgtgattcccacagtgaacgcggatgaaattggagccatcgcgcgtttgcttcgcagcgcacccaacttgctatattatgaacttttgtcttaccatcgtctgggcaatagaaaagcgcggatggtgggcaggaaggcgatagagggcgaaaacaatgtcatatattgcgcgaatagagcacttgcgcaaaaaaaaggaagaacaaacattggaaaagctagccatgcaacaggattatatgaatgaagacgattatggcagcgtacctcctccacaagatttccattttgaggtggaatacaacgatcctgtacacaaaacgttttatggggctgcgttgtgggccaaaaattttcgccgtttgctggaagtgcatccattatatgtggatccgcaggatgctttggcgggacgatggatgtttatcttacagcgctttcgcccttttgaaaatgcgacttctaaccataatatggaaatggcccctgtttttaactatgattttttgaaagaagagcaggaaaaatacggtattattccgggaattgggaaaatgcatcattttgcaccggactatagcattggactcgcactgggatggggcggactacgccaaaaagtacagcgctgccggaaattgcatccagaggcagcatggctatacgatgcggaagaagaagtgctttcgggcattcactgctggatggctcgcacgctacaagaaattcatcggcagtgggaacgggaacaggatcctgtgctgaagaacaatttggcagaaatggaaacctgcaatcggaatatccttacaaaacccccggcatcttttctggaagcctgtcagtggatcgcttggtttaatatggtcaatcgcacatacaatcgtgccggctcaggctgccaattggatgaaattttgcgcccgtattatgagaatgattgtgccaagggaacgctagacgatgaaaaagctacgttcatccttgcttgtctgttcatcaacgacacgacgtattatcaaattggtgggccagctccagatgggcatgacttgacaagccgcctttcctacctgattctggaggcagggcatttggcaaaaacatccgtcaatttgacggtacgggttcatgcggaactccccgaaaagctgctgcgcaggagcgttgaaattcttttggaagaccgtcgggcttttccgcgcttttctggcacggaatctttggtgaaagggttcatgcgcaatgggtattccctggaactggctcgccaaaggattgccgtaggctgccattggatgtcgttgcctggtcgggaatacaccttgaacgatttgatcaagatcaatttcgccaaggtaatggaagtggctttggatgaatatatggcgcaagtacaggatgcgcactatgtggaggtattgtatcagcggtttttgcgtcatttgcaacgggcgcgggattgtgttgcccaggggattgattttcatttgaagcatcagtacaaaaatgcgccggaactggtgctgaatttggtatctcacagcccgttggagcggggactggacgcttcgaatggcggaatggaatattacaatctttgcgttgatggcgcggcgcttgctacggtagcggattcttttgcagcaattgagcagcgcgtggagcgggaaaagcgactttcgtggagggaactttatgcggctttaaaggaaaattttgcttccaaacgaggcgcttacattcgcgcgatgttgcaaacttccgaacggtatggacgtggcaattcgttgggcgatcagtgggcagagcgcatttcccgtgattttacgacgattgtcgtttccgcgccgacgccggatggatatcgcatgctcccaggcttgttttcctgggcaaatacgatcaatttagggaaggatgtgggagcaacggccaatggccgctatgcgggggatccaatttcacatggcgcaaatccgttgccaggcttccgcacagacggggcgctcacggctctttccaccgcggtggcgcgcgtgcaatgcgggtatggcaacacagcgcctatgcaactagaactcagtcctaccatcgccgatgatgaaaagtctgtatcccttgtggaagcattgattcaaacacattttgccatgggaggaacgctgattaacatcaatgtgatggacaaaaccgtgctgttggacgcttatcagcatcccgagaaatatccggatcttattgtacgagttacgggttttaccgcgtattttattgctttgagtccggaatttcgcaagctgattgtagaacgcgtgattaccgatgaaccagcttcgcagacaaggtgtacctgtgtcatttaaaacgatgcgaataaagaaagggacgtgatagcatggcaaattttgctctcatacatacgcgcaagcggaatctggctagagagattattaaaaatcgctggatctatctgatgatgctgccggtggttttgtattttgtgatgtttaagtatatcccaatcggatatttgagaatggcgttctatgattataaaattctgcgcggctttgtaggtagtgattttgtaggcctggaatattttgtgaaattttttggatcgaggaattttttgaaccttttgtataacacgattgaattttcgctaggcgccattttttggcagacattgatgcccattgtctttgccttgctgatcaatgaagtgatgcaaccaaagatcaaaagggcgtaccaaacaatcagttttatgccgtattttatctcgactgtaattgttgttactatgattaatagtgtaatttctccttcgacaggcatgttgaactccctacgcaaggcgatggggctagatactgtgtattatctgggaaatccaaaatatttttacgccattaactatatttcaggcgtttggagttgtatgggctggaacagtgtgatttatatcgctgcactagctagcgtagatatggaaatttatgaggcagcggtggtagatggcgcaagtcgcatgcagcgcctgttgcacgtgacgattccttgtatccggcctaccattgccattttattaacgctgtctgtgggcggaattttggcggggggaaatctcgataagctgatcctcttgcagaatgatttgaattatacaaaatcggaaatgctcaatacgtatacgtataaactgggaattgtgaacgcgaaatacagttatgccacggcaatagggcttggaacctctgtcatcagttgtattctggtgatcattgccaatcgtatatcttccgctctttctgattccaattttagcgtgttttgagaaaggagaatggaagcatggagcataagatgcgagtgacgcgccggattcaaagcagggatgataaggtatttgacgccgttgtgcatgctattttgatcattctttctttgttctttctgctgccgtttctcaatgttctttctctttctatcagcgaaagccaacatgtagtgcgaggcgatgtgtacttctggcccaatgggctctcttttgaagcgtaccgggaaatgctggatagcatggatattgtgcgggcatttctcaattcggtttttctggcggcagtaggctgtgttttgagcgtattatttactgccattgctgcgtatcccctggttttttctaacgctcctggaaaaaaggcgtattctattatgattatgatcacttattggttcagtggcggtatggtgcccaccttcgttgttatgagccaatatggattggttgatagtcagtggtctttgattttgttgagcttgattagtgcctataatgtgttggtagtgcgggcattttatcagtccatccctatgtcgctggtggaagctgcccgcatcgatgggggcaatgagatctggattctttttcgtctgattcttccgctggcaaagcctgtgctagccaccgtcgccatgtgggtcattgtgggtcattggaacgattatctcaatgccagcatctatttgaaatcgtccgataagtataccctgcagttggtgctgcgcggtatgctagcggaacgcgctatgaatgccgaatcagcggcggatgaatggcaaaatttgggcttgggctctcaattgaagtatgctacggtcgtcatttccatgattcccatgctgtgtatttatccgttttttcagcgctatttcgtaaaaggcattatgattggcgctgtgaaataatgcgaccattttcactgcattccttttgtgttcactgcagggaatacaaaagggcggtgatggaacaataaagaaatagaggaggattcttcatgaaaaaactgctcgccctgcttctttctgccctgctgtctttaacggcggtgggagcgctggcagaagaagctccgctggaattttcttatatgaccatctcttcggacacttggaattcggaacaactgcccatggtggaactgcaagcgcgcaccaacacgcaaatcgatttcattacagtgctggatggctatgccaccaatttgcaaaccatgttggccacgggcgatatcccggatgtaattcaggtgtgcgataaggcacagttgtctatgctggttgaccagggtgctatcttgcccattgaagatttgctgaaagaatatggccagaacattcttgctgtggttggagaggccaactacaatgcagtgcgagatgcagacggccatatctacaccattccttttgttggtacaacgcccttgaccaagagttggatgatgcgcaaggattggctggatcggctgagtctagaagtgcccacaacctgggacgagtgggtggaagttttcaaagcgtttaaagagcaggacgccaatggcaatggggatcctaacgacgaaattcccttcactgccatggatacctcgctgctgtacacctttgatattgccgccaacgacattttttgcgtggacccggaaaaccactatacgctgatctatgaacatcccaattatcaggcgtatctggagactctgcgcgatttgtatgctcaaggcctgctggatccggaatacttggatcgcacgggcgaaaccaaggaagctgcgttgacggccgcaatggccaacgacctggtgggttgttgctggacatttatgaacaacatgcaccacgtggatgccattgagggcgcgcaatacatttacatggctccgccggtaagcccctatggcacgcaaactcagccgggacgcgtgcttggcgtatcagacaacgccgccaccatttccgttgctgcggaagataaggccattgcgttaatccaattcttcgactatatttttagcgaagaaggccagctccttttcagctttggcgtggaaggcgtacacttcgattatgtggatggcgaaccgcgtctgcgcccggaatatacaacggactttaacacgtatcgcgcgcagggtatgaattatcagcccattgctcatgtctggacaggggacgcttatgtgcaggtgtttaccaatggcgcaactttcgaggagatggattctgtagcccagcagtttaccatcggtgcggaaaagaacgaggaatacggtattgctgtgccgcccattttcaccacggatgcatacagtgaatattacgcagatttgggtgcgcaggtgaaatccttggaagccaatgcggtagctggcaatataaccgtggaagagttctttgccgaatacgaaaaactcaaggaggaaggacttcaggaagtgatcgatcaggcggatgaagcctggcaggccattcaataatcgcattgtgattggtgcttttgtgttccggcaagaacctgcagcttgccggaacacccttctgaaatgttctgcgacaaaggggaaagagacatggaaacactgaaaacaggcattattggttgcggcggcattgccaacggtaagcatatgcccacgctggcaaaaatggaagatgtggagatggtagctttttgcgatattgtccctgagcgcgctcaggaagcggcccggagatatggagcgccgggagccagagtctatacagattatcgcgatctgctgcgggaagcagaaatcaccgatgtgcgcgtgcttacggacaatagttgccatcgcgccatcaccatcgacgcattggaagcaggtaaacacgttttgtgcgaaaaacccctcgctataacgtatgaggatgcaaaaagaatggtggaaacttctcacaaaacggggaaactgctcaccgttggctatcagcatcgctacaacttggattccatttatttaaagaaggaaatggaagcaggcacgctgggagacgtatatatcgccaaagcgcgggtgttgcgccgtcgcggtgcgcccacctggggtgcctttcaccaaaaagaaaaggtgggcggcggccccatgattgatgtcggtacccatgtgattgatttggtactgtggctacttaacaattatcagcttcgttatgtagcggctatgacctatcaaaaactcaaagaccagcctgatttggccaatccatttggcccgttgaaagcagaggaatttacctgcgaggatagcggtgtggctcttttggtgatgcaaaacggcgcttctgtaatcatcgaaactagctggctgctcaataccttggaagctggcggcgtacggtatttgttatgcggcgatcgggcaggggcggacaatttcagcggcaagttacggatcaatggcgttgcgcaaaatacgctctacatcgccgagccagattttcagggcagtgg

SEQ ID NO: 4440 - DNA, 11764 bp, Unknown
  16S sequences of unknown bacteria
tcgcttgcgtctttattttttgagttttctgtaacttatcattgacgactgtacaaaaaagaataacaaaaatacaaaatcctcttgaattaaggcgtaaaccgtggtataatgcagaatgtaatatgatgaaacgctgtgaggaagagtgcgcggacgctttccttcaaagagaaccgaagtcggagggctgagagcttcggtgtcggattaccgcgcttgttcacttctgagaatgctcgtttgagctgtagcggatgcggtgacattcagccgtgtacgttttcggtgcgttaagccgacgaagcgccgtatttttatgcggaattcgggtggtaccgcggttatgtcgtcccgtttatcggattattccggtgtggggcgctttttttgttggtgccgcgttatcgcgttatttagtatttaacagaaaggattatatcagaaaatgagagagacccttgaaaaaatcaaagccgaagctatggctgcccttgagtccccttcggcacagatagaagagttaaggatcaaataccttggcaaaaagggagagcttaccgccgttctccgcggaatgggtaagctgtctgccgaggagcgtcccgttatcggtcagcttgcaaacgatgtaagagccgaaatcgaaaagaaaatcgaagaaatcacacaggaaaagaaagcccgtgaacaggcggaaaagcttgacgctgaaaagctcgacgttaccattcccggagacaagatacgcgccggtcacacacaccctctcgctctcgtacagcgtcagcttgaggacatattcctcggaatgggctactccatcgtcgacggtcccgaggtcgaatacgactactacaacttccaggcgctgaacattcctaaggatcaccccgcccgcgacacacaggacacgttctacattaccgagaacattctgctccgttcccagacttcccccgtacaggcgagagttatggaaaagactcagcccccgataaagatcatctcccccggcagagtttaccgttccgacgcggttgacgcaactcactcccccctcttccatcagctcgaaggtcttgttgtcgacaaaggcataacaatgggcgacttgaagggtgcgcttgaaatgttcgcacgtcgcatgtacggtaaggagacacagataagattccgtccgcaccacttcccgttcaccgagccttccgcagaagttgatgtatcatgcttcgcctgcggtggtaagggatgccgtctctgcaaaggtgaaggttggattgaaattctcggcgcgggcatggttcatccgaacgttctccgtatgtgcggtatcgaccccgaggtttacagcggatttgcgttcggcgtaggtatcgagagaatcgctcttctcaaataccacatcgacgacatgagacttctttacgaaaacgacgtgcgcttcctcagccagttctgagaaaactcacttcaatgaaaatccgacgtaaataagagaaaggtttatatattatgcagctttcaatgaattggctggcggactacaccgacgtcagcgatataagcataaaagaatattgcgacagaatgaccatgtccggctcaaaggtagaaggatatgagactatctgcggcgacatttccggcgttgtctgcggcaaaattctcgaaatcagccgtcaccctaacgccgaaagactcgttatatgtaaggtggacataggcagagacgaacccattcaggtaatcacggcagccacaaacgttttcgagggtgctgttgttcccgttgcaaccgacggtgcgcatcttcccggagacgtaaagataaagaagggcaagctccgcggagaggtttccgagggtatgttctgctccattgccgagctcggactcacgctccacgatatgcccggcgctatcgaagacggtattctcattctcggcgacgtgggacttggcgacattccgctcggctccgacatggttgacgctctcggaatccgcgacaatgttgttgaattcgagataacctcaaaccgtcccgactgcctctccgtaatcggtcttgctcgtgaatccgcagtaaccttcggcagaaagctcactctccacacaccgaaaagcgaatttgtttcgggcgacggcgacgacatcaagaattatctctcggtaaacataaagaacaccgaaaaatgctaccgttacagcgcaagagtggtaaagaacgtcaagattgctccttccccgctgtggatgagaatgaagctccgctccgaaggcgttcgtccgataaacaacatcgttgatatcacaaactatgttatgctcgaatacggtcagcccatgcacgcgttcgactacaagtgtctgagcggctccgaaatcaacgtaagaagcgcagaagagggcgaaaagttcgtttccctcgacagcgttcagcacactcttgactcctccatgctcgttatagccgatcacgacaaggccgtagctctcgcgggcgttatgggcggagaaaacagcgaaatcaccgactccaccacgaccgtagtatttgaatccgctacattccatcccggaaacgttcgtgtcagcgcgaagaagctcggcatgagaacggaatcctccgcgagatttgaaaagggtcttgactccgaaaacacacttcccgcactcaacagagcctgcgagcttatcgaagagcttggcgcaggtgagattgtaaacggaaccatcgacgtttatcccgtaaagaagcagcccgtccagcttccccttgacgctgccgttatcaaccgctttctcggcgtaaacctcactcaggaatacatggcggaggttatgagaaagctcgagttcggcgtatctgacgacctgcacacgataaccgttccctcgttccgtgacgatgtacgctgcatgaacgacgttgcggaagaaattctccgtatgtacggctacgacaagatagaatccactctgtcaaactccgcaactcccactctcggcgcaagaactgacagacagaacttcgacaacaacctccacgatatgcttgtcggcatgggtatggatgagattgaaaccttctccttcatcagcccctcatactacgacaaaatcagacttgccgcagacgactacagaagaaagtgcgtcgttatctccaatcctctcggcgaggacacatccgtaatgcgcacctccactcttccctccatgctgaaggttctcgcagacaactacgcaaagaagaatcaggctgtaacgctgtttgaaatgtcaaaggtatatctcccgaagagcgaagacgagcttcccgacgaacccggaagaatcacactcggcttcacaacctccgacgacaagaacggcttctacagaatgaagggatatattgaagctatcctcgacatcgcgggaatcacaaacgccgtattcaaagcggaaaagaacgagcctacgttccatcccggaagatgcgcggttgtttactccggcgacaagaagctcggtattttcggcgaggcatatcccgaagtcagcgaaaactacggcataggcgcgagagtttaccttgcagagcttgagagcgacaacatcttcgacacacgccgctgcgagatagaattcactcccatcccgaagcaccccgctatcgagagagacttctcattcgtatgcgacgaggagcttgaagccgcgtccgttgtaaacgcagtaaaagccgcaagcaatcttgtttcatccgttgagctgttcgatatctaccgcggacctcagctcggcataggcaagaagagtatgtcatacgccgtaatgctccgcgcctccgacagaacgctcaccgacacggaagccgacgaagcggtcaagtccatactttcttcgctcgaaaaagaactcggaatcaaactcagataaaattcatacagaataaggatggcgttatcatgaaaacatatcctataaacatcgcaggactgcaccgtgagcttcctatctgcccggtaactgacagcctttcaatcggcgcgttcgttatcttcggcgaccctgagcttacaacagcagccgcaaaggcacttctcgacctcgcccccgagtacgactacatcatcacggcagaagcaaagggtattccgcttgctcacgaaatggcgagacttgccggaaaccagaagtatttcgtagcgcgcaaaaaggctaaggcttacatgagcggcgtatttgaagtaaagctccactccatcacaactcagggtgagcagagcctgttccttgacaaagccgaggctgacctcataaaaggctcacgcattcttatcgtcgacgacgttatctctaccggagaatcgctcagagctgtcgaagagcttgtcaatgctgccggcggaattatagtcggaaagctcgcggttcttgcagagggcgacgcacagacaaggacagatataaagtacctcgaaaagctccccgtattccatccggacggaacagtcatcgaaggctccatccactggtaaaccgaaaacaaaaataagcgcaaaggtgaaaataccaatgcgcctatttttttactcagaacactccgcactcgtcagagcattccctccttatgccgaagctcagccgcagcaggtacagctaagtatgcagaggagaaggattattacgatgatccatacgagggtgtcgttgtcgaaaagattacataagcatcccatgattttctctccatgccgcacgggctattttgaactcgagcgtttttgttccgctctgttatcatggtatgctctcactcggatttggttactctttcagcacaagtttgtcgcagccgaggaaatcgttcgccgcagtcaggcttgttatgggaatgttgaggtgccgtccgcatttgttgcagcacagtctcacgtggtcgtcgtgtatctcaacatcgtagtccccgtctccgtcgcagccgcattcgatagctccctcatccgcaagctcacggacgacgtacatgacgatatcaagcacctgcgggtcggtcagctccagattttttccgcggacgtcagcgagagattcaaagtcatggtctccgagcatctcaagcagctctttttcgctcttcttcatggcttcctgaaccttatcctgccgtccgatgaagcatatgtcgattccggaatagttgcacggtatggtgaacaggtcgcgctcgaagaacatctgggaggatatgatatagctgtgcggggtcgggcagaataagcaaggtacgttaagtctgatttttttgtccctcgtgtagacaagctcaagctcagactcgccgcacggacatttcagctttatgaggtctgccgtgagtgcgaaaatgcctatcatgctcatgacagacgctccacacacgggacagcgatacgctacggtagtttcttttttatcaagaaccatattttgctccaaattcttttatgtatgtagaatgttctcggttaacttttgtttatattatatcacctgaggaatgaaaaagcaaggataatatactttaataatttattatggaatttcgcggcgcaatgtgatataatacaccaaaatgtgatgtgaagggagtgacgatatgcgctacgaacgaggctccgatacggtctgtatttcggtaagcgagctggcgtcttatgcttttcagcgggaaaatcctgcggttctgtccgaaagatacggatttgtgaagaaaatcataacctcggacgaggacggcggagatatcgtgctcccgtcagcagaacacggagtaatactgcatagtatcaccgaaaccgacgcttccctctcatccgcacagacggaagttccgcttgaaaaacacatggaatacggggatttttcgctttcagttagcgggtatgctgatattatctccccgggcgacggcgttcatactgtcgaggagataaaaacggtgtcgtcatttccgcgcggtctctcggctctgtcttatcccgaacacttcgctcaggctgccgtatacgcctatatctacgccgaaaccgcagctctgcctgaagttgacgtgcggctgagctatataaaacgctcaaacggtgagaaggtcatgtttacctcacgcttttctttggcggcgctaactaaaatgttcgagacgctcctcagccgtgcgtatgttataataaacgcattcgccgacagataccgcgtttttcccaccgaagccgacaagctgccgttcccgtatacttcggtacgcgagggacagcttgaattcataaatcaggcttatcgtgtgatgaaaaaaggcggctcactgcttgtgtctgctcccacgggaatcggcaagacaatgtccgcgctgttctcgggagtgaaggctctgggttcgggaacggctgacagagtgttctatctcacggcgaaaaacataacgggaaaagccgcagttgaagcactcgcccgcattacaaaatatgctccgcatctccgctcggtcatgatatgcgcgaaggagataatgtgcccgtactcaaaatcgaaggacgtaaagatgaactgccgatactgcgacaaaaccgacagctccacggaggacttcgggaaaacgtacatctcctatcgtgagagacagcttgccgcacttgacgagcttcttctcgataaagacacggtgttcactgtcgacaggattataaaagccgccgccgagcacaatgtctgcccgtatgagcttgctttggacctctcggaaagctgcgagataataatctgcgactacaactacgtcatcgacgacggaatccgtttcatgcggtatttcaaaaacgtaaagaacaccgaaaaatatatatttctcttcgacgaggcgcacaatctgcccgacagaacgcgcaacacctactctgctgtgttatcgaccgacgacgcggaaaagctcaggacaatcgccgagacctacatcaccgacgacacggagcttgtttcacgcatagacgagctgtcctccgcactcgatgagatatgcgcaatgtgtaccgacagcgaatacgtgaaaagcacggatgacggcgaggtatcatacggtttttatgaaagctcaaccgcaccgtcggagcttatcagatgcgcaggaaacctctcccgtgtactgagaaggataatccgtgacgggggcgactataccgagcttcttgaagagcacaacaggacgctgtcaaagctcgtgttcgcttcatcctattttgacgagaagttccgattcttcgcttcccgtgaaaacaaccgcgtcaaggctgaaatactgtgtcttgatccgtcgggagtgctgtcggcaatgctgtctgcggcaagggcggtcgtgctgttttcggctacactctcacctatagagtatttctgtgaggttacgggtctggagggggcaaaaactctcgagctgcagtctccatatgagcgggacaacctctgtcttgtggcatacgactccatcagcacaaagctcgccgacagaaaagcaagcgcatacgactgtgccgaggtgattgcggaaacagtatccgccagagagggaaactatatcgcgtatttcccgtcatacgagtacatgagacgcgtgtgcaagctgttcgcgggaataatgccggagatgagcatagtaatgcagaagcagaacatgagctaccgtgaaagagagcggttcatttccctgttccgaagtcgaaagagcggtgcggtcataggcttctgcgtactcggcggtatgttttcggagggtatagacctcgcgggagagagccttatcggaacaatcattgtcggtacgggtatgcctcagctgtctgcggagagaaacatcatggcggcgtactatgacgagataaacgagagggggcgcgattttgcctatgtctgcccgggaatgaacaaggtcatgcaggcggcgggcagagttatccgttcagagagcgaccgcggagttattgtctggatagacgacaggctcggcgacgcgaacattaagctgatgcttccgccgcactggagacacataaaatacaccggcgacacctcttccctatcggcgatacttgactctttttgggaaaaacacgcggattaagcacaattttcagataaacaaaaatcggcacggggacggcttattatttctacaaagtgccgaaattgcattttttgcggcttaaatctttatttttgcgataaaacatgatataataactaggttgacaaagataaaaagaattttatacgaaaggattatcttctgccagagaaagataattgacaggtaattgttttgataagagaagaccttcgtaatgtcgcaattatagctcacgttgaccacggcaaaaccacgcttgttgaccagatgctcaagcagtgtgacacataccacgaaaatcaggtcgtaagagagcgagttatggactccggcgacctcgaaagagagagaggaatcaccatacttgcgaaaaacacatctgtcgttcgcaacggtattaagataaacatcgtcgacacccccggtcacgctgactttggcggtgaagtcgaacgtatccttaaaatggtaaacggcgttattcttctcgttgacgccgcagaaggtcctatgccccagacccgtttcgttctgaagcgcgctatggagctcggacacagaatcattgttgtaattaacaagatagaccgtcccgacgcccgtcttgatgaagttccggatgagattcttgagcttctcatggagcttgacgcaaatgacgaacagcttgactcccccgttctcttctgcagcggacgcacaggcaaggcgtctctcaatccctatgaaatgggcgaaaaccttgacgtgctctttgacaccattataaactacattcccgctcccgaaggagatttggacgctcccgttcaggttcttgtttcatcaatcgactacaacgattacgtcggcagaatcggtatcggacgtatcgagcgcggcaccatccaccagaacgaggaagttgttatcacaaactaccacactccagacgctcctccgaaaaagacgaagatagtttccctttacacaatagacggactcaccagaaagccggtaacggaagcttcaatgggcgacatcgtatgcttcagcggcgctgaggacattacaatcggagataccatcgcttctccccttgatcccactccgctcgaattcgttaaggtaagcgaacctatgcttgaaatgaccttctccgtaaacgacagcccgtttgcaggacgcgaaggcaagtttgttacctcccgtcagataagagagcgtctttacaaggaaacccttaaggacgtgtccctcagagtaagcgacggcgagactaccgacagcttcaaggttgcgggcagaggtgaaatgcacctttccatcctcatcgagacaatgcgccgcgaaggatatgaaatctgctgttccactccccgcgttatttacaaggtaatagacggcgtaaagtgcgagcctatggaaagagttacagttgacgttcccgaaccgtatgtcggagcagttgtagaaaagctcggctcaagaaagggtgagcttctcgaaatgaatctccacggctcaagaatgaaaatagattattccattcccgcacgctgcctgttcggctacagaagcgaattcatgacggatacacgcggcgaaggcatactcagctccattttcgacggatatcagcctttcaagggcgaagtcgttaccagatacacaggttctctcgttgcaagtgaagacggcgaggctacatcctacggtctttacaacgctcaggacagaggtactatgttcatcggagttcagactcccgtttacgagggtatgcttgtcggtgaatgcccgaagaaggttgacatagcggttaacgtatgcaagaagaagcacctcacagctatccgttccaagggtgcggacgaagctctcattcttacacctccgaaaatcttctctctcgagcaggctatagaattcatcggagaggacgagcttatcgaggtaacgccgaaatccatcagactccgcaagaagattctcaataccgaaaacagactcaaggctcaggctaagcaaagcggctgataatacaaaaacaaaacgggtaagtcatttttcgactcccgttttatatatgcgccgagtttttctccggtttcatacaatctgccagtatttgtgacaaaaaatttataattgtttctgagataatatatttactttttgactgatttgcgttataatagtgtggatatgatttaccgttctcacggttaagtttatatttgtttattcataatatttatggaggatatatagcatggcaagaaaaaagctttccatggatggtaacaccgccgccgctcacgcttcttatgcgtttacggaagttgctgccatctaccccatcacgccttcttctgttatggctgacgtaaccgatacatggtccgccggcggtctgaagaacatcatgggtgacacagtaaaggttatcgaaatgcagtccgaagcaggtgctgccggtgccgttcacggttctctcgcagcaggtgcgctcaccactacatacacggcttctcagggtcttctccttatgatcccgaatatgtacaagatcgcgggcgaactccttccctgcgttatccacgtttccgcgcgctgcgttgcttctcacgccctgaacattttcggcgaccacagtgacgtttatgcctgccgtcagaccggtttcgctatgatggctgaatccaacccgcaggaagttatggacctcgccgcagtagctcacctttccgctatcaagggacgtgttcccgtgctcaacttcttcgacggcttcagaacctctcatgagatccagaagatcgaagtttgggactacgacgacctcaagtccatggtagacaaggacgctatcgctgcattccgttcccgcgctctcaaccctgagcatcccgtacttcgcggctctgctgaaaacggagatatcttcttccagcacagagaagcatgcaacaagtactatgaagcattcccggctatcgtagaggactacatgaatcaggtcaacgccaagatcggcactgattacaagctcttcaactactacggtgctccggatgctgaaagagttatcgttgctatgggctccgtatgtgacgttgcagaagaagttatcgactacatgaacgcaacaggcgaaaaagtcggtcttataaaggttcgtctctacagacctttcgtagcagctaagctcgctgaggctatccccgctacatgtaagacaattgccgttctcgacagaacaaaggaacccggctctctcggtgaacctctctacctcgacgttgttacagctctcgctacaatgggtctttcccacatcaaggttgtaggcggtcgttacggtctcggctccaaggatactcctccgcagtccatcttcgcagtatatgaaaacctcgcttccgcatgtccgaagaacaacttcactatcggcatcgtagacgacgttacaggtcactctctcaccgaaaagcccgctcccgacacttcagctaagggtacaatctcctgcaagttctggggtctcggcggcgacggtactgttggtgctaacaagaactccatcaagatcatcggcgaccacaccgacaagtacattcaggcttacttcca

SEQ ID NO: 4441 - DNA, 13669 bp, Unknown
  16S sequences of unknown bacteria
gcccgcctcgaatcccgcgatcgcctgtttcaaaccgtcgagaatggggacggcgtaaccgctgccgacggattttaccaaaacgctgttgaaactgtccgcgttatagtccatgaacacgccttcgcagagcgcgtgcatctgcatgagcggttccaggaaatcctcgcggcgcttgaaattgatcttccctccgcggtcggtaaagttcgcggaaagacgggtgttcgttttgatcagattgaggtcgctgtatatctgcgcgacaatgccgatatacttcaactcttcctgcggagaaagtttgacgatcgcggcctttctcagccgtttggcgagcgttcccaaaaccttggaacttttgtaattgtcgccccagttatccagttcctgctcgatgacagcctcgttaacatccacgggaatgagcgctttgaaatttttgaaataattgcccaaaagtctgtcgaggcggcggttggcgttgaagaacacgtaaaactcgttctcatcgcagtcgaaatattccttgatctcctcgccgcgcagcacttcgatgagttgtaccagcgtctgcaattttttatcggtaaaggcactcacgcgctggcggtaaaaatcgaggaacaaactcagataattctttaaatggcggatctccgcgatcatcacttcggcgctgtaatagacagtattgcgcacgtcgctgtcgaattcggtcaggttgacgttttcaaagggcgagcggtagacgcccccgcactgtttggcggcggcggcgacttccatgagcatcttttcgtacgtttccagtttttctttggtcagactgtcgtaaaacgtgctttcgatgtccaaaacgtcgggcgcgcccttatttttgagatatatgaggatcgcctcgtacacggaaacgcccaaacggcgctttttatgcagcgcggagatgggttcgttcaaatctttgcgaagcgcctcgatgagttcgcctttggcggcaaattcgccctcctcctcttcgcactttaaatcgagcgtggtttcgagattgtgcagaacgacgctcttatccactttattggaatgcagttccagacagaaatcgcccaatccgatgccgtccagacgctttttgacgacggagagcgccgcctgtttttccgcgacgaacagcacgcgtttgcccttattgaggcagttcgcgatgatattggtgatcgtctgcgattttcccgttccgggcggcccgtgcaacacgaaactcgcgccgttgatcgcctccgcgatcgcggaaaactgcgaactgtccgccaccatcggcgagagcacctcggcggcgggatattcgtcctccgccttgtcctcgaacacgttattggtgatctccagacggttgttcaagagggatttcaccatcgggtttttgcggaatttatcgatgttttttcggacgtcgttccacatggcatagcgcgcgaaggaaaaattggcgagatacacttcctccacgacgtcccagtttttcatgttgaggatctccattttcaccatggcgatgatctcagagatctgaatgcccgacgcgatattgtccagcccgcggatatcgatcttatattcgcgcagcaaaaattccaaaagcgtcgtattgacctgcatttcgtcgtcggtaaagcgtacggaatagcccttgccgcccttgctcttttcgatcttcgcggggcaaaggatcaggggcgcgtatttcggctctcccacgccgttttcgtaccatttcagaaaaccgaatgcgagatagatgacgttcgcgcccgcctcctcttcggctgtttttgcctttttgatgaggtagcgcatgacgtcgttcacctcgtccttggaagaataggtgcggatacgtttatttttcagttccacttccaaaagcgcggacagtgcggaaaggcgggacgcggaaccgaaaaacgacagatcgtctatcatgccgcggccgtccgtcggtttttccagaacggcgtattcgctgtgcgaggaaagcccgccgaatgtggcgttgatatccgaactcactatgtgcaggcagtttttatcgggtttgaaattgagcagagaatttttgagggaaagatcgagcagacggcgttcccactgtttgtttttggtcgccttgccgtccacgctcaattttttgatgcctgcaaggttctgcggcgccgcttcgatattcgtttcatcgtcgcccagaagttcgtaacccttgatgccctttaccttcaaaggcagagaataaatgcgggcgaggcggcagcgctttacgtcgatgaccgtatcgaaatatccgccgtcgagtttttgcgcgaaatgcttttcggaagcggtaaaattgacgttgcgcccggaaaacacgtcctccacgtcaaagccgctgatattgttgatgccgcccgaaatgtacttttgcataagcaccgtgtcgtcgctcacgctgtccaaaaagcagttatcgtacagccacacgccgcaactgacgctcttttccccgaccacgataacggggtgcagattggcacattccagacaggatacgataaacaacgtcaactcgaacgaggtcccgacgcgcgttttcaaaattttggtgatatccccgacgggcatcggatcttcgtactgaaattccgccgcggatttttcgatggaatttttctttaaaacggaaaatatggcggccgcgatctggcggatcttattcttatcgccctcggcatagccgcgccattcgcaggcgataccccattttttcaactgttcctgcgcctcggaaaggacgcgcagacagtctgcgatcttcgggcgggaaaaacaggataaaagttcggcgttgccgctgcggccgctccaataatcgaagggcagcacggtcacttccgcgcgctcctccacgatgaccgtagcgccgctgagcgcttttatggtaacgggctgcacggtgatttcggaaatctccgtcagatacagcggcgaaagaacgtcctccgtcgcgatctctaccgtgctttcgaaaggtaaatgttccagatgtttcgaaaacggcaataaaagccccgaagcgttttcgatcacgacgtcgatatcgtcgatcgtttccgaactctgattggaaacctgcaaagaaataaacagcggcacgcggttgaaaaagtccgcgtaactgacaaaacgttgcagtttatacgagagcgtaaccgcctctttcaaagtatttttagccgatttcttacttgccatactgtttccgtccactaagtttcattatcaatattatactataattgccgatttatggcaaggtattgcgtcaaaatattattgactttatttttccgccgtatacggaaaaagaccgcggtaaagcggtctttctttaacttttatctatgatcctcaaaatatcttcgtagccgcccgccgtaaacgtcggacgggcgaaactctcctctttctgccctttcggattataccagatgctgtctacccccgcgttgttcgcccccagaatatcggaagagagcgaatcgccgatcacgacgcaccgctttttatcttttcggaccgcggaaaatacctgatcgaaaaattctctgtgcggcttggcaacgcccagttcgtcggaaatgaacacgccgtccagatatttgccgatgccgctcgcgccgatcctgccttcctgcgcggcggtcgtgccgttggtgatcatgtatatttcgccgcgttctttcagtccggaaagaaatgcgtcggcgccgtccaacagataacccgtcgtacaaagtttgtcgaaatatatcttgtccaccgatgcggcgtccgcaataacgccctgttcggcaaaaaaacactcgaaacgcttgacgcgcagttgcgctttcgtgagcgcgccgcgctcgtattcgcgccatacggcatcgttgtgttttttaaagagcgaataaatttcatcggaatacgggagcgagaactgtgcaagcgcgtatcgcaaactctctttcgaagaggcgataaagtcgaaaaccgtttcgtccgcatcgagtaaaaaataatgataacgcataggtcagtctttcagttcgatcacagccaactctttcagagcgcgggtgtaagcgatatatttttcgtttaaggtcatgccctcgtccgccacggcgaccgaggtaaattccagtcccttggattcgtagacggtcataaagttgattttcgatttggagatacgacccgtttcggaaagcacgttataacttttgcggcacagccgttccgccaccgcctcggaaacgatgaccgctttcaagccctttttatccttgaaaaagccgctcacgccgcggataccgatggcagtcacgggcagtccgtcgaagccgatcggctgcatattgagtccgagccgctcggcgacgtattctacgatctgattggtgttcctgtaattctgattgaggtaatatacgtcccgaatgccgatctcatcccacgactgcaagccgcggaatcccgtcacgttctgcgcgagatcgccgtacacgttgaaagcggcctccttattgatcattttcaacagtttatattcgttggaggaaatatcctgtccctcgtcgatgaataccagaccgaaatgcggttcgagttgtttacccaaaagggataacacgaggcacaaaagataggcgtcgctcttgaacatgcccttgccgataccgaatttcttttttgccttttttacgatatctttatagagcatgcgcgaaagttcgagcgtcgtttcgcatttgccgatggcgacgaaattcgcgttgcctttgagcgtttcgaacagttcgcagacgccgccgaaccgatcgccgatctcgcgtatacgctcttcggttttggcgatctcttttaaaagttcgccgcggcgggctatcctgtccgcgtacgtctccacttccgcgccgtttttgaaaattttataacgctttaaatcggtgatctccctgcccacgaggtctttcagcgtcgcaaggtcggtaagcgccgcgtcgacgatcttgcccgacgaacggtaaatgacgtgcgcggagcgatagaacgtgaggatacggttgtaaaaataactgtaatttttgattttttcgctctttaagtcgacgcgcaggaattcttcgacggccgtcaccgcgttcatcagttcgcggaaaggtttggtataatacagcccgccctcgggtttttccttgatctcgccgagcaccgcgcggcgcacacgcaggctcgcgtttttcacgtgcgtgaaaatttcgtcctgttcgcggcaccccgccgctacgttgtcgatgacggaagtacactcttcgctgacgaacatacctacgatgccgtcgtacattttggaaagcctgccttccacgtccgacaaaaacttttcggaatagacgtattcgagatattttataggcagtttcgcgttatgatctatcttgtccgcaatgtcgatgcccgcgttttgcaaaagttggataaagtattcgtcgatggtcttggtttttaccttttccagttccagaatggtcgccagttcgtcaatgaaatcgttgaaagaatcggaaggcgtgatgacgagcacgtcgcgcggccgcagtttctcgttgttgtacatgagataactgaggcggtgcagcatgatcatcgtcttgccgcttccggcgcagccttgcaaaataaagttgtcgcgctcgggcttggtgatgatatcgtattgcttttcctgaatggtttcgatgatatcggaaatttccgactgctctttcctcgtctttaaaatctcttttaggaatggatcgaaaatgatctcttcgtcgcgccccgcgatctcctctttggtcagatagtcccgaaggctcagatattcgtttttgaaatcgacgagttttccgttcgcggtgcgaagagcccgccgcaagatcagtttgtagaagtattcgttgatggaaaaattgatctggctcttctgataatattttcgggcgagcggcgcgcgccagtccacgatctccagattgacgtccccgcgcttgccgatataataactgttgtaaccctcctgatcgtcatagacgtccatgcgggcgaaatacggctcggtgaaaaagcccttgtagccttcgatctgttctttcagttcgcggatgtgcgcgttgatggcgatgatcttttgataattttcagcggaaaagtcctgttcggctttgatcgcctccgcctcgtcacggtcgtttttgatcttgatcttcaagggattgatataatccgctttcagcaaagtcatgaccgctctgacgcgcgtgtcttcatactcccgctgtttatcttcgtcgagaagatcgagataaaactgcttgtcgggctgcttttggctctttattaagttcttcatttccgtaaaggtaagatccataaattcctctaaacgccgaccgctccattgcttgccgttatactgtgttagtataacacacatcggggtaaaaataaatagttttcgaaaattattcaccgtttttttatgtatcgtgacttttgctacacggtttatataaaaaaacagacacatccgctctttttgtttatcatttcggatgcgcccgtttctctattttattcgcaaaaatgctcttttattctcgcgtaaagcagggaatcgtacaaatttcctttcttgaatacgctgcttttcagccgcccttccaaagcgaaaccgctcttttcaagcacgcggcaggacgccttgttaaaggcaaacggaacggcgtgcaagcgcacgatatccgtttcggaaaacacctcttcggcaagcctgttcaacgcgcgcggcatgatattatgcccccaataattttcgctcagccaatatccgatctccgcgtcgcggcgcgaaacgtcctgcccgaacgtcgcagagaggcagccgacgggcttttcatcgacgacgatgatgcgcacaaactgcgattttccctcttccgcctcgcaaaatttcataaaaccttccgcgtcgcgcaaggtgtagggattgggaaacagatcgcgcagattcgcggcgatcgcgggattatccgcgtgtttgcagagttctttcgcaaacgaaacggagggtttcgcgagcgaaaatccgagttcggatttactccaggaaagcgcgcgttgttccaaagcgcgcacgaaccgctcttttccgtcgcagtatttttcgatatcccgcggaaatttccgcgcgagcgtttctttgagttcgccgtaagcgcgccgttcctcctcgtgcgtgcgcagataattgcggacggcaagatggcgtccgatatccgcgcggttgctttcttcgaaaatatgtacctgatgcgtgcgctcgtcgccgcctttccgaaaatatcgcctgcccgcaatgccgaattcgcccatacactcgtagccgagcgcctcgaattcgggatacaatgcgtcgatctttccgatatctttcacgacgggcatgatatcgacgatcggttttgcctgcaatccttcgacggcggtactgccgatatggtgcacggcgacgcattcgccgccgagtatttcttttattttttcgctctctttgcggaattcatccgcccaacgcgcgtcgtaagcgacgacgcggacttgctgtggcatgaaaattttcctcccaaactaaaaaccgccgcaaattttgcggcggtccgatattcttttattcccattcgatggtcgccgtaggcttgggcgaaagatcaaaacagacgcggttgatcccctttacttccgaaagaatgcggtcggtgatcttacgcaggattgcgaacgggatttcgggcacttcggcggtcatcgcgtctaccgtattgaccgcgcggatgatcacgggccaatcgtagcagcgcgcgttgtcgcgcacgccaaccgacttgaaatcgggaacgacggtgaaatattgccagacttttccttccagaccgttcgcggcgaattcttcgcgcaagatcgcatccgattcgcgcagcgcctccaaacggtcgcgggtgatcgcgcccagacagcgaacgcccaacccggggccgggaaacggctgacggtagaccatcgcgtcgggcaggccgagcgccacgccgcaggcgcgcacttcgtccttgaagagcattttcaaaggctctaccaatgcaaattgtaaatcttcgggaagcccgcccacattgtggtggctcttgaccattttcgcggtcttcgtaccgctctctacgatatcgggatagatggtgccctgcgccagaaattcaatgccgtcgagtttgcgcgcctcttcctcgaacacgcggatgaactccgcgccgatgatcttgcgcttctgttcgggatccgcaacgcccgccaatttatttaaaaagcggtcggtagcatccacgtaaacgagattggctttcatctcgtccttgaacaccttgacgacctgttcgggttcgccctttctcaaaagcccgtggttgacgtgcacgcaggtcaactgttcgcccaccgcctttaaaaggagcgccgcgacgaccgacgaatccacgccgcccgacaaggcgagcaaaacctttttatccccgatccgacggcgcatcaattccacctggtcggcgatgaaattttccatattccagtttgcggcggctttgcaggtgtcgaacacgaacgaacggagcgcctcggcgatctcttgatcgctttcgggcattttgttcattcttccgttttccgcgtaatcgaaagtgtagacgggcagtccgctctttttcacttcttcgctcaaagcgatctttttaccgtctacgacgtcgttcgggccgccgttggcgacgacgccgcgcacgttgggcatcgcgttgagttcgtcagccgttacgtcgaaattgcagatctcgctgtaaacgccgagcgagcggatcgcgcgcgcaacgtccgtgttgcgcgtgctgcccatatccaatactacgatcatgtcctgtttcattttgtttcctcagtcggtaaaattatcgaaatagccctggattagaataataggcgtgcccttatcccccgaaccgctcgtcagatcgcacagcgagcctatgaggtcggtcagccttcgcggcgtggttccctgcgacgccatatttcccacgagattatcttccttttcgcggatcctctcggaaatagcgtctttgagcgcctcgcccgaaagatctttgaaatcgttgtcggcaaggtatttgagtttgatctcgttgggcgttccttccagtccgtcggtattcgccaccgaaacgcaagggtcggcaagttcccaaatctttcccacgggatctttgaacgcgccgtcaccgtacaccatcacttcgacgtgcttgcctgtacggttcagaacgctcttttggatctcgtacacgagatcggtgcaatcgcgcgggaacagtttgatcttgtcctcggtggacttgttggagcccaaaagcccgaaacgctcgttgcagccgctgccgttcacgggcgcgtttaaaatatcgtccatgccgcacacgacgtttgcgcccgccgctttgaggatacgctttgtcctcgcgcgggtatgaatgtcgcaggtaagcacgtttttcgtatattgcaggaccgcgcggggattgttggcgaagatcacttccacctcggcgcccgcttcgcggatcagatcgctgtaataggcgacgtaatcgatgcccgtaaagggatgcttgttttcaccgaacagcgtcctgtatttttccagagtcagaacgtcgctgtacgggttgacgcccgcattgtcgagttgatcccaggtcacgagttcgttgcccacttcgtcgctgggataactgagcatgagaacgatcttctttgcgccctttgcgatgcctttcagacaaatcgcaaaacggttgcgggaaagaatggggaaaataacgccgatcgtaccgccgcccagtttcgaacgcacgtccgcggcgatatcctccgtagaggcgtaattgccctgcgcgcgcgccacgacggattcggtgacagagatcacgtccctgtcgcggagggaaaagccttcgctttcggcagcctccaaaacgctgtcaaccacgatctttgcaagatcgtccccttcccttatgatggggcaacggattccgcgcgaaaccgttcctactttacgttccataatcaactctcctcatagaatatctgtgggtatgtaagccgctgcccgcaggatacgggcgcaaaccgataaaaatccgtttattattatatcacaatctttgcccctttgtaaaatgctcgacgcggatttctcgattttttttgcggaaaacagagagcggacggcaatgccgtccgcttacgatcaaagacgaatgatttccagcgtcgaaagcgcctcttcgatgagcgcttccacgccgagtttgttttcctgcgcttcgacctgttccgatttggggcgaatgagcgggtgtttgggaagaaagaccgtgcagcagtcctcatacggcagaatggacgtttcaaacgcgcccatcgccttggaacgatcgacgatctccgtcttgtcgaatccgacgagcgggcgcagtacgggcatatcctttacgaccgcgttggaagaagtcatgccctcgatcgtctggctcgcgacctgtcccaggctttcgcccgtaatgaggcactgcgcgccgatctgtttcgcaagccgttcggcaatgcgcatcataaagcgtcgcacgagcgtgatcatcatatcttcgggacaatgtttgtgtatctcttcctgaatatgcgtgacgctcaccgtatacagcgtgacgcctgcggcgtagcgcccgaggatgcgcgtcaactccaccactttttctttcgcctgcaagttggtatagggataactgtgaaaatgcagacaatccacgttcatgccgcgtttggcgatcatgtaccccgccacgggactgtcgatgccgcccgaaatgagcaaaagtccgcgtcccgccgtacctacgggcatgccgcccgcgcccttttgaagatcgctgaacacgagcgccgttccgttttctctgacgtcgatatgaacggtcttttcgggcgcgtgcacgtccacttccaaagatggaacggcttccagtatcttgccgccgatatgcgcgtttaattgcatggaattgagaggaaatcttttatccgcgcggttactctccaccttgaaggtgccgtttttgggcgcgacgaagagagccgcctcttcgatggcggaaagttccgcgggcactttataggcgacgctgatcgaatgtacgccgaacacgcattgcaggcgttcgagtatgcgcccgatatcctgcgcgtcaaaattttcgacgacgtaacggccgctcggtttcctgatctcgtgacggatgcccgaaagcgacttttcgaggttgttcatgaacaccttttcgaaatagccgcggttttttccttttaagtatatctcgcagtagcggatgatgatgactttatccattatttatctcgtcttttcgtataattcacgcgcacagccgttgatgatctccgccgcgcgctctgtttcttccatcgtcgtttccgcgctgaaagaaatgcgtaagatcccgtccgccgtcggctcgtccgcgcccgtcgcaaggattacgcggctgaaacgcgttttggaggaacacgccgaacccgtcccgactacgacgcccttatcgtcgagcatgtgcagcaatacttcgccgcgcagcccccgcgccgacgcgctgacgatatacggcgaacagtttcccgtggatataattttaaaaatctgcttgtccagactgttttttacacaggaggaaagttcttcggcatgcctgtaattttcttgcaaacgcgcgtatttcgcggcggccgccaaagcgaactgcgcgatgccgaaggtattttccgtgccgcttcgcagccccttttcctgccccccaccgaaaatataaggatgcagcacgcacttctttttgcgtatcagcgcggcgatgccgcgcacgccgccgatcttgtgcgcgctcacggaatacagatcgatattttcgcccaaacggtacaaaagtttgccgaacgcctgcacgccgtcgctgtgaaagaccgcagcggcgttgatctctttgaccgcacgcgaaatctcgtcgatatcgttgaccgcgcccgtttcgttattgacgtgaatgaccgaaaccagcgaagttttgcggtcgacttttttcagaagatcgtttacgtccacgctgccgttcccgttgaggcgcgcgcggcgcacttcgatcccccgccgcgcaagttccgccgcggcggcaaatacggcggcatgctcgccctcggttatgacgacgttgccgcgccgtcccgcggaaaaaagcgcctgattatccgactccgaaccgcaggaggtaaagacgagttcgtgcgtttcgctccgcgctacgtgcgaaagcaaagacgcgcgcgccttgtccatctctttatgaatttcaaacccttcgcggaccattgacgaagggttgaaaaaatcttcttttaaatagcgcattgccgattccgccgccccgatatcggggcgcgcggtcgcggcgttatccagatagatcatttgttgaattccgtttccaatatatttttccgcatatagcgcacgatctgcgtgatcagttggatgcggcactccagaatcagaagccgtttgcccgcgtccgtctgcgtctgaaaatagaaaaattccttatcctcttcggcgacgttgttgggcgtcaagatcacttccttgatatcgggcgtaaatttcagttttttgtaggattcgctgcctacccttccgatcttgatgatgcggtcgcccgaaaggcggtattgcagtttgcgcttgcggttatgaatgaccttgcaaatgcgcagttcgcccgaaacgaaggtataatcgtaactcagataaaaggcgtggcgcttcatcgaaaagaatatgcccgcggcgataaacagcacggtaaagacgatccagatcacgagattgacgatgatcgccatggtaaaatcttttccgtcatcctgcgtgggcgaaaacatgacgttgagaaagcataaaacagccgaaacaaacgccaaaaccataaacaccgtaaacaaagtatatttgtttttggcgctcttttcgttatgcgtgcttacgctctcttcataaaaaacttcttgcatgatatactccgctcattaaaattcgatatagccttcgaacacctgtttgacgccgcccgtcagcgtgaccatgccgtccgaagtgtatcgcacgaacagatcgccgccgcgcactttcacggtcacgtcggtatcggggcggcaataaccgttcaaaaccgccgcgacgaccgccgccgccgcgcccgtgccgcacgcgagcgtttcgccgttgccgcgctcccacacgcgcattttcagcgtggtgtcgttgacgaccctgacaaattcggtattgacgcgttcggggaaatactcgctgtattcgaag

SEQ ID NO: 4442 - DNA, 32759 bp, Unknown
  16S sequences of unknown bacteria
tctgtatgaactcttttatttccctaaagtgttgcacttaatagtataattcaccgctgttataaaaaatccccatccatatggatggggatttttgtcagaatgttacagcagagacgcggccggcgcgtcgagcataatggtgacattgggatgaagctggaggatggaggccgggcactgcggcgtaaccgggccggtgatcatggccttgaccgcttccgccttgtcggcgccggtggcaatcagcacgatcgctttcgccttcatgatagacccaatgcccatgctgagagcctgacgcggcacctcatcggagctggagaagaaacgggtattggcctcaatggtactctgggtaagatccaccacgtgcgtgaccggcgcaaaggcatcggccggctcattgaaagcaatgtgaccgttgcgcccaattcccagaatctgcaggtcaatgccaccggccgcttcgatggccttttcataagcggcgcattctgccgccgaatcggaggcagtgccggaaagcacatgaatgctggattccggtacgttgatatgacggaacagattgtccatcatgaaatagtaatagctctgcggatgatcgtggcccaggccgacatactcatccaggttataggtggtcacacccgaaaaatccacggcgccgcaggcgtacatttccgccattttggtataggtggggatgggggtggagccggtggcaagtcccagcaccgcatgcgggttttcaatcaccttcgcggagaaaagcgccgccgccgccgtgccgatagcctgggggtctttatatgtccgtacattcatagtctcatcctccaatcaatattcttttttattatgcatatgtgtagtagaaaagtccatacccattcgggctttttttttgcattttccggacgtccttggtaagatgtccagaattttgtaaccaatacgaggaggcggccatattgtattagtagacaggctgtacagcatctgtctatttccagataaaggagtcatgacattggaacatcaatttatggatcggaataccatgagtttccctgaagagtgtccaggacaggtcgtcgccatggcgtacgtcccctggcagcgtctcgagcaggtgtatgaagtggaggacggcttttgccgcggcaccattttccccgagcttgacaaaccgtggatggtaggaggcggctgctgtgagtgagagagccaagatgcggcgctgcatttccgcctacgattttgccattctcgatctggagacgtatctcgattcccaccccgacgacgcacgcgccatgcatctgcgggagcagtacatgtgcaaacgccgggaactgatcgcggagtacgagctgcgctgcggcccctatgtggtaacccggcgcgacgtacccaacggcaaccgctggacctgggtagacagcccctggccctgggaatatgagatggaggattaagctatgtgggaatatgagaagaaactgcaatatccggtcaaaatcaagaaccctaaccctaagctggccaaaattatcatcacgcagtacggcgggcccgacggcgaaatgagcgcctccctgcgatatctgagccagcggtattccatgccctattccgagctgaaggggatcctgacggacatcggcaccgaggaactggcccactttgaaatgatcgccgctatggtgcaccagctgacgcggaatatgaccccggaagagattgtcaaatccggctttgatacctattttgtcgatcataccgccggggtttggccgcaagccgcttccggcgcgccctggacggccgcctatattcaaagcaaaggcgatgttatcaccgatctgcacgaggatatggccgccgagcaaaaggcacgtactacctacgacaacctgctgcgcctcatcgatgatcccgatatccgcgagccgctgaaattcctgcggacgcgtgaaatcgtgcattaccaacggttcggcgaagggcttcgaattgcgaccgataatctgaacagccagaacttctatgcctgcaaccccagctttgacaaatgctgcggcaaaggacaaaacgacggcaaaaaaacgggctgcggctgcaatcaaccgcggatgcgctaagcttttgaacgaatgcgccccttaccggtaatcggtaaggggcatttttatcaaagatcgttgcgcactaaatcctcataggtctccgccttgacaaccacgcgagaggcgccgtccttgaccatgacgacagcgggacggggcagacggttgtaattggaggacatggaataattatacgcaccggtcgccagcaccgcgagaatgtcccccgcgccgcaggcttgcagcggcgtgttttcctgtatcaaatcgccgctttcacagcagcggccagcaatagtcacggtatctgtagcaggttctcccgcccggttggcaatcaccgctgtgtaatccgccttataaagggcataacggggattgtccggcatcccgccgtccacactgacgtaatcccgcacaccaggaatatgcttgataccaccgacagtgtatagagtgatgcccgccggcgcgacgacggagcggcccggctctatcacgatataggggaaggggaaccgcagttcccgcgctttttccttggccgcgccggccaccagccgcatatagtccccggtcggcttgggatgatccattttggtatagggaatcccaaagccgccgccgagattcagttccgtcagggtaatgcccgcggccgtgcgcacggcatccataaattccagcaggacttcggccgcgtggatgaaaggctgttcgtcgaaaatttgggaaccgatatggcagtgtatccccttaaaatccaagtggggcaggacggcggcttcctttgccgcctccatggcgtcgccgttctccagcgtaaagccgaatttggaatcgatttgtccagtgcggataaaggcgtgtgtatgggcgtcgatgccgggggtaatccgcagatagatagccgccgtcttccccatctcccccgccagcttcgagagagtgtgcagttcgcccaggttatccaccacaatccggcccacgccgtattccaacgccatacgcaattcggcgacggatttgttgttcccatgaaaatacagccgctccgcggggaagccgacctgcatggccgtataaagctcgccaccggacaccacatccgcgccgcagccctcgtccatcacgatgcggtacagttccttaaagctgcaggctttgctggcaaaagccaccatgcccccattttcatagttctcatccagggaggccttatagctgcgcagggcgctgcggatggcggtttcgtccatcacatacaagggggtgccatattgcgcggccagttcgaccgtatcgcagccgccaatggccagatgcccggcggcgttcacagataagcaatccgatagtaacatcctcatcattcctttcccggccgtatcgtccgtcattccgtgcggagatacggccctttaatgttaggcatcttcttcttccgtaacagaaatcaggatatcccgcagatcgtccacgccttcccgcgttacggcggagaagggcacccattgcagcccttcatactccgccaactcttcttcgaaagccttcaggcgagatttcctttcggttttgttgagcttatcggccttggtcagcaccacgagaaaggggatttcccgttgcgtcagatactcgatcatcatgcgatcatcgccggtcggcggatggcgcatgtccaccagctgcagcaccaggcgcaaatccctgtcggcatcaaaatagccttcaatcagggtgttccaccgttttttctccgaagcggaaacctttgcatacccatagccaggcaaatcgaccatccgcatcgtatccagacgataaaagtttacggtggcggtcttgccgggtgtggcgctggtgcgcgccaagtttttgcggtttagaagcgcattgatcaaggaggattttcccacgttggatcggccggagaaggccacctccggcagagtaggcgccaccagctgatggctgagagcggcggacgcctcaaacgcggccgattcaattttcatggttgctatcccctttccaggtttactgcgtggagctttccgccttcggctgggcaatcagcgccgttttcagaactgtgtccaggtgggaggcggtcacaaactccacatggtccttcaccacaccgtccacctcatccaagtccggctcgttttccgccggaataatcacggttttcatgtggtgaatataggcggccatggtcttttccttcaagccgccaatgggcaacacccgcccgcgcagggagatttcaccagtcatcgccacatcctgccgcacggggatacccgtcagagccgatacaatggccgtggccatggtaacgcccgccgaagggccgtcttttggcaccgcgccttccggcacatgaatgtggatatccttgtttttataaaattcccgatcgatgtgccattccgcggtgcgcgaacggacataactgatggcggtgcgggcggactctttcatgatatcccccagcgagccggtcagttcgattttgccgctgccatccagcacagctacttccacaggcatggtctctccgcccaccgaagtccaggccaagccgttgacaacgccgatttcatcccgccgctcggccatatcttccttatatttcaccggccccaggaaatcctccaggcgggacaccgtcacactcttcgcttccccggatacgataattttggccacctttcggcaaattttcgcaatacagcgctccaggccgcgcaccccggcttctttggtatatccgatgatcatggctttcaagctgtcgtcggacagccggatttgccgcatggtcaggccgtgccgttttgcctgcttacgcagcagatgttctttggctatatggaatttttcctctgccgtatagctgcccaaagcgatgacgtccatccgatcgtaaagaggcgccgggatggtgtccaccgtattggcagtcgtgatgaacagcacatcggacaaatcaaaggggacttcgatataatggtcacagaaagcgctgttctgttccccatccaacacttccagcatcgcggaagcgggatcgccgtgaaaatcgctgcccattttatcgatttcatccagaaggatcaacggattccggctgcccgcctgtttgatggcggagatgatccggccgggcatggcgccgatatacgttttgcgatgcccgcgaatctccgcctcatcccgcacaccgccaagagacacccggacatacttccgattcatggcggaagcaatggatttggctatagaggttttccccacgccgggagggccgaccagacacagcacttggcctttcatctcgctggaaagctgccggacggccagcgcctcaacaatacgctctttgaccttatccaggccgtaatgatcgcgatccaatacacggcgggcggcagtcaagtccagattatccttggtcagcgtattccacggcagggacagacaggtgtccagatagttgcgggacaccgtggcttcgtgagacccatagggcattttcgccagcttggcgcattccttgagcagcttgttgctggtttcctccgggagctgtagcgccaagattttttcccggtattcttcggattcctccgccggattatctccgtcacccaattcctcggaaatcactttcagctgctcccgcagataatattccttttgattctgatccagctgttcatggacgcgttcgtgaatatcctgctccaactccaggatcgagcattcccgtgccaggagcgacagcagcagttccatccgcttttccaccggcgcggtgctcaagatatcctgtttttcctccggaggcagcgcgatattggcggcgatgtaatcggcaaggtaacccgcgtcctgagccgccgccacccccaaagacacgtccggcgccatcttcggggccagctgtgcatattcctcaaaatatgtacggcattcccgcatcacagcttgagcgcgcagcgaaccggctatgcggcgttccagccgctcacgcacagccaccatcaaaaaaggctccgtctgaagcacttcctctacgccagcgcggtacagtccttcgaccagaatacggaggttgtcccccggcagcttcaggacctgccgaaccttagccacaacgccgaccgtatacagcccctccacagagggatcgtcctgtgccacatcccgctgggtaaccagatagataatctgatccgcgcccatcgaagcgttgagcgcctgaatcgatttctgacggccgacgtcgaaatgcagcagcatccccggaaacactaccagcccccgcaatgcgagcagcgggagcgacgaggaacgtgccacccgtttttttattcccatgttaaccatccattctttacagacgcgatactggtatccgtcttccggataaaaaggcagccggcaccagagtgccggctgtcaagcttatccccttgccgccggcggtttcaccggttaagctgtcaccttgcggcgtgtcgtgcggtttttcgtcggaaccttcagccggttcgtttttttctccggattgacaacaatctccggtttggcgttctgcgtgacgcagtcaccggttatcacgatcttttcaatcgtcggatccgaaggcacttcatacatcagctgtgtcagaagctcctccatgaccgagcgaaggccgcgggcgccggtgttgcgtttcagcgttttctccgccaccgctttgagggcctccgatgtgaactccagcttcacgccatccagagaaaacagctgggtatactgcttaatcaacgcgtttttcggttcgcttaggatacggacaagagcctcgatatccaacgcttccaaggtagtgatcaccggcatacggccaaccaattccggaatcagcccatagcggataagatcctggggaaccagctccttgaaaagcttgctccggtcaagatcctttttagatttcacctcgttgccgaagcctagagaacccgatcccactcgtttctcgataatcttctcgatgccgtcaaaggcgccgccgagaataaagagaatgttgctggtatcaatctgaatgaattcttgctgcggatgcttgcggccgccggaaggcggcacgttggaaaccgtgccttccaaaatcttcagcagcgcctgctgtacaccttcgccgctgacatcccgggtaatggaaggattttcgctgcgacgggcaattttatcgatttcatccacatatataatgccgcgttccgctttttccacatcgtaatccgctgcctgaatcaggcgaagcagaatattctccacatcctcgcccacgtatcccgcttcggtcagcgtggtagcgtcggtaatggcaaaaggaacatccagcgtacgagcaagcgtctgcgctaaggctgtctttccaaccccggtggggccgagaaggagcacattgctcttgcccagttcagtctcggaggatgcgccgaagaaaatgcgcttgtaatgattatacaccgcaacggacaaggcaaccttcgccgcatcctgcccaatcacgtattcgtccagcccggcctttatttccttgggggtaggcaggcggggcggtatatcgtcgctgttggcgcgccgctttgaaaaattcccgccgtcctccaagatggactgacagagctctatgcattcgttgcaaataaacacgcccggcccagctatcaagcggtgcactgcgtcctgggtcttgccgcagaatgaacagctcacaatacggttttcatcgttgtttttcggcatcggatatgcctcccctctttatagcattcgttccgattcagtgcttatcgataattttgtccaccagaccatacttcacagcgtcttccgccgtcagccagttgtcgcggtcggtgtcccgttcaatggtctccagaggctggccggtcatctccgccagcagtcggttcatacggttgcggataaagagaatatgatccgcctggattttgatgtcgctggcctggcctttggtgccgcccatgggctggtgaatcatgatttcgctgttgggcagggtcatccgcttgcccttggcaccggccgcgagcaggaacgatcccatgctggccgccatgccgatgcagatggtggacacgtcgcatttgataaactgcatggtatcgtaaatcgccatgccggcggaaatggagccgcccgggctgttgatatacagatggatatccttatcggggtcctgcccttccaaatacaacagctgagccaccaccagcgaggcggtcgcgtcgttgacctcatccgacagcatgatgatacgctcgttgagcaaacgggaaaaaatgtcatagctgcgttcaccgcggctggtttgttcaacaacataaggaactaaactcattatctggcacctccatattgcttgaagatttacattctccggcccatacagcaggaggggacaaattccccgtccaaacggctggaccgtctgcacagtcacaggaccagtatggacagggaacccggattttaatccaagaaattgtattttcagccgattattcttcggtgataaccgccgtttccttaatcatttccatcgccttgccgacagccagatccttggacaattccgcggaaggaatcagggatttgattttttccacgtccatcttatactgttcggcatatttggcgtattccgcttccagctcctcgtcggaaggcgcaatattttccaggctggcaatcttctcgagcgccaggcgaattttgacctgtttctccgcctgctcacggaagccggcgcggaaagcgtccatatccatgccggtatactgcatataggtctgcaggttcaggccctgcgactgcagccggtaatcaaaatcgcggacgctctcgtcgacacgatggttgtacatcgcgtccgggacttctgccttaaagccctccaggagctgatccagcagctgattctccacggcgtcttccgcagcgtgggtacgctcatgctccagtttgcccttaatatcggccttcaattcttccagcgtgtcaaactcgctggtatccttcgccaaatcgtcgttcagctcggggagttccttgacctgcacctcgtgaatcttgcacttgaaaaccgccggtttgccagccagttccgccgcgtgatagtcctcggggaaggtcacgttgacatcgatttcttcgtcgatggatttgccgaccagctgctcctcgaagccggggatgaactggttggagccgagaaccagggtgtaattctccgccttgccgccctcgaaaggctccccgtccacaaaaccttcgaagtcgaaagtcacggtgtcgccgttttcagcgggatgattctccacagaaacgaggcgggaattgcgctcttgtacctttttcagttcggcatcgagatcctcgtcggtgaccggcgccagctttttggtggccttcaggcctttatactcgcccacttccacctcgggcttgacggtgatgacggccttgaaaacgaggccctctttcccgacagactccacgtccagatcgattttatcttccacatattcatagccggattccttaatggcagcgtccagcgcttcgggatacagagcgttgacagcgtcctcatagaacacgccgctgccataaatcttctccacgaaggaacggggcgccttccccttgcggaaaccgggaatattcattttgccaatattctttttataggccttgctgaccgccgcctcgaagctgtccgcatccacctcgacgaccagttccacccggttggtatcggttttcgttgccgttttcaaagccattgtttacttcctcctacatttacctttacacattgagtttgattatagcatatcctcgcgcgttgcgctacaggattttatgaattaaccgtaaatttctcgattttttctagccctgtgaaattttgagaggcacgaaggataacgcgtcgcttgaaacaagctccaacgccacgtccccccatttcccgcggaaagccttgcggattccggccccgtgaatatgtccgtaatagcaccgccggatttgccggcgctgcagagtttccaggatttcctcgcagaccgccccggcgtacaccggtggatagtgcagaaacgccaccggctctagaccggtcgccactgccgcgtcgatggacgcgttaagccgccccacctccctggccaaaatctttttatccgcatcggcctcggcgtcgtaaaaccagccccgggtgccgcagaccgccaagctgtcgtctacggtatacgcgtcgttatgcaggatggatacgctcgtcaggccgtgttcctccagatacgcgtccattttgcgccgggtggtccaccaataatcgtgattgcccttcataaggatcttgcgccccggcaggctgtgaagaaacgccaaatccgctcccgcctgctcaagagacattccccacgatacgtcgccggccaccaccacggtatccccgtcggccaccagccgccgccaattgtcctccaaacggcggacatacccattccagcccggaaaagcatccatcggcttgttcgtccccagggaaagatgcaaatcggcaatggcgaacagcgacataacggacccctttccagaaattttctgacgcgctcatgttttatcggcagacggacatactataccgcagaaggacgatgaaggagggatagccaatgaacagctacgacagccaagcagcctcgtcgccggtggtacgctgcgatgtgaaaaactgccaatatcacgagaaggacggcagctgcagcgccggcaaaatcatcgtcggtccggcctatgccgtcagcaacgccgatacggcctgctcgacctttaagcccgggcacgattgacccccgcagggacgccgccggttttgccggcggcgtttttactggatacccagcaggcggtaaacaaccgccggcatttcctcgcgggagcaaacctcggtgaatcgcggcgttttcccgcgcaggcccgccagcggaggcggcacctcgcagccggtcagccgttcgagcgcctcgaccttgtcgaactcgtccatagcggcggcgccgccgtgcagggcgtccaggacgctggcggagaatttatacggattggcggtggaagcgataaccgtgggggtcgtatcccccgtttcccgccggtattcgttgtaaacatggacagccaccgccgtatgggtatcgcagagataaccgtgcttttgataggtttcggcaatggcggccgctgtctcctcgtcgtcgcaccagccggcggcgaacaaatcctggatgcgggcgccgatggcctccggtacggtataccggccggtttctttcagagaacccatcagccgccggatttctgcgtcgtcacggccggccaaatcgtaaaggagacgctccaggttggaggaaatcaagatatccatggacggggacgtagtggcatggaattcccgattgcgatcgtacgtgccggtacggataaaatccgtgagtacccggttgcggttggaggcgcatatcagcttagcgataggcagccccatcttcttcgcgtaatacgcagccaggatgttgccgaaattgccggtgggcaccacgacgttgatcgcctgtcccatagcaacctctccactggccagcaaatcgcagtaggccgatacataatacacgatttgcggcaccaggcggccccagttgatggaattggcgctggagaacatcatgccgtgccgggccaactcgtcccccacagctttatcggtgaagatggccttcaccccgttctgcgcgtcatcgaaattgccgcggatggcgcagacgcccacgttgtttccttcctgggtcgtcatttgcagcttctgcatggggctgacaccgtccaccgggtaaaaaaccagaattttcgtatgcgcggcatcccggaagccttccagagccgccttacccgtatcgccggaggtggcgaccaaaatgacgatttcctgcccctgagccgtcttgccgacagaaaccctcatgagatgcggcagaatctgcagtgccatatccttgaaggcgcaggtggggccgtgccacagttccagcacgtgcacaccgtcctccagtttgtgaagcggggccacggcgggcgaccggaattttccgccggtataagccgccgtgcagcactcctccagttcctccttagtgaaatccgtcaggaatttcgaaaggataaacgcagcgcgctccacgtagggcttttttaccaggcccgccaaatcgctctgggagagggacgggagctcccggggaacaaacagccctccctcggaggagatcccctgcgcaatcgcttgggcggacggcacctccacctggctgttccgggtgctgttatacatcattttacggaccattcctttccggtcaagacagtttcttttcctttatattaatctattttcccgccgcttgtcaaagcgttccggaagaattcgaaggcatttcggtaaaataagcgttctagacagtcttccgcatagcctttttgcaaaaaataggcatatagccgttccataacggccaccccctgccaatcctccggcacatccgtcccatcaaaatcgcagccgaatgccaccacccgttccccacccaaggagagatagtgataaaaatgccgttcgagctgctcaaaggtctgcgcgccgagctgggaggcgcagacgttcaatcccactaggccgcccgcctgccggatagcggcaaactgctcgtctttcagattgcgggcatggggatatatcgacgctgaaacggaatggctggcgataaaggggccttttgccgtctgcgccacgtcccagaagcctcgttcgttcaaatgggacacgtcgggcaggatgccggcagattccatgcggcgcaccgcttcctttccgaaggccgtcagcccctcctcgcagccggaagcacagccgtgtcccagctcattggagccgttccatgtcaaggtaataattttaacgtcgcgatcccgcagcttttcaatagactccagccggccggccagcatggcgcctccctccacggagaatatcgcctggcaaaccggcgcggcgggcgtttcttccaaatccccgcccttttgaatcaagcgcatcgcgtcggcgttggcctcaatctgccggtggccgtagtccaacagggcgcagcaggtatccaaggctgcttctccccctagcgtatccggaagccatacggcaaacacttgagcccacgcgtcaaaccgcaggccccgtcgtaaatccacatggtgcctgttttccttcaggccatcccgcttttggaagcattcgtacaaggtatcgcaatgcatgtcaaacaggcgcaagaaaatccctccttcaaaacgcatgttggaggtcgccggcttcataggccccctgaatatgatcgatctccagcaccttcatcgggtcatctgccgccgtcaggacttccaccacatcaaaacgaggctgcaagggggtgggatgctgctggagaaaacgggccgcggtacgcagaatccgccgctgcttttccttggtaaccgcttctctgggggcatagatagccgcatcgtttcgggttttcacctccacgaaggcaatatattgcttatcggcggcgattatgtctatttcccccaaccgtgtacggtaatttgccgtcaagatatcgtatccccgattccgcaaaaagcgggcggccagtacttcaccagccgcccctttggataccgccgccatattcgttatcctccgttttcagccagcagtttcttaaggaagctgcgccggtgaaccggcgaaggcccgttctccaggatgagctgcatatgtagagccgttccatatcccttgtgcttcgcaaactggtaagccggatacgtcttatccaattccagcatataccgatctcggctcaccttcgccaaaatggaggcggcggctatcgaggccgacaaggcgtcccccttgataacagaacgtccgggtatctccaaccccggcggcaccatgttgccgtcgatcaacgccagctccggtgacacagacaggccctgaaccgcccgcttcatcgccaaaaaagtggcttgcagaatgttgagggattcgatttcctccaccgaggcgctggctatcgaataagcggacgcctccttaagaatgacatcaaagagcgcttcccgcttcttttcggtcaacttcttggaatcgttaatcccgtcgataacggcgtccggccggagaattaccgccgccgcgaacaccgggccggccagcggcccgcgtccggcttcgtccacgccgcaaacaacggcatagccttcggaacggacggcttcgtcaaattcgtagttggtcatggtatccctcttttctcgcggtcattcgggccgttccagcgtgatccggcccagcttgccgccacggaattcatctagaaccgtaatcgccgcccgttcggtgtgaacctcgccgccggaaaccagcatgccccgtttgcggccgatagcgttcaacagttcccagccgtcctccggcatatccgccgcaagtttataccgctccgtcagaagcggacggtagtcccgacccaaaatggtcagcaggccgcaggccagctcttccacatccaggatttgatcgcgaatggcccccgtatacgccaggtgacgcgccacctgctgatcgtcgaattttggccagagtacgccgggggtgtccagcagctgcacgccggactccagcacgaaccactggttaccccgggtaacgccgggacgatcctccaccttggccttgccgccctttgccaggcggttaatcaagctggacttgccgacattggggatccccataaccatagcgcgaatgggacgtcctcccatccctttggcctcccaagcggcaatccgctccgtcagaagcccgcgaagtagcggtgtgaattccttcaaccccttaccgcttttgcagtccgccgccatggctgccgctccctgccggcgaaattgcgtcagccacaggcggttggcggtatcatcggccatatccgctttgttgagcaccaccaggcgcggcttccccgctgtcagcgcatccagctccgggttgcggctgctgttcggtattctcgcgtccagcacttccaccaccgcgtcgatcagcggtagacattcctggattttacgccgggttttcgtcatgtgaccggggaaccattgtatcgtctgtccttgttccatctcgcgccgcttatcctccgtaattgtataaaccgccgatatggctgaacggccataggcggaataccgctttccccattaagtctttctcactgacgcagctaatatcccttttccggctgtcatgggaattcagccggttgtctcccatgacaaaaacgtagccctcgggaatggtaatcggcccctgaaactccatgggatccgttctctggaaatcgtcaagataaggttcatccaacaccttgccgttgagaaggacctccccggtttgggcatcgatgtccagggtgtcgtttcctttggcaatgacccgtttgaccagcggctcctgcgtataccggttgataaccacgatgtcgccccgttccggcgtgtagttcaggcgggtcaaaatcaggcgatcgtgatccatcagcgtcgtttgcatggattccccgtccaccccgacaatacggaacaaaaaggtaaagaccagcaccacgcagaccagggcgaagatagccgcttccacccattcgtatacggcgacggtccgttcgttttccgtgtcttccaccagcacgttattggattcgtccatgtttcaaacctcacaatctgcttctatggttctttattccaggccgccgattttattcagcggccagatacggaaaatcgccttgccggcgatatccttcacattgataaggcccacctcgtccatgcgactgtccttcgacgcgttgcggtgatcgcccatgacgaacacatatccctccggtatcgttatcgggccgcggaaatcctcgagcacggtgtcatagtgcacatacggctcgtccagctcttccccgtttaacaggacgatatgcgtgtccggatcgatttgcagctcgtcgccgcccatggcaatgacgcgtttgataagcggctcctccgcatagcggttgatcaccacgatatcgccgtgcttcggtgtgtaaaaagcgctcgccagaatcaggcggtctttatgcatcagggtatccatcatggacttgccgtccacaccgacgatgcggaagaaaaacgtgaacaccacgacgacacaaatcagggaaaacaccgccgcctccacccagtcatacagcgccgacacatatacgcgggtattgggcttggctttggatatatgcagcgagaacattggaacgtcccctctcccggacaaacatgcaactattgcattattatagcacagctttccgcctaaataaagcaaaaaagggacgtatcgtcccttttttgcataacattttcgtggattatttcaggcgctctttgaccttcgcggatttgccgacgcgatcgcgcaggtagtacagcttgctgcggcgtactttgccgtaacgaaccaccttcacgtccgccacattgggggagtgcagcgggaagactctctccacacccacgccataagagacgcggcgcacggtaaaggtttcggccacgccgctgccgcgcttggcaatgacggtgccctcgaaggcctggattctttcgcgatcgccctcgcggattttcacgtccacccggacggtatcgccgataccgaactggggagcattctccttaaggctgccgttggcaatggttttgagtgcgtccattttcatttcctccttgatattcagacattcttacccggaaggcagaggactgtccgctctaatgtccggctttcgcttggcattaatccccggtaagaagcccgtcaggagaagagcctcttacggaacaggtattagcgcaatgcgccgataactgcaatattttaccacggtttcaggaagaatgcaaggggttttcgctttttcccaataaaatcttttagaaaaacacatccccgctttttccatacagctccaggcgcgttacctgaaagtggatagcctcccggccggtcaactgccgcagagcggttgctagcagcgcggggtttattgtgttatcgctgctgcagggcaagaccgtttccatgacgcagccgtcctccgcttccctcaagcttacatcggacagagccggcttgatatccacggtcttcatggttttctttttggtgcgcttctctacgaggagctcatcctgctccagaagccggcgaacctcctccggcaaacaggaaaacgtcaaacgataacgagcggccgccagctcccccggcttcatacgcgcctcgttagcctccaggacggtcagcccttccggcatcacggcgttcagccgggagaccagctcttccatgggcatgtcctcctccagccggaaatccatgcattcccgcagcccctcatatcccagggacagcggcgcggcaaaggtcacgtaagggtggcgattaaagccttcggtataccacagcggaatttccgcccgacgcagcgcccgaatcatggcgcgattcaaatccagatgagaaatatattttgcccgtccggttttggaaaagcggattctaacggttttcaacacagacgcctcccttccagcaggcggcgccgcagccggaacaggcttgccggcagttgggcgtcgtgacgctctggcgggccttctcgctctccttcttcaggaaagccttggtaacgccgtaatccagatgatcccagggaagaatctcctcataggagcggcggcgattggcataaaaggccggctctacccccaaatcggcgaacacctgcatccaggtggcgaaatcaaaatgctccgaccaagagtccagatgacagccccggcggtaagcttcttcaatgactgcacataagcggcgatccccccgggcgaataccgcttccagaaagctggtttccgcttcatgccagctcagcgaaatcttcttggtggtcaccgaggcgaccagatgcttctgcttggcgcgcagctcttccatcgtatcctgcggttcccactggaaaggcgtaaacggcttgggcacaaaacaactggcgctgatggagacggtcacgcctttccccttcggcttgtccgggttggcgtagtacagattgactatctgctgcccgagccgggcaattccctcgatgtcctccagagtttccgtgggcagccccatcataaagtacagcttaaccgccgtccagcctccggcaaaagccttgcgggacgtctccaggatttcctcctcggtcacatttttattgatggcgtcccgcaggcgctgagttcccgcctccggcgcgaacgtcaggccgctgcggcgcagaacattcagctgattggccagctcctcggaaaagccgtccacccgcagggagggcagcgagatattggtatgctccttctccgcccagtccagcaggcggggaagcagctcctccaggcgggaatagtcgctggtggacagggaggacagggaaaattcctcatagccggtggaggcgcacagcgcccggctttgggcgtcgatgacctcgggagatttttcacggaccggccgataaataaagccagcctggcagaaacggcagccgcggatgcagccgcgaaaaatctcgctcatggcccgatcgtgcacaatatccagaaaaggcacgacaaaatattccgggaagtacacggcgtccatatcggcgatgatccgcttgcgcacccgggagggcgctccgtccagcggccgcacagcctcgatggtaccgtccgcccggtagctcacctcgtacaacgaagggacgtataccccctcgatttgcgcggcatcgcgtaaaaatgccgccttatgaaagcccgcagccttatgccggcggtagagggccatcagctccaggttgacctcttcgccctctcctaaagtgaacaggtcaaaaaaatccaccagcggctccggattgcaggcgcaggggccgccgccgataaccagcgggcaatcgtctcccctatccgccgcccgcaggggcagccccgctaaatcgagcatatgcaggatcgtggtaaaactcaattcatactgcagcgtaaaaccgataaagtcaaaatcagcgataggctcccggctctccaggccaaaaagcgccacgccgttttccctcatctgctgctccatatccgtatccggcgcgaacacccgctcgcaccagatatcctcctgcgcattcagcaaaccgtacagcagcttcataccaagatgggacatgcccacctcatacaaatccggaaaggcaaaggcgaaccggatagccacggcgtttttatcttttaccacactgttcagttctccgccggtatatctgccaggcttttgtacctgcataaatatgttttcgagctctgaattcatccgattgtctcccatcctactgcttgattggcttcgagttctctattataccggaaaacttcccggaatgcaaacctcgatcgaaaggggcaaaaccatcacggcgtttgaaattctccgctctccgtttcaaaaggccagtccacaatgcctccgaaatcatatacctgctgatagccgagcgaaaccagcgtttcggaggcctggcggcttcgcaccccggtgcggcaatagacaaggagcacggcgtcttttaccggcagacgctttgccgcttgttccttcagcgtttcatttgttacgagaatggcgcctggaatatgattctcttcgtattcctccgcccgccgtacatccacgatggttacgccgccggcatccatccggtctttcgcctcttcgggagtgattttgtgataagccgcggacgagatatggacggacacttcgccgctggacgtcacaggccgcgccgtgcatccgctgaacagtccgacgaccatacagagagccgccgcccattgccgtttcatggttcactctccctttctgtccagtacggtatacagagtgttctgcagcacgtccacatctataggctttgccacatgggcggtcatgccgacgtccagggaggcctgaacatcctcagcaaacgcgttggctgtcatggcaataatgggaatgtctgccgcgtcgtctcggtccatttttcgaatgaccttggtcgcctcatagccgttcattaccggcatttggatatccatcagaatcgcatcaaaggtctgggacggagccgcctgaaatgtccggaccgcttgtctgccatcgggtctgacgatggattcggctcccagcatgcttaacaattccgtaaggatttccgcgttgatggcgttatcctccaccacaagaaaccgacggccggccaagccctgcttgcgtgccgctccaaacgattccgccatcgcttccggatggatcctctcctttgcctgtgatatttcgcattccagttccacgcggaaaatggtgccccggtttacctggctttccacagaaatatcgccttccattaagtctacaagccccttggtgatgctgaggccaaggccggtcccctcgacccgcgtgacgctggaattgcgggcaaacggatcgaacaggtgcgcgataaacccctccgacataccgatccccgtatcgctgacggtgaaccgaaagcgggcggcggtcacttttttcggctccagttcctcaatgaggaaatccacacggccgccttccggcgtaaacttgatggcgttgctgagaatattgatgaaaatttgattgatgcgcagcggatcgcccaaaacatatgggtgccgcagctgttcgacctgcaccgaaaaattcaagccggcctctttggcctgaggcgtcatcatgaccgatagctgattcagcagttcgggaatcgctataggaatctggttcaaaaggattttggactgttcaattttgctcatgtccaggacgtcattgataagactgagcagatgtttggaggaaacagagattttctgcaggcagtccgcgattcgctccttgtcgtccaaatgcgcgacagccaacatcgtcataccgataatagcgttcatcggggtgcgaatatcgtggctcatggcggacagaaaatcgctcttcgcgcggttcgcttccttggcctccataagcgcatgctccaacgagcgttttgcgtttctctcagccgtcaacatatcggtgacatccgcctgcaccaagcagaccgtccggtggttttcgtctccccacagcacattgatttgtttataccgcatccctttatccgaccgataaggaaaaacgaagtcgtaccctgccggctgctccgccagcctctgaagcatcgtttccaagcgaaactgtttttgcacctcttccctgtccgcctccacgccgtagcgcatagaaaagcttttaacctcctcgccataatgttccatcaaatacggcgatagattttccagcaccgtacgcctggtatacagggtaaagcgatcgctgccgacatgaataaatcccgccagttcaaacgtataggcgatcatattcagcagtccctgctgctcgcgtacggaatccgtaatatcgatgcgcaccagacaaacccgtccaatccgcagatccacttcggaaaccgtcatattcttggtgcggatatccccctgctcatccaccatggaaaaagaaaacgtataggaccctttttccttcagtctgcgcttgatttcacacggctccaaagcgcgggcataccgttccctatccttcggcaccaaggaagactgcagcatgccggccatgtgctcggaatgcttgccctgagaagcgggcacacagttcgcttttttattgcaggttaaaatcgtataggtatcctgctccagattcaaatcgatgacaaaatcgtagttggtaacagacaattggtgcaggatccgatcggaaatggtctgctctgtcacatccgtgacggtgagaatacccgtgatatccccggtgtcgggagtctctacaaggatgaccttgaactgcacataccgtcctttttcctcctgcggcagttttataaagcacgtgaggatctgttccgtgtccttcctggcgaacgccgccaaagccggctcattgagatacatgttcaaaaaggtctgccgttccgcctcgtccacaatcaagccagcaatcccttgaaaaaactcctgccgtgcgagcccgaaggtatccagaagggcagaatgggtgtaatcgataatttcgtaaatccggttctgcgtcacattgcagtgcccgacgatcaaagcgttagggcccggcttgcgataatgctgcaaaatcagatcgttatactgctggcggatccgttcttgctcctcccgctccttggtcatgtcatgataggccgcatatacccggccatcgccgccctcattctgtatcatggtcaaggtgtttttgacccagatatacccatcgtcgcccttgcgcaggcgatacacaatctcgcaatgattttcgccgctggcgatgtaagccgccatttgctcattcactgcggcacagtcgtccggatgcacgcccgccatggcgtcctttttatagatacgccacgcttcctccagcgtcaccccggtcatctgcgcgaaaccgtccgacaggaactccggaatcaggctcccgtctttttcatagcgaaccacggcgactccgccgggcagatttttcacaatcgtttggaaatactgctccagccgctccttctcttttcgggtgttgacctcttccgtcgtatcccgaacatatttgacatatgctggaataccgttccattcggtctcccggaagcgcgtgacatagaaccgatccgttttggcgaccggcattttgtgctccgttccatccggcagctgactattcagggtgcaaaacgagcagggagcggttttgccgtgcagcgcggcgtagcatttctgcccaactctgtcgccaccgtgcagaaaaaggtccttggattcgttcacataaagcaaatcgtaattctgcttatcgatgacatagatgccgtccgccgtctcgttggcgatgctttggaagagccgggtttcggaagacataccggtaaacactgcgtaaaaccgcatggagtcggacaatggccccatccgtctgccattgagatgaatccaaatcaaatgcccgtctttatgccgcatccgataggaaacatccagcacatcgccgttcgtcagcaccgcctgaatgaccgcgaacacccgcttcctatctggctcataaatcagttcgaacgcatcgccgcgcactacctcttcatactcctgccgggtatagccggaaagcgctaccacgccgtccgaatagtacgtgggaaggaaacgcttcccctcgatccgatagctggcgatcccaccgggaatagaattcaccagatgatccatctccagctgagcttccttgctgtcggtgatattgtgaaacacgcagtgcagcaacgggcagccctcatcctccccgacccatttcatctgcacccgcacccacacgatatgtccatcccgatgctgcttgcgaaactcaaatttcgcgataccgtgactctgtattacctccgcggccttcgagagcactatggcggcgtcctcaacatatatcatctccgccgcgtcttgctgaatcagctgctggtattcctccgatgtgtagcccgtcagctgagccacgccatccgaaaaataggtggtctcaaaaatatccgaaaccttgtaaatcgccacgcccccggggatggcgttaacgatatcctgcatcttttcattggcgtcgattagttcgcgttccagacgcatccgttcactgacgtcgctgtacacaccatatagcagcttgctgccgtcgtcctgcgccttaacggacccctctagatggatccagcaaaatgcggcacgccgatcgttccatatccgataggtctgatccaccagcgcgccgctgcggactgcttccacgataccgatccgcaggcgttcaacctcatccggatgaacacccaaaaaagtggtttcccgttcgatggaacgaatgtgttcatcggaatatcccatgatctcataaaatgccggattatgaaacaccggcgtaatctgttcgccattgaaccggtagacgcttaatccacacggaatgctgctgaaggtcgcctgcagttcttcccggagggtttcgcttcgctcctgctcccgcttcttttccgtcacgtccaaaccgtattcgatatgcgccggcctgccatcccaatcgataattttcccactgagctggtagacgcgtcgatgaacgggatgataaaactcccgaaccagcaactcggcgtccgacatactgctcatgcgacaaaatggacagggcttctcatatcccgccgcctggtaacatgtggtgccgggaatgcctgcgcccctgcaaagtgtttttctggccaatcggttcgcatacagcaattcccaggattctaacgcgctgacataaaccgccaccggcgcgttatccagaacggccgtcatctgagctacagagaggggattgctctgcgccatagctattctccttcccgcagcttcttccgaagtgcctccgctctttggaattcggactcaaccctttgatacagagcggcataatcgtcgcggcattctctggaacgcagcggctccacgattacgcaaaccgcctcgtacagcggcgtcaaccccatattgcccacaacgcccttgagcgtatgagccgcctcgaacgcagccgtatagtctctattcgccagcgccgcccccagcttctgcatattttcgtcctgaaacagcatatccaaaagctgaagatacatggcttcattgcccatgaagcgcgccatggtcgtatcgtagtccgcgccgtaagcttcaaaaacatcccgaaatgtcggcatgatcactcaagcctctttccattaataaaatcgtataacgtctgatacagtcgttccggctcaatgggcttggccagatgcgcgttcataccagtccatgcccggcattttccaatcgatcaggatggtgtcgaaatattgatgcttatcccagaggattccgacgcgctcaatcgctttccggccgctgtccacccattcggcctggatgccgatttccttgagcgtgaccaccgtactctcgcaaaccgccacgtcgtcgtccaccatcagcgtccgcatatgcgaaaaattataatcccgctttttcaggttgtgcctcagcttttcctcttccgtgatgcccagcttaacgtccacagtgaacgcggtgccgatcccctttatggaacgcaccgcgatactgccatccatcatgtcgacgatgtttttggaaatggccaagccgagaccggtgccgccgtacagagcggtggtgtcggtggattcctgggaaaagggctcgaagatgtgaggaaggaactcctcgctcatgccgacaccggtatcgttgacgataaaccgtataaccgcatcgtttttcgttctttttcgctgggccgccgaaaaggtgacctttcctccctcgcctgtaaatttgatagcgttgctcagaatattgatgagcacctgtaaaaaagacagggttccttctgcatcgcactgctcaaaccaggagcggaagaacgcttgcacagtcgattcagccgcgttttgatggttcatcggttttcgtcctcccatgactgccaaaatggacacatcacggcctgctggccggatagccaacgaaatcaggcagaaccgtgctggtcggcgcggccgactgccgcgtccggtgtaaccgataagcgctgttcgttcatcagcttttcaaagtccagggagggcatgggccgggcaaaaaaatacccctgcacataatcgcacccgatttcgcgcaggcgttccagttgttccttggtttccacgccctcggccaccacgctcagtttcatccagcgggccaaatccataataaagcgcagaactccctgattaaccggcttggccgtttcgctctgcataaatttcatgtccagcttcaagatgtcgatgggcatttcattgagcatatttaaagaggagtagccgcttccaaagtcatccatttccacaataaagccaaccttgcgcagacggctgaccgtatcgataatctgcttcggattttcggtataggcactctccgtaatttcgagatgaagccgttccggcgatacattatattttttcagggtatgtatcaaaatgtccaccaaatccgcgttgtaaatgtccgcccgggacacattgacggaaatagaaatcggcgggtatcctttatcgtcccattcccgcagaatggaacagaccccgtcccagatgtattgatcgagccgggtgataaatccgtttttctcgaacaaaggaatgaattccgaaggcggctgcagcccccattccggatggttccagcgaaccagcgcctcggcgccggccaaccggttgtccgcgatgcgatatttcggctgcaggtaaatgacgaactgccttttagccaaggccgtctccatcccatccgtaatggcctgttcccgcagcagctgattgcgaagctggtcatcgtaagcggcaaaatatttgccatactgccctttgatgcttcgggcggccagcagcgcccgatcgcacatctgctccaccgaaatcgtgcggtcctcgatggaataaattccccatttcatgataacgttctttgcgctggacaaggtgtgcacccgtacgctggcctccatgaacatctcgtccgtatactggacgctgcgttcgagcaggcaggcgaactgatccgcgttgaaccgcccgcagatcccccgctccccgacaagagatgtatacatgtccgccaggccgcaaaggagccggtcccccgccggaataccgaatacatcgttaatcagcttgaagttctccacatcagaacaaatgatatcatactccctgtccggatgatgcagcagaatctccttgacccgctgataaaagaactccttgctgtacagccccgtcagtcgatcatactgaatcagccgaaccatggcggcggtttcccgcagatggataatgctggctacccgatgtagaataatctggggtttatagggctttgccacaaaatccgccgcaccgtgggacaaagcggcaacctcttcggattcgctgtcgttctgcgtggtcacgataacggggatggatgacaaggaacgatccgctttgaccacggagagaaaggtatacccgtccattacgggcataacaatgtccagcagaatcagggaaaccccttcgccgtactgttttaacagatcgagcgccgcctgtccattttccgcttccagtacatcgtattcggcggccagaatctggcacagcagcgcccggttcagggcattatcttccacaaccagtatcattttacgtgaaatcatggtctcattcctctatttgttatccctcatctagggaactcacttccattttgttacaatttaaggcgaaaagtcttcttttatacgctatctctgcttatatatacgtttttttagtataacataggaaaatggaaagcgcaatcttttagcaatatactccaatgaaagaattttttattagttaaaccaaattttggtgcggatttccaaatttctcttgacagagaatgctgtaacggatataattacagcacgaagtaaagaggtgacggcttttgaacagcgattttattctcggcgttcacgctctggttttcctcaaccataaggcggaaaccctcaacagcgaaacgctggcacagaatatctgcaccaaccctgtccgggtacgccgggtaatggccaggctgcggaaagccggtctggtggagactcgcggctggcgggaaaacgccggctatttcttccccctcccgccggacacggtcagcctgcggcaaatcgccgacgcgttggacgcccgttttgtatccaccggttggcgcagcggcgctccccacatgaagtgccgcatagcttctggtatttccggcgtggtggacaatatcctggacgacttaaacggccaatgtcttgagcgcttggaacatatcaccgtgcaagatgtcgagcggcagctgttcggcggctcttcgacttctgtcgaaacaaacgaataagcctgtttggaataggtcatgctcgtggagcaatcggcggccatgtatagggggcccgtatcaacgtgacctgcatccccaccaaatcaccggcgcacagtgccgctcttccctgcaccgtcctgcgcgacgccgtttatacccaccccaccatgagcgaggcgctcaacgatttattcacctgcgtataaaaccgcaacatgtaaaggagatgctatgggttttaacatcgaaaccagcgtgccgattctcaccgtgtttattcaggggctgctcagcttcttctccccctgtgtgctgccgctcgtgcccctgtatgtgagctatctggcgggcggcgccaaaacggtggaggaagacggcaccatccgctaccggcagggtcgggtactcgtcaacaccgtgttttttgtcctgggcatcagcttcaccttctttatactggggctcggtttcaacgccctgggccgcttcttcagcgacaaccgcatctggtttgcccgcatcagcggtatcatcatgattctgttcggtgtctatcagctcggcgtattcggccaatctaaggttctcggcaaagagcaccgtcttcttttccggctggatcgcctggcgatgggccctcttccggcgctgctgctcggctttacattcagctttgcctggacgccctgcgtcggtcccaccctgggcagcgttctgctgatggccggctcctccggatccatggccaaaggcttcgcgctcatcggcgtctataccatcgggtttatcctgccgtttctggccgtgggcctgttcaccggaacggtgctcaatttcttcaaaaagcaccgcaacgtggtcaaatacacggctaaaatcggcgcggttctgctgattttgatgggcgttatgaccctgaccggcatgatgaatggtttcaccagctatctgtcacagtttggcggcgggcaggaatccgcctcctccaccgtcagcgccgcccccgatacttccgaggaatcctcctctgcgtctcaggagcccgcttttccggcgccggatttcaccctgaccgatcagtacggcaagcagcataagctgtccgacttcaaagggaaaacggttttcctcaacttctgggcgacctggtgcggaccctgtcgcagcgaaatgccggaaattcaggctctttatgagaaatacggcaagaacgagaaagacctgatcgtcttgggcgtggccggtcccaaccaggggaacgaaggctccacggcctccgtcaaaaagtttttgaaggacaatcgatatactttccccgtagtgatggacgaaagcggggatgtgttcgcggaatacggcatccgcgcctttcccaccaccttcatgatcgacaaggagggcaacatcttcggctatgtggaaagcgccctaaccggcgatgtcatggaaagcatcgtccagcaaaccatgtccggaaaacgcacctcttaaaagcagctgggccgcacagccatcgccgtgcggcccggttttataacgcctgtcgcagctcgtcccacgtcatcctctggaccagctctttgcaaaatggtacggcggaacaaaccgacgcggcccaatccccttcccggaaggtggtcagcaactgggcagtcttctcctgtctcgtgtcgatgcccgccagcacctgggccagtccttggcccgaccacttgctgtacgcctctttccgcgtccaaagcgccgtcatctttgcagcatcctggccgcaccactccgtttccgccggggtaaagcagcggcgcagcacacgcggggacagcactcgaatcgtctcgatatcaaccccgatctcctggtcgctgatcccgagaagcacggccgttccggaatgcgagagattatagcggcaggaggggcaccctggcagaaagggctttcccgtgggtgaaagcccaagcgacagctgatcccttctaagtcctgtgcacttctggaggagaaccgcctccagcgcataagccgccagccgcgtcgtccgatttcccgccgccaccctttcgcgccgccccggcagcagcttgttcagcaccgccgcctcctcgccgctgtcaagaagggccggcgcctccagcaaccagacagatagcggcatcgctcgtccccccttcctcatactgccagcagtataccataccccgccttgtcttgacaaggcgaaaaagcctgccgtccgaagcggcaggctctattttttcttgagcagcagcagtaatacgaggtagacgctgaccgccagcagcgtaaaattatacccgctgtgcagcagcacgtagaagcccgccgctgccagaggcaagatggtcaccaccgatacaaccagaaccgcgcgggtcgccttcggctcctccatgtggggcgccaaaagacagaacagcgcctgtcccccgtccagaggttccaccggcagcagattcatcaccgccatggtcgcatgcaccatgaccggcgtcgtccagcctccgccaagcagcagaaggatcccacaggagaggccgttgaccagcggcccggcaagagaaacccacacattttttccatagccgataggcgcgtgaacatcctgctcgacccgcacgccgaaaatgccgatcgatacccgcgccggtcttccgccgcaggccagcagcattagaaaatgccccgcctcgtgcatcaccgaggcggccaggcaccatcccgccataccgcctgtgtccagcgtcagcagcaccaccaccgtagccggaaacaacaggctacacgcccattcggttccccacagccgaaacttaagcatacaggctgaccggcaccaggccgaccggattataggtctgcccgttcacccgtacctcgacatgcagatggctgccggttacgtcgcctgtggcgcccaccttcgccacgatttcccccgcccggataaccgcttccttttcggccagaatctccgagcagtgggcgtacagaacctcgatgccgttaccgtgatacagcttgatgtagtttccgtaagtgggatcttgtcccacatcggaaaccacgccgaaatacatcgcatgcaccggcgtgccctccggcgcgccgatatcgaggcccttgtggaacccctccccttccttggtcggatttttccgatagccgtacccggaggtgatcgtaccggtatccagcggcgccgtggccagacggttggccgttaccacgccgaaggtagagccttccggcgcgtaacgaaccgtctgaacagacgcggtgccggaggaagcggattccgcaggaagcgtggcgcctgcctgcttggtgccctcgctgctggccggcgcgttcgccgaagacgcgccttccccactttccgcaggccggctgtccggtacggacgcatccgatgtatccgacgaagatgacgcgccgtccggctgggaggcatcgccggagctgtctcccggcacgggctcgctgttcggcgattcaaacaaggccgccagagtcgccacaatggagttgctcatgatggattcgttgaactgctgacgcagctgcgcaaaagcgtcgccccccaccagcttcatcaccagcaccagcaaaatcactgctatgcaggaaacgctctgaaccagcaccacctgcatgcccgccagcgacggcttctttcccccacggtttctctgttctcccgccggacggcgggacggcctgttcgttctttcttccggcgtattcggcatgtatcccattcccttccgccggcgcgggaggcctccctcccgcgccggatgtcctatccaattatacgatgatgcaaatcaggccgctgcagccttcattgataatgcgctccaccgtttccttgagcttgatgcgggcatccgtcggcatacggtacagcttgttatgaagcccctcgttgaccaacccatacagggaggtgccgaagatgttggactcccagatttttccggggctctcctcaaactcccgcagcagatagctgaccagctcttccgactgcttctcgctgcccacaatgggggaaacctcggtggtgatgttggccttgagcat

SEQ ID NO: 4443 - DNA, 32759 bp, Unknown
  16S sequences of unknown bacteria
ccgcgaagcggctggaggcgcgaggacacgcccaaagggcgtccgcagcgccggaacaccgcgccgccgtaaggcgagggcggtgcgaagatacggaacaccgcgcaagcgaagcgcagagcggtgcgaaacggaaaaatacattcccgccccgattgctggccgtcgaagcccgcgaagcggtgcgtagacaagcaatcgggaaatctcgcccgcaaaccgcaggtttgtgggcgatcagagcccgccgcccgatcttgggcggcgggctcgcggtgcgctatgcgtccagcgcttgataaatggtgtgcagcccgttttgcatgcagactggcaggaaacctggcatttgctgtagccgctcattttagcactttggacgaggcaggacctttggatcgtttgaatatgcttcagtttcgtttactataccattttctatgtaaaattgcaagtgtgaatagggaatttctgtaacgcctttgacaataaggtcgcacataaaattatttataaataaaaaatatatgggcttgttttggcttaatcgtaaattagtgaaagacaaatcttcaatattctattgtattgccaaattgtttcgtggtataattctaacgaaaggtgcggaaggagtgcttatgatggatctgatcggccgcctaagtgtgcaggaaaattttgtatgggaaaaatttgtttcggcagatgcgatgtttcaaccggcctatacgtggatatggaatgcgcctttatcgagaggggaaattgagaagcagctggatgccatggagaaggcaggcatccgtacggtatatgttttgccagagccgaaggactttagaatctataataaacggatgcatatggtgccggattatttgtcaaaggagttttttcaagagcttcgatacgcaatggaatatgccttagaaaaaggcatgggattttggatgtacgatgagggcggatggccatcgggcagtgcgtgtggacaagtattaaaaatgcggccggatttgtgccgtaaagcaatcgcttggcggaaagttttattgaacaaaggcgaaaaatatttgccgggagaaggcgcaatagcagcgtttgcggtaggaccgaatggaaaggcatccatggttgccccaggggaaatggttgaaaatgacgctgaattggttgagtactatgtaaagtggcaagatggaattgctgtagattcgctggatgaggagagtggccgcatttttatagagaccactcatgagcgctataaggaatttttgggggatctatttggaaagaaagatgaaaacggcaattggatttgcggtagcaataggctcccactgatgtttacagatgagccgggcgctggtcgttatgcatggccgcgaaattttgaaaagcgcttttatgaggtatatggctatgagattgcgccttatgtgccagtgctcgtcaatgattctattgatgtagatgaagcgggaacgcaagcacgcatagattatcgtgaattggcgggaaatatgttccggaaaaactattttaagccaattcacgaatggtgccgaaaaaataatgtgttatccgcaggacacctggatatcgaccataaaagtgacggatgcatctatcataactatggaagtgtactttcacaattgcgtgaaatggatattcctggtattgatgcaatttggagacagattgcgccgcccgttgatggagaaccggcgtgcgcagaagggaatggatttttcccgagattcgcttcttctgcggcagcgcagagtggcggcaaatatgcgcttagtgagagttttgctgtatatggtgcagggctcacaggagaagaaatgcgttttgtggttaattatcaattggtgcgtggaattaatatttttaatattatgtcgatgtcgtatggcaagaacggcgctgcgccaacgataatgcgaccgtcttttgttgcagaaatgccgggctatgatcatcttgcagcagtaaatgaatacattgcgcgagcttcgtatctgatgcaactcggtgaatcaggggtgcggacggcgctttatctgcccaatcgagacatttgggcagctggaacaaggcgttcgcgcgcaatagcatcatttgatgcgctgggcaaagaattggaaatgcagcaagtagaatttgacattgttgatgatgaagcacttcgaatggcaaggcgcgtgggcaatgagttgcacgtcggcttggcgaaatactgccacatattggttccggagtgcgaaaagatgccggaagatgtggcggaaattgttagcggcattgatcatcaaattgtaccagcgctgcactgcgcgaattgctcctttttgcgcattcgcacgagaaagatgccagacgggagtgtgctctggatgctatttaatgaatcagagcaagttcaatcattagaaattgtgttgccaggatcgggcaatggatatcggttagatgccgcattggggcgggtggaaaaggttggtaaccatttgcgaggcttaatattgcatccaggtgaggcacaattttacttatatagcagcgctactcttggaggagctacagagaagttgggcgcaaaaactgtattggcggagatttccgaatttcgtatgcgaaaattgcgaaaatcatggatcgattcggaggggatccatgatgtgctttgcatggaagaaagcagaaattgcgcattgggagattgggtaagcacattgggtaaggaattttcgggcgaggtagtgtatacaacagaagtgaagctggaacaaccactacagagcgggaaaatgtatgcgcttgatttgggaaaagtagaatgcagcgcatgcgtaagcttggatgggaaaaagataggaactgtttgggctactcctaaaacaatactatttgatggtgcagttgcgggtagtaggacgaaattcgttttggaaattgtagttgcgaataccttggcaaatcagtataatacaaaatcaatagaaacaatgtattcgcaggaggattatggaccgtatcaggaaaaactaaaagattttgaacggtatgcgcctgctggtggattatatggaccagtgattttgtatggatttgaatagcgaaagaggctgctttgtgtaaaggggatgcaaggtaatgaataagtatacttgcctaattgtggaagattccaatattgaacgtgaggggttgcgctatttattggaactgagggggtatcaattgcaaatacttgaagcgagcaatggcgaagaagcattggaaattttaaaaagcagaaatgtacatatactaataacggatattcgcatgccgtttgtagacgggctggaattggcacagatggtgagcgaaaataatcctgatataaaaattgttatatgcagtgcatatggagaatttctctatgcaaaaagagcgattgattatcatgtgcgtggatatttgttgaaacctgtgcggcgcacggaattttatgagttgatcgataaaattatagaagagcttgagaaggaaatgagtcggcctgatttgacaaaattggaaattgaaaaatgttggtatgatataatgcatgggtgcaaattggatgaaacaatgcgcatccgcttgaaaaggcatgggattgaaattgattcgatacatccaattttaatggtgattaagtttgaatcaaatgtgttgaaagagggcgggaaaacactggaaaagattatcggaagcagagtagatggattgtgggtactggatatggaacgggcaatgctggtaataaatgaagaaaagagcaaagaagatcttttgaaaactgtgagtgagtttcaagcattgctagaaaatggcattggggtaaaacctgctattttatttgtacagccacgcggagaaatttcagaattgcgcaatatatggcaatgtatggagacgcagagtgaatttcaattgcttaaaagtggatctatttgcgagatgaatggattggatgcggctgaagaggcagaattcatagaacagatgaatagactgctgattgaggcacgagcagccttggaaaaacagaatgatgatgaggcgtatgcgtatattgaagaattttgttcatatatacgaatgtttggaaatgcctcagcactatatatgcgatatgtaactatggaggtgatagctgctgtaacacaatctggttgcacacggaaattgctaaaagaaatgctgaatcaagtaattgatgcacgtagtgttggagaaatgactgaatttgttggcaaatttaaaaataaattgtcacctaaaagcgaattaaaggaagaagatgcgattgagtgtatacttaaaattattcatgggaattatatggatgaattgacactagaaacgttggcgaaaagagtgtatctttctccaccatatttaagttacctattcaaaaagcgcactggcacgacgttgatcaaatatttaacggattgtcgcatgaagcatgcggcagaaattttgttgaacgagaatcgaactataacagaagtcgcacaaatggtcggatatgataatgtgtcttattttagttcgttgtttaaaacccgttttggtattccgccaacgcaatatggaaaagtggataaatccgataggggtgtatagtatgaaaatatctccaaagaaaatcgggattaaaaataaattgataattttgtatgtagtaattttcggtataatgattgcattggtgtttagttttacgattgaatttacaagagatgctgtatatgccaatagattgagtatggttgaaagtatgacggataaagcatgtaataattttgatagaaaaattgaacaatatgaatatattatagcgatggcggcatataacgaggattttcaaaaaatatataggaacaatttgtcgctatatcaaatgtataagggactagatggcacgctgctctcgttttatagtaatgtgcttgcaatatatctggatgatattgaaaatatctgcgtatattctacttctggattgaataagtggaggggatttatcgattcgtatataaaggttgaaagtgaagagtggttccaaacggcaatccaaaatcatggaattcattggactattgaaaatgatatagtatttgctacatgcagaatagatgatttgctgaacatttataatgaaacgcagctcggcgtattatatatgagtgtaaatggtgaaatgctatttgatgactatgctcatattgattggccggcatataaacttactatttattctgcgacaagcgacgtattattgcaaaaatcatatggcgattataatgaagatttaaatatcgttgattttataataaatccgcagaatacggattggagcttaaaatatagtgtgccgaaaagtacattatatattgatgagaatatggcattgccaatgaatctttgcattgtggcgtgtggaatgattatactattgttggtgatggtcatttttacaaatcaattattgagcggattaaaaagtttgaaacagaatatgcagcatgtggaaaatggtgaattacaaattttgacttcttgcacgtcacaagatgaaattggagaattgagtaatacatttaatcatatgcttgaaagaattcgagaactacttaaaaggacacgggaaaatgagcgccgtttggcaaacatggaaattgaagttttacgagcacagattgatccacattttttatataatactttatcgtttatcaattggaaatgtgtacgagcaggacaggaggatgttagtgatattattaatcaattggctatgttttataggacgtgcttaaatatgggcaatcaatttatttatgtgcgtactgagattgcaaatatagaagcatatattaatattcaactccgtctgcatgataacaatttttgtgtagaatatgatttggacgaagagcttttaaattatcgaatgcttagctttgttttgcaaccattgatagaaaatgcaattttgcatgggctcgataaacggcgcgatgcggatagaaagctcattcttgtgttacggagggaaaatgaaaagcttgttttttatgtgcgggacaatggacctggcctgaccaaagaaaaagcggcttggcttacagccagagacctaacagaaaaatttggcgcttcctccaaaggatatgggatccgcaacgtgcaggaaaggattgctttgcagcatggggaaggatatggtatacggctaggctcatggccgggcggaggctgtgaggctgtattggtgctgccgctgctggagtgatatattcaataaacgtaaaatattgtatgttaagattaaaaaattgattgcagagagcgccatcttctgctatagtttatatacaaaataaatggaggtgtttataatgcgtagagttttaggagtgttgctcgtagttctgctggcagtttcaggcacggctgcctttgcagagggagaagacattgtgctcacttacggcaaagaatttgactttgatggcaagacgttccttgaagggcaggatttggaaaacaactattatctcgattatgcctacgaaaagcatggtgtgaaggttgagtacagctgggtactggatgacgatgcccagaaggattcgctggctgtggtgaatggcagtatgcccgacgtgatgcttgttgatctgacgacgttcaatatgttggtggcttcggatatgttagcgccgctgacggacgtatttgaggaacatgccaatcaatatttgcgcgatgccaggtcggtctatccggaagcgtttgctgcagctacggttggcggcgagctgatggctatccccaatacagttcctgtgaaacagcacgtttatacatgggtgcggcaggattggttggataaactgggactggagcttccgcaaacgttggatgatatcgtggcaattgccaaagctttcattgaacaggatccagacggcaatggagaagatgacacaatcggtttgccgttaaatgcagattacatcattggctattatggcggcgattacatggcagaccccattgccaatttgtttggttcctatgcccgtatgtggtatgaagatgaagatggcaaagtaatttacggctctattacagaagagacgcgcaatgcgttggagtatttggcggggctatatgcagatggcattatcgatccgcagtttgcagtgcgcgatcaggcggaattggtgatctctggcaaatgcggcatcttctttggctcttggtgcgctggtccgttgagtcagtcgtatggatacgatcaggcggactgggtgccggttgttgcgcctctggcagaagatggcaccttctacacgaccaatcctgttccggcgaatgcttacttggttgtgagcaaagaatgcgagcatccggaagctgtgatttggatgttgggggatacgtatgaattccaccgcttcctgacgggggacgatgagtggaccgctaagggcatggaatatcaagaagcaggcgtttcttggcaaattatgccgttcgaactgcaattggaggcgactgacattgttgcgacccgcggaaaagatatggtgcaaatgattgacacgggcgatcgcacgggtgtttctttggaaaatcagagcttctatgatgcatacctggcttggttggaagatccctcttcgctaactggctgggtgcgttataagggcatgtatctgggatgcaatgtcgccaactatgagaagaatgattataaatcgcctgtcttctggggcacgacggaaaccatggaagactattggacaaatttgaccacgctggaagacgagaccttcatgaagatcgtcatgggtgaggagagcatcgacgcttttgatcgattcgttgaggaatggaaagcgcagggcggcgatatgatcaccgaagaagtgcaggagtacgttgactctcgaaagtagctttcatggcagataattagcattagtgaattatccgctaaggcgcaattaagggcgggaacactcccgcccttaataaaaccattgcggcgattcatgctggcaggatatcaagttttgaaaatgcgttggtgggaaagggaggatctggaagtgcaaaacagaagatatgcatatcagtatcatcttatgctgataccagttatgatttttttggtgatatttcatattttgccttgctttggaattgttattgcctttcagaaatttattcctgcaaaaggcatattgggttcggaatttgttggattaaaatatttcgaacaaatgtttagaatgtcaaattcgtggaggatatttcgaaatacaattgtgatagcttgttggaagatcgttatgaatatgattgttccgattgtattttcgatcctactgaatgagcttcgccatgaagcttataaacgaactgtacaaacagtggtatatttgccgcactttatgtcatgggttgttttggcaattccgattatgaatatattcgcatatgatggtattgtgaatgacattataactgctcttggcggaactccaattatgtttttggccagcaacacatggtttagaccaatactgatacttacagatgtgtggaaagaatttggttttggaaccattgtatatttggctgcaattacgggcatcgatccggcactttatgaagcagctgttatcgatggcgcaagccgtggccagcgcatgctgcatgtgacgttgcccggaatgctgcccacgattgtgctgctggccactcgaagcttgggcaatgtactgaatgcaggatttgatcagatctacaatttgtatattcctgcggtatatgaaacggcagatattattgatacatacgtctatcgcgctggtttgattgacatgaattattcattgtcaacagcggttggattgatgaaatcggttataagtattgttctaatacttacatccaatcatttggcatatagattggcaaattatagaattttttagaaggggagtgcggagaatggtagaatctaaacgaacgatagacgttgttatagatgtgctgatttatgttgtggttggtataggggcaatactttgcctaattccgctgctcaatacgttggctctttcgtttagtagcagtgtaatggcgggctcgggaacagtcacattttggccaaaacaatttaccacggctgcttatgaagccattttgactgaaagacagttttttggatcattttttatttcagtacaacgcgttatactgggtggagcaattaactttctaatgatggttttggcagcattcccacttgcacattcggaacgtacatttaaaggccggaatatgtatatgtatgtgctgatttttactatgctattttccggcggcttgattccgacttatatcgtggttagcaaactgggcttaatcgataccatttggagcttggttttgccaggtgctgtgcctgtatggaattgcattctgcttatgaacttttttagaagtctcccagacgaattggaagaagcagcgattattgatggagccgtaccggtgcagattatgatacgcatatatctgcccgtatcccttccatcgctggcaacggttatgttattcagcatcgtcggtcattggaatgagttctttagcggattgatctatatgaatcattctgaccattatcctttggcaacgtatatttccacaattgtggataccgcaaaggatttgaatcttataaccgatccggaagaaattgaacgcataatgaaagtctcttctagaaatatgtcctctgcaaaaatatttgtttctatgataccaatattgttggtatacccatttttgcagaagtactttgtcaagggaatcgtattgggatctgtgaaaggatgatgaatcaatgtctaaaaactctttgtacaattcttccaacaattacatgatccccttcttgtggatgcatggggaagaggaagagcgcttgcgcgaattgattggcacgattcatgcaagtgggatcggtgcgctgtgcgttgaatcaagaccacatccggattttttgggccccaaatggtggaaagatatggatgtggttttggacgaatgcaagaagcgcaatatggaagtatggattctggatgacgaacactatcctacaggatatgccgctggccgagcggcaaacagcgaatatcgggtgcgctatctgaatgagatgcatgttgatatcgcgggcccgcaggtgggaacgtccatcctgctcaaccttccgatcaccaatcgccgggagccaaatacggatccggttattgcggtggtggcggcaaagcgtattccagggcgtaacatggatcattctacgtttatcaatatcactccggatccggtggagcaattgatcgatttaagtgataagatagacggggatttggtgtattgggatataccagaggggttgtggcgcatattcattttcacggcgcattacggcgttggcagtgaaaggcgcgacaagtatttgaaccccttgaccaaagaaggaacgcgtattttgattgatacagtatatgaagcgcattatgaaaaatatgcgagtgatttcggaaaaacgataaagggatttttttctgacgagccacagttcggcggcgggtatggataccacgcgatcattggccgagctcccaacttgatgcttccctggtccgatgaggtgctggagaggatgagcacggttgctgggtgcgatgtgcgcaagtatttgcccggtctttggtgcgatattggcgaaatgacttctcgcgtgcgctttgcctacatggatacggtgagccggttgtatggacaaaacttttgccagcagattggcgactggtgccgtgcgcacaatgtagagtacatgggacatgttatcgaagaaaacaatgcccatgcgcgattgggagcgggaacaggacactatttccgcgctttgtggggacaggatttggcgggaattgacattgtattgaatggcctaatacctggaatcaaagggggatcgcacgcacaatccgctgcacaatttgaagcggatgacgacttcttttattactgtttggcacagctagccacgtctttggcgcatattgatcccaaaaagcgtgggcgagcaatgtgtgaaatttttggcgcttatggatggcaagaaggcctacgtgaaatgaaatggctggctgactttatgatgagccgaggcatcaatatttttgtgccgcatgcctttacgccaaaagattttccggatcctgattgtccgccacatttttatgcgatgggcgaaaatccacaatatcgctattttggtaagctcatgcaatacatgaatcgagtatgcgacatgattcacggcggacatacaattaccaaggttggtgtactgtaccatgctgaggcagagtgggcctctagcaaaatgatgaagactcaggagattgtgaaagaattgacgcaagcacaagtggaatgcgacattcttccttccgacatgttgtctatagcgcaattgcgcaacggtgcattggcaatgggagaatatgagtatgaagcaattgtgattccatatgcggaatggatgcctgcatccacaatgcaaaggctcaatgaaattgcgcaaagcggtgtgaagattctatttgtagatgcttttccggcaggatgctctgtggggaatgcggatatagacacaacgcttgcgaattgcactgtagtcaaaaaagcggatgtggtaaagactgtaatagatatggggcttcgcttcgcagatgttgtggggtttgagccggatttgaagcttttcccatatgaaaaagaagggaaaatttatcttcttatgttcaatgagaatataaggagcaaaatagcgactgaactagtgcttgacacaacaaaatgcgtcacgcgatacgacccctatgaagattgtttatacgatctgccaacaaaggtggtagatggcaaaactacggtcgaaattgttctgcaaccatacgctttagaggttttgataattggcgaagaagatgggatggcacaacagatttctccattgtgccggcaatgcccgatccctattgaaggttattctgtatctatcgcaacggccaaagagtatcccaattttacaaagcagcctggaataacggcgccgatgaacttgaatcaggcggatggtttgccacgattcagcggaacaatacgctatgagggaacttttgcggtggatgcagaaaagcgtcttcaactggaactgggcgaggtaggagaaacggcagaagtgtttgtaaatggcaaatcggcgggagttaagatcgcgccgccgtatacctttgatctttcgcatttggcgcgcaagggtgaaaatgcgttgacgattgatgtgaccaatacattggtatatcgcatgcacgatggcttttcagcgtatcatgccatcgctgccagtgggttgattggcccagtccgcttgtttggcgaatgacttatgaaatgggctgcctttctcggctcaagtggaaccgaaaaaggcagctcttttcatggaaccttatacgtccagcgcttgataaatggcgtctgcgatcatcatgtgtcccgtcaaattgggatgcacataatcccacgacatgctcatgggatggcagtgcgcaaagtagcggtcaaaggatacctggggatcggccagcagcgctccggtgcgctgcgcgatatcgcgcacgatggcggcgtattcatcgcagcgggcccgcatgggatcttgccggttggtgtccatgaacacaggcgttaccagcacgaggccctttacgcggggcagcgtttcgcggacgaggaactccaaagtgctccggtattcttcgggcagcacatgccgctctgtttgcagggggcaatcgaattgccgccaaacgtcgttgatgccgatcatcacgctgacccaagcgggcgcgagatccagcacgtcgctctgccagcgcgcttttagatcgcgcacggtgttcccgctgacgccggtgttggtcacgcggatggcaagctcggggtgccggctgctgagcatggcgttgagcagcgccggatagccgcttcccagtccgccgcgctcgccgatggggcgttcgcggccgcaatccgtgacggaatcgccaatcatcacaagccgttcgtttttctgaattttcacgagggtacctcctacgcacaatgattaaaagtattgtacaagggatgcgcggcaaaaacaagcgcaaaacgtttgcttttgccgcgaaaatgcgttatgcgccatgggcaagggcggccttcaaaaaggggactgcgccgcggtttacgttatacgcaaaattttcatattaatttacgatgtgtttccggggaaagcaagcgcaaaacgtttgcttttgccgcgaaaatgcgttatgcgccatgggcgcgggcggccttcaaaaaggggactgcgccgcagtttacgttatacgcaaaattttcatattaatttacgatgtgtttccggggaaaacaagcgcaagccgtttgcttttgccgcgaaaatgcgctataatattgaaatacacaaccgtgccggtagaatggtaggatacggtaggatttttaggaggttggtagtgatgatttggaacccaggcattgaacaggctgaccgcgagaccatacgctcgattcaactcaaaaagctgaaaacaattttgatccacgcgcgggacaatgttcccttttatcgcgagcgcatggcgaaggcgggcttcattcccgaagatgtcacacgcctggaggatattcaaaaactggatttcaccgtgaaaaccgatttgcgcgaccattatccctacggcctgtttgccgtgccgatggaggacattgtgcgcattcacgcgtcttctggcaccacgggcaagcccattgtcgcgggatacacgcgggaagacctcgacgtgtggagcgagtgcatcgcccggttggtgacggccgccggcgcgcgcaagggcgatattgcgcagatttcctttggctatgggttgtttactggtgcgctgggcctgcactatggcttagaaaagatcggcgcggcggttgtacccgtttccagtggcaacactgtgcgccaagttcaattgatgcgcgattttggcgccacggtgctggtggccacgccgtcgtatgccatgtatttggcggaagcggcggaaaaagcgggcgcgatgaaggacataaaattgcgcgtgggcctgttcggcgcggaaggttcgacggaagaaatgcgcgcggaactcgagcgccgctggggcatcatcgccacggagaattatgggctcaccgaagtgatggggccgggcgtttctggcgaatgcgagtacaaaaaaggcatgcacatcaacgaagaccacttcctgtgcgaaattatcgacccgcagacgggcgaagttttgcccgatggggcggagggcgaaatggtgatcaccacgctttcgaaattcgccatgcccatgatccgctaccgcacgcgggacatcacgcgtatcattaccgagccttgcgaatgcggacgcacgacgctgcgcatggaaaagtgcaagggccggtcggacgatatgctcatcatccgcggcgtgaacgtgttcccctcgcagatcgaatccgccctgctcggcgtttccggcatcgggccgcactacgaaatcgtcgtcacgcgggaaaattatatggataagatcgaggttcgggtggagcttacggacgaggagaacctcgacaattttgccgagttggagcgcctgcgcaaccacatcgccggccgcattcgcgcgatttgccagctggatatggcgatccgcttcgtatcgcccaacacgctcaagcgtttcgagggcaaggcgcgccgcgtgaccgatttgcgcaatcagtaaacaggggataagaaggggaagaaggtcgagcacatatgaacgattttatgctggggaatgaagccattgcgcgcggcgcttatgaggcgggcgtgcggctggtatcgagctatccgggcacgccgagcacggaaattacggaatattgtgccaaatacccggaaatttatgcggaatgggccgcgaatgaaaaggtggcgctggaagtgtgtgcgggcgcgagcatggcgggcgcgcgctccatttgctgcatgaagcacgtggggctcaacgtggccagcgatccgctgtatacgctcgcctatacgggcgtgaacggcggcttggtggtggtcgtggcggacgatccgggcatgcattcctcgcagaacgagcaggatagccgcatgcacgcgcgcggttcgcaggtgcccatgctggaacccagcgacagcgacgaatgccgcgcgttcaccaaactggcgtttgaattgagcgaaaaatacgatacgcccgtgttcgtgcgcaccaccacgcgcgtggcgcacgcgcgcagcgtggtgcatccccaggagcgcgtggaagcggcgctcaaaccctatcagaaggacatttccaaatgggtgatgatgcccggcatggccaagggccgccacgtggtggtggaaaagcggatgaacgacctggccaaggacgcctcttccctgccggtgaaccgcgtggaaatgggcgatacgaaaattggcgtgatctgctcgggcatggcatatcaatatgtcaaagaagttgcgccggaaatttcggtgctgaagctgggcattgtcaatccgctgcccatggatttgatcgcagattttgcccgccaggtggaaacgctgtatgtgtttgaagaactggagccggtgattgaagaacaggtggccgcgcatggcatccccgtgactggcaaggcgcttacggggcggcagggcgaactgtccgcgcacaaggttgcaaagcttctgggcaaggaaatccccacggccgcgcagccggatcccgtgcccgcgcgtccgccggtgctctgcccgggctgcccgcatcgcggcgtatacgcggtgctcaacaagctcaagtgcacggttacgggcgatattggctgctacacgctgggcgcgctcccgccgctttccgcgctggactccacgctgtgcatgggcgcttccatcggcatgagccagggatacaaccgcatgttgggcgcaagcgccgcggaaaagacggtggcggtgctgggcgacagcacgttcctgcattcgggcgcgacttcgctgatcagcgcgtgctacaaccgcgcgcgcgtcaccgtgatgattttggacaattccaccaccggtatgacggggcatcagcccaatccttccacgggattcgatatccacggcgagcgcaccacgcagatttcgctcacgcagctttgcgaggcgtgcggtgtgcccaaggagcacatccgcgtgtgcgatccctttgatatgaaggcgctggaagcggccataaaggaagaaaacgcgttcgacggcgtgtccgtcatcgtggcgcgccggccctgcatgctgctggacaaaaagagccgcaagagcccgctttccatcaaggcagacgcctgccgcaattgcctcagctgcatgaagctgggatgccctgccatcgagcggatggaaaagggcgtgcggatcaatccggatctgtgcgtgggctgcggacactgccagaatgtgtgtccctttggcgcgattgtggaagggagcgaggcaaaatgagcgagattcgcaatttgaatatcgtgattgtgggcgtgggcggccagggtacgctcttggccagccgcattttgagcacgctcgcgttgaaacttggcctggatgtgaaggcctcggagatccacggcatggcgcagcgcggcggcagcgtggttacgtttgtgcgcatgggcgagcgcgtatacgcgcccatggtggaagaaggcggcgcggattatgtgctggcctttgaacagctggaagcgatgcgcgcggtgggatatttgaaaaagggcggcgtcatgatcgccaacacgcagaaaatgtcgcccatgcccgtggtgacgggcgcggccaaatatccggagaacgtgctcgagagcctaacgcaaaaatgcgcgctggacgctttcgacgccttgtccttggcgcacggagcgggcgacggacgcgcggtgaacgtggtgctcatcggcgctttggcccggcgcgtgggcggcgatgcggaaatttggcgcgatgccgtgcgcgcgtgcgtgccgccgaaatttttggaaatcaacttgcgcgcgtttgacgcgggctacaatcgataagatttacaggaggaatgcaatccatggcaacccatcgcatctggaaccctgcggccgaatgcatgccgcgagagcaactgcgcgcgcttcaattggagcgcttgaagaacgtcgtgcgccgcgaatacgacaatgtgccgctgtaccgccgccgcatggacgaaaagggcattaagccggaagacattcgctcgctggacgatctgcagtatctgccctttatgcagaagacggatttgcgcgacgaatatcccaccgggctgtttgccgtgccgcgcagggaaatcgtgcgtttgcaggggtcttcgggaacgacgggcaagccgattttggcgggctacacgcggaacgatttggagaattggtcggaaatgatggcgcgcacgatcggcgcggccaacgccacggcggacgatatcgtgcaagtggcgtatggatacggcctgttcaccggcggcatgggcgcgcaccagggcgcgacgaagctgggcgcgatggtcatccccatgtcgagcggcaacacggccaaacagatcatgatgatgcaggacgtgggcacgaccattttgagctgcacgccctcctacgcgatccatatcgcggaaaccatccatgaaatgggcatcccgctgtcttcgctgaagctgcgggcgggcacctttggcgcggagccctggacggaagccatgcgcaagcggctggaaacgttgctcaacatcgacgcgctggatatttatggcctcacggaaatctgcggcccgggcgtcgcctatgaatgcctggaaaagcagggcatgcacgtcaacgaggaccaggtgattgtggaaatcatcgatcctgtgacggaaaagcccctgccgtatggggaaaagggcgaactggtcttcaccacgatcaccaaggaaggcatgccgatgctgcgcttccgcacgcacgacctctgccagatcgacgcgtcgccctgcgcttgcgggcgtacctttgtgcgcatgaagcgcatcatgggccgcacggacgatatgctcatcatccgcggcgtgaacgtgttccccagccagatcgaatcggtgctggtgagcatccatggcgtggcgccgcactacatgctcgtcgtcgaccgccagggcgcgacggacacgctggaaatccaggtggaaatcacggaggatgtgttcgcggataccgtcggccagctcgaaacgctggaaaagcagatcaacgagcgcatcaagtctgtggtgggcatcagcgcgaacatcaaattggttgcgcccaagtccattccgcgctccgaaggcaaggcgaagcgcgtgattgataagcgcaagctataatcaagaaaaaagaaaggtgtgaagggaatgtacgtaaagcagatttcggtgttcctggaaaactccacgggtacgctcgcggagctcacgcagctcttgggggaaaagggcatcgacctaattgctctttccatcgcggatacggagcactatggcattctgcgcgccatcgtatccgacacggataaggccgtgagcgaactgaagaacgcggggtatacggtgaagctgacggacgtgctggccgtttccgtgcccgataagccgggcggattgagcgtggtgctggaagcgctggcggaagagaacatcggcgtgaactatgtgtattcgtttgtgcgttcctctggcagtcatgcgctggtgattttccgcgtgacggatctggaagcggcggagcgcctgttccgcgcgcacaatgtgacattgcttacgcaggagcaggtgcgcgaactgtgagaccgaccaaattgaccatttccaccgcggccattgccgcaaatttgcgcgagattgcgcaaaagacccactcggcggtgatggccgtggtgaaagccgacgcgtatgggcatggcgccgtccctgtggcgcgcgcctgcctgcgcgcgggcgcggcgggctttgccgtggccacggcggaagaggcgctggaactgcgggaaaacggcatcgaggcgccggtgctggtgctgggcgcgccggatcgggagcttttggaagatatgatcgccaggggcgtttcgtttgcggtgttcgatgcccaaacgctcgcccaggcccaaaaactcgccagcgcaaggcatacgcgcgcgctggcgcatctcaaaatcgatacgggcatgcgccgcattggcgcgccgtgggacgatctggacgccttgctgcgcgcgtgggaaagctgcccggatgtgcaaatggagggcgctttttcccattttgccgccgcggatggggatgaagcgttcacgcgcctgcaagcggagcggtttgaagcggctttgcaaaacgtgtgcgcgcgggggtttgctcccatgcggcacatggcggcgagctccgcgatgggaaacaccgccttgcgctacgaccaggtgcgggcgggcatcgcgctgtatggcacgggcgcgccggggtttgcgctgcgatacgcgcaggagctggccacgcgagccgtgcggatcgcctggattggcgcgggggaaaccgtcggctatgggcggacgtttaccgcggcgcgcgacacgcgcgtggcgacgctgcccattggctatggggacgggtatccgcgcattctgggcaaccgggcggacgtccttgtttgcggcaagcgcgcgccggtgatcgggcgcgtatgcatggatatgctgatggtggacgttacggacgtgcccgaggcggacatggcggacgatttcattctgctgggcgcgcaggggaacgagcgcataacgccagatgaactggcggagcacgcgcagaccattccctatgaaattatgctgggcttttcgccgcgcgtgcggcgcgaatgggacaatgatgaaatctgagctccgcgcacagatgcgcgcccggcgggaggcgctcccgccccaagagcgcgcgtgtctgggcgcgcgcattgccgggcatgcctggccgctgctggagggggctgaaagcgttcttctctatgcggatggctttggcgaagtgcccaccggcgctttggcgcggcggttgctggcccagggaacggcgctgtactatccgcgcacgctgggcaaagggcgcatgcgcgcggtgcgcgtgcgcgatctatcggaattgcggcctggccgcatgggaatcctggaaccggaaggcacggaatacacagaggaagcgcaaattgtgctgcttccgggcattgcctttgcgcgcagcggagcgcggctcggctttggcgcggggtattacgaccgctttcttgcgggaaaacgcggccgctttgtcgcgctcgcgtattcgtttcaaattgtaagcgcgcttcccatggagacgcacgacgtgccggtgcattgcattgtcacggaggaaggcgtttacgattgcataaagggggaactgaaatgaaacgggaaaaatacctggtgcggcgcggcctgatgctgcagggaattctgattatcgtgagcttgatttttctgctctccatgagcggatggtgggcgttcgcgttttccgtggcgttcattgcgggcgtatgcatttatgcgctcaacgagggcgcttacctgggcgataaggcggtcgccatgcaaaagctgatcgataagcagcaggcggaggggcgcgaaattgcgccggagcgctataacgaggtgttcgattggcgcgtgggcgtgcgggcgtatatctatacggtgctgccgttcctggtgctcgcgattgtgaactatgtgctgtttttgtcctggccggaagaccaggccaatattctggatttggtggttaacattctgtttttgccctatttgcaattgttcgggccctggttggaaacgattgatttggcgattacgcgcctttgctatatccctgcttcgctgattgtgccggcgtttgtgatggttggctatctgcgcgggccggtgtattacgagcgcaaaatgaaggaaatgatgaagggcagcaagaaaaagcgcaagcgcttgcgcgtgacacccaagccccgcaaggacaggaatcagccggaaatctgagtttgacggttcgttttgccttgagtgcccaccaagccaggggaattcgtccagaatggcattgggcgggcattttgcgttgcaatgcttgcaaaagtatgctataataaaggaggtaggtatgcgcatcattggcggaagcgcgcggggtcgccgcttgtttgcgccgccgggggaaaatacgcggccgacggcggatcgcgtgcgagaagcgcttttcaatattttggcggcgcggctggatggcgcgcgggttttggatttgttcggcggctctggcgcgctcgcgctggaggcgctgagccggggcgctgcctgcgcggtgattggcgataaggatcccggcgcggtgaacgttatccgcaggaatgcccttagcgtgctgggcgaggcggagttgccgcgggcaaaaatcgtttgccgggattatcgcgcgttgctcgcttcgctggcggagccgtttgatctggtgtttttggatccgccgtatcgcatgcaagaagcgtatggaagcgctatggcgcagatgcagcaaagaaatttgctcgcgcccgatgcgcgcattgtggccgagatggcggcaggcgcgagcgtacccttgcccagcggcttttgcgcgctggacgagcgaaaatacggcgatacaaagctcgtatttgtggggaggcaggaatgatagggctatacgcgggcagcttttccgtgccgacgatggggcatatggatatcatccgccgcgcggcggcggtgttggacgggctcgtcgtcgccatattggtgaatccggaaaagcgctatgccttttcgccggagcggcgggcgcggtggctggaaaaagcggcggaagatttgcccaatgtgcgcgtggtatgggacaacggcttgctggtcgacgtggccaagcgctgcggcgcgggcgtgatcgtgcgcggcgtgcgcggggagagcgatttgggctatgaaatgcccttggccgaggccaatcgccatttggcggggctggacacgctgttttttgtcgcgcggccagaacttgcctatctgtcttccacgattgtgatggacattgcacgccatgggggcgacgtgagcgagatgattcccgcacaggttgcggatgacatagtgaacgcaataaaggagtgttgacaatggatcgcgaatacgcagacaacaagagcaatacgggcaacagcgcaaggatatccgaaatggaacagggtgaactgtcgtatttcctgaagttgtttgagtacctgcgcgatgcgctcaacaacgcgcccacgtcctttatgagccgcggcaagcggatggtggatgtggacgaatgcctgaacatcctgaatgatatgtacaacacgcttcccgtggcgatgcgcggcgcttccaaagtttatcgggagcaggagaacattttgcgcggcgccaaggcggaagaaatgcgcattttggaatccgccaacgcgcgcgcgaaaaatcagctagagaatgccaatgcgcgcgcggacagcatccttcgcgcggcggaagagcgcgccgagagcacggtggcaaacgccgaggccaaagcgtctcgcatgctggatgaggcgcgcgcccaggcggaggaaatggtgagcgaaaccgagattatgcaaaaagcgcgggaagaagcgcgcgccacggtgaaccaggcgttggcagaggccagcgataagcgcctggccgcggcgggatatgcggatggcctgctcgacgagttggacaagttgctcaccgatatgggcaatcatgtgcgttccaagcgcagcgaactggcagagtaagaaaagaaaaatagcgtgatatggcgcctggcagcggttttgtgccaggcgctattgtatttcgctcagctggattgggaagaaataagcagtgtcatttccgcctgaagaaggagatacttcgccgcccagttttcgataaagcgcattggcaggagcgttgcgcgaatcggtgaagagaaatattttgccgatattgcttttggcacagatgttttggagcgcgcacatcatttgcattccgatgccctggcgttgataccgctgcgctacgccgacttcatggagatagagcatatttttgctgccgttcaagcgaggcagagcatacccataggcgaatccaataacggtttcctcccaaagggcagcaaagaaccagtttgcaggattttgcaaaaagcgttgcgtggcttctggatcggcaaatccctggcggaaatcctggttcatgcgcatgattttgggcaaatcggcttcagtgagccgccgaaattgtacgcgcatcgtatcttactcctttttgtttttctataggtattttagcaggaaaatggatcctgtgcaagatagagattcataaaatcttcgcgcggcagggattcgctattgccatttcccacaaattgcggtatgatgatgcgggaggtgatgcgaatgcagcttacgctgaatggagaatggaagctgtattaccatccgcaagaagaggccatgccgcccatcgaggagtggccagccatttccgcgcgcgtgccgggcgaagcggagctggcactgatggaagcggggatagagccagatcctttttatgacgagaacctgtatcgttatcgaaaatatgaaacctatatgtgggcctatgaacggacgttttgcgttccggaaacgcgcgaagcctggcaatggattttgcgctttgaaggtatcaacacctatgcggatgtctatgtcaatggaacgctcgtggggcaggcggacaatatgctcattgcccacgagttcgacgcgacgcgtgccattcgccagggcgaagaaaatgtcgtgcgcgtggtgatccgttcggcccagttggaagcgagaaagtgggattatccggtggcgctttccgcggaagggctgggggactacgtgtggcaaagaaagccgccgcattcctttggctgggacattatgccgcgcctgccctgcgcgggactttggcggggcgtggcgctggaaagccgcggtcgcgcgcggattgcgcaggcgtattacgccacgcgcgagtgcgacgcgcatcgcgcgctgctgcaatttgcctatcgctatgagacgcgggacatttccctggaaaagtatcgcgttcgcattacctgcggggacaccgtgctggaaaaggcggcgccattcgtcagcggaagcggcgggttggcgttggaaaatcctcgcctgtggtggccgcgcggctatggcgagcaaaatttgtacaccattaaaatggaacttttgtgcggcgaggaagtgctcgatacgcgcacggacaccattggcatccgcaaaattgttattgaacacaaaatgttgccggacgacgcgggagaattcctcgtgcgcgtcaacggctgccccattttgtgcaaaggatcgaattgggtgccgctggacgcgtttcacagccgggacgctgcgcgctacgcgcaggcgctggagctttttgcgcaggcggggtgcaacattgtgcgctgctggggcggcaacgtgtatgaagaccaggaattcttcgatttgtgcgaccggctgggtttgctcgtgtggcaggatttttgcatggcctgcgccgtatatccgcaatcgcgggattttgcgcaaaagatggagcgcgaagcggagcatgtgatccgcaagctgcgcaaccatccctgtattttgctctgggcgggggacaacgaagtggacgaggtgtacgacggcctgggctacgaggcggacaaccgctacaatgccatcacccgcgaagtgttgccgcgcgccgtgcgcatgaacgatccataccgcaaatttttgccctcttcgccgtatatcgcgatgggcgtgccgcgctattccgtgccggagcagcacaattggggcccgcgcggctacttcaaggatgagttctacaagaacacccgcgcgcattttatcagcgagtgtggataccacggctgccccgcgcccgaatccctggcgcgctttttgccgccggagcggttgtggccctacacgaattcttcctggatgacgcacgacaccgattatttgccccatggcgtgcgcgggtacaaccgcaaccaactgatggccgatcaggtgcaagtgctctttggctcggttccggagacgctggaagaattctcgctcctttcgcagatttcgcaggcggaggcgctcaaattctttatcgagcgcacgcgcatccacaaatggcggcgcacgggcatcatctggtggaatatgctcgatggttggccgcagatttccgacgcgattgtcgattattattttcacaaaaagcgcgcctatcaaacggtttgccgcgcgcagtggccggtgctgatcgcggcggacgagcacgccggttgggaacacgcgatttatcttttgaacgacgggcgcgaaagctacgaagtgacctatgtggtgaaggacggcgatacgggcgaagtgctcctttccggggcggaacgctcgccggccaatgaaaatctgcgcctcggcgcggtgcgggtgattcccgccagccgccggttgctcgttttcgagtggcagatggaaggaaaaacgtatggcagctattacgttaccggcttcccgccgtatccagtggaaaattggcggcggtggctcggcgtcatcgacgcgctgcccatgggggaaaccgtatgaaaccgttgtattggggattggatattgggggcacaaagtgcgcgctcgtgacgggcacggaggattgccaggtgctttcgcgctgcgccgtggcgacggcggattttgcctcctggcagagtctgctcgaagcgctgctggcccaagcaccgcaagaagcgccagcggcgatcggcgtgagttgcggcggcccgctggatagccgcaatggccgcattctttcgccgcccaacttgccaggctgggacgatgtgcccatcgtggaatggctcaagagccgcgtgggcgcgcccgcctttttgcaaaacgacgcgaacgcctgcgcgctggcggaatggcggtttggcgcgggcaaggggtgtgagaacatggttttcctcacctttggcacgggatttggcgcgggattgattttggatggccgcctgtattccggcacaaacgatatggcgggcgaagtggggcatgtccgcgcggcggcggacgggcccgtgggatacggcaaagcgggctcctacgagggcttctgctcgggcggcgggattcgccagctcgcgggcggcgtgagcgccaaagaggccgtcgcgcgcgcggaagcgggcgacgcgcagatgcaagccgtgctggagaagagcgcgcagcgcctgggcgcgtgcctcgcgatgctgatcgatcttttaaacccgcaaaagatcgtcatcggcagcatttacgcgcgcgcggaaaaatggttccgggagaccgcgctgcgcgtgatcgaagaggaggcgctcatatatccgcgccaggtgtgctccattgtgccagcggccctgggagacgcgattggcgatgttgcggcgctcagcgttgcgattcatggacaggagatgggggcgtgaaggacgtgcatgcaaattttgaaaaggctgtggaactgttgctcgactgctttcgctcggggcataagttgctgctttgcggcaatggcggcagcgccgcggattgcgcgcatattttgggggagttggtcaagggcttttgccaaaaacgcccgctgcgcgcggaactcgcttcttcgattggcgaggattgggcgaaagatttgcagcagggcttgcctgtgatcgaccttacggcgaactgcgcggtcatctccgccattgtgaatgatatcgatggagcgtccatgtttgcccagcaggttatcgcctatgccgcgccgggcgacgtgttgatcgccatatccacttctggcaacgcggaaaacgtgcgccgcgcggccgttgtcgcgcgcgcgaagggcgcgaaggtcatcggtatgaccgggcaaacgggcggggcgctggtgcggcattgcgatcttttgctgaatgtgccgcaaacgcagacgtatctcgtgcaggaacaacacttgcccctgtatcacgcgctttgcctgcgcgtggaagacgcgctgtttgcgcaatgagaaaagggtataacggctcgcaaaaaggcaaattctaatcccaaaatgggagggatttgcatgaaacgatccatttgcgaggttcgcggccgggaaattctggattcgcgcggctggcccacggttcaggcgcgggtcacgctggaggatgggagcgtgggcacggcttcggcgcccagcggtgcgtcgacggggcggtttgaagcgctggaactgcgcgatggcgacccggagcgctattccggcaggggtgtgcggaaggcggtttcccatgtggaaggcgaaattcgcgcagcgctcctgggggaggacgccggcaataccgcgcgcgtagacgcgattctttgcgcgctggatggcacgaaagataaggcgcgcttgggcgcgaacgcgattttggcggtttccctcgcctgcgcgcgggcggcagccgtttccctgcgcgttccgctctatcagtttctgggcggggtcagcgcggatacgctgcccatgccgatgatgaacgtgctcaatggaggcgtgcatgcggacaacggcattgacgtgcaggaattcatgctggtgcccattggcgcgcagtcgttttccgatgccgtgcgctggtgcgcggaagtgttccacgcgctgcggggcgtgttggcggagcaggggctgcacacggccgtgggagacgaaggcgggtatgcgccgcccatttccagcgacgaggcggccatcgagcttttgcttaccgccatcgaacgcgcgggataccgcccgggcgaggactttgccattgcgctcgatgccgctgccagcgaatgggcaggcgaagcggattaccggcaacccaagagcggcgcgcgtttttgcgcggacgcgctcattgaacgctggcagggcctcgcgaagcaatatcccattgtttcgctggaagacggattgggcgaggaggattgggacggctggcgcgatttgacaaagcgcctggggaaaagcgtgcagcttgtgggcgacgatctgtttgtcaccaacgaaaaccggctggcgcatggcgtggagcgcggctgcgcgaacgccattctcatcaaacccaaccaaatcggcacgcttacggaaaccatgaacgccatccgcgcggccaagcgcgcgaattacgcggccatcgtttctcaccgttcgggggagacggaggacgcgttcatcgcggatctcgccgtggcgctcaatgtgggccagatcaaaaccggcgcgcccagccggagcgagcggtgcgccaaatacaaccgcctgctggaaattgaggaagaattgcaaaacggggcgcggtacctgggccgcaaagccctgcgcgtaaagtgaaatggatggggcgcctttctgagttgcaggaaggcgctctgtcatcgatatgcgcaaacattttttttcaaaaatcgggaggtttggggctggaatttcccgcaaaagtgtggtatgcttatcatgaatgtgtagcgcccattgggtgcggtaaaagtacaatgcaaggggtggaaccgaatggaatatggtctgcaaatgtactctgtgcgcgacatcacgcaggagaatctcgccgacgcggtcgccaaagtggcgaaaatcggctacaaactcattgagttcgcgggctttttcggcaacagcgcggacgcggtgaacgctatgctgcgcgaaaacggggtgcgcgtgtcgggaacgcattcttcgctgaacgatctggtaaacgattatgaagcgacgctcgccttccataaggcgattggcaacgcgaattacatcattccggggcacgatctttctacccgcgaaaagctggatgctttcatcgagcaggtcaaccgcctgcagcccatgctggaaaaagagggcattgcgctggggtatcacaaccatgaccatgaatttaagcccaacaacgatggccagatcatttatgacgagctggtgaaacgcacgaacctgtggctggaaatcgacaccttctgggcctatgccggcggcaaggatcccatcgcgatgatggaggcgctgaaagaccggctgcgcttcatccacatcaaggatggctttgccaaccgcgaaggcgcgccgctggggcagggcaccgcgccggtgaaggccgtgtacgccaaggcgaaggccatgggcatcccgatgattgtggagagcgaaacgctcaagcccgacggcctcaccgaagcgcagatttgcttcgatttcctcaaggcgcaggaatagagccgggtgaagaaatgcgcaaccaccggcctttgcactggctggtggttgcgcgctgttaaagggaaaaattgcctgttacacttcgcgctgtggcgggtatactattcataggcaaatggttcgccaaggggattccgcggcgcgccaatcgtgccaatttaacaatataagcaaaagagattttcgttctgaacacaaggattcgttccgcgtggaagccgaaaacgcataagcacactttttgtgcgccgttttccgcttcccgcgattggcagggagcttttttatgttgggagggagcacatggaaacgcgcattgcggtgatcagcatgattttggaaaacgcctcctgcgcggagcgggtgaacgccatattgcacgaatatggcgagtgcgtcattggacggatgggcattccgtaccggcagaagggcgtacacatcattagcgtggcggtggacgcgccgccaaatgtcatcagcgccctttcgggcaagctggggcgcattcagggcgtgagcctgaagacggcgtattccgccgcgcagggaggcgaaccatgcgcgaaatcgtagaccgcttgcgccgggagcggaacttaccccgcgcacagatgcgcgatttgctcctgtgtgaggacgctgcggccctggaatacctccatgcccaggcgcgcgcggtgcgcgaggaagcgtatggcagggatgtgtatattcgcgcgctggtggaatttacgaatttctgcaagaacgattgcctgtattgcggcatccgccggagcaaccatcgcgcccagcgctaccggctgagccaggcggacattctggcctgcgcgcaaaagggatacgcattgggtttccgcaccgtggtgctgcaaggcggcgaagatccccatttcaccgacgcgcgcctgtgcgccatcgtgcgcgatattcacgcgcttttgccggacgtggcgatcaccctgagcgtgggcgaacggccggaagagagctaccgcgcgctgttcgcggcgggggccaaccgctatttgctccggcacgaaaccgcgaacgcggcccactatgcgcagttgcatccggcggaactgtcgctggagcaccgcatgggctgcctgaaggcgctcaaggccatcggctttcaaacgggttgcggctttatggtcggctcgccggggcaaacggtggagacgttgctggacgatctggcgttcaccgccgcgctgaatccggaaatggtgggcctcggcccgttcattccgcacgcggatacgccgtttgccgcgcagccgcccggcacggtggaacaaacgctgaagctgctctccattgtgcgcctgatgttgccgcgcgtgctgctcccggccaccaccgcgctggccacgctcgaccccatgggctgcgaaaagggcatgctcgcgggcgcgaacgtggtgatgcccaaccttacgccgcccggcgcgcgggaaaaataccaattgtacgatggcaaagccgtatccggcagcgaggacgcggacgcgctggaagatttgcgcgcgcgcatgcgggccatcggctatcaaatcgttacggatcgcggggattaccgccccgcgccttaacgcataaaacactgacggggaaggaaaagcgccgcttttgcctgacctgaaagaaaggaagaaaaaacaatgtacgatcccaaatccatgaaggcggaagaattcatcgaccatggcgaggtggaggccacgctggcctacgcggacgccaaccgcaacaatatgcccctgatccgcgcgatcctggacaaggcgcgcgagggcaagggcttgagtcaccgcgaagcttccgtgctgctggcctgcgaagacgaggatgtgttcgccgaggtttgcgaactggcccgggagatcaagcgcaaattctacggcaaccgcattgtgatcttcgcgccgctgtacctttccaattactgcgtgaacggctgcgtctattgcccctatcaccaccagaaccatcacattccgcgcaaaaagctcacgcaggaagaaatcgtgcgcgaagtggtggccttgcaggatatggggcacaagcgcctggccatcgaatccggcgaggaccccgtcaacaatccgctggaatacatcctggagtgcatccagaccatctattccattcaccacaagaacggcgcgattcgccgcgtaaacgtgaacatcgcggccacgacggtagagaattataaaaagctcaaggacgcgggcatcggtacgtacatccttttccaggaaacgtaccacaaaaagagctatgaaacgctgcatcccgtgggcccaaagcacaactacgcctatcacaccgaagccatggaccgcgccatgcagggcggtatcgacgacgtgggcctgggcgtgctctatgggctggaactgtaccgctatgagttcgccgcgctgctgatgcacgcggagcatctggaggcggtgttcggcgtggggccgcacaccatcagcgtgccgcgcatcaagcgcgcggacgacatcgatccttcgacgtttgacaacggcatcagcgacgataccttcgccaagctctgcgcgctcatccgcatcagcgtgccctacaccggcatgatcgtttccacgcgcgagagccaggcggtgcgcgagcgcgccattcaactgggcgtttcgcagatcagcggcgcttcgcgcacgtcggtgggcggctacaccgaggacatccgccccacggataccgagcagttcgacgtttccgaccagcgcacgctggacgaggtggtgcgctggctgatggaaaacgggcacattccctccttctgcacggcctgctaccgcgaggggcgcacgggcgaccgcttcatgaagctgttgaagagcggacagatccacaa

SEQ ID NO: 4444 - DNA, 2955 bp, Unknown
  16S sequences of unknown bacteria
ggtaaaatttttaaagggaaaaaggaggagaaaataccttctaaaagttattttctctttttattggtgaaggcgaggattttttcggtgtttccgaaaatcaccatatgatcgccgtcgtcgaagacatactccgcgtcgggggaagtgacgatcttccttccctttttgatggtgaggatattgatgccgtactttctgcgcgggttgacgtctacaattttctttctgtaccattccgtgggcactgcgatttcgaagatcgaatattccgcgtccagctcgatatagtcgaatacttttgcggaattgagcttcaccgccaatttttccgcgatatcgtggtcgggatacaccacttcgtccgcgccgttgcggagaaggaatttgcgctggatttccgtggtcgctttggatactacgtatctggcgccgaggtctttgagaatggaggtgatttcgagagaggactgaaaatcatctccgatcgccaccacgcagacgtcgaaagagggaatatccatcgtgcgcaaattgttttcgttcatgcaattggcgatcagcgcattcgtatatttgggcgcgagcgtattgacgatgtcctcgtttttgtccacgatcatcacttcgtcgcccatattgagcaatctttctccgagcgtctgcccgaattttcccataccgatgagtaaaacggatttcataatatctccttgacgacccgtttttgaaagggtcaaaaatattcaaagtcaacgcaagggcttaacttgccctcgattcgtttctcttggacggaaacgttgcgcggaacggacgaatgcgttttttgtgtccctttccgccctttcctaatccgcgcatcgtttttgccgcagaatatagaataaaaaatgtttggcgatcagccgatcagcagagtatcgagcggctttttcacttccgaagaggtgcggctttctccaagcgccagcgccagagtcaggattcccactctgcctgcgtacattagcagcatgatgatcaattttgacgccgtggagagcacgggggtcagggacagactcaggcccaccgtccccagcgccgataccgtttcgaaaagcacttgtcggaaagaggcgatggggtctggctcgatggcgcagataaggagggtcgcggtcatgacgaggatcagacaggacacgaagatggcgagcgcctgattgacgagggaatattccacgcgctttttgccgatggtgatgtctttgcggccgcggaataccgcgatcatccccatcaagatcaccgccatggtgctgatcttgatgccgcccgccgtcgagccggagctgccgcctatgaacatgagcataatcgtcaaaagatagccgctgtccgagagggaatttaggtcgatggtattaaatcccgctgtgcggggagtagtagcgttaaagaaagacaccagccatttttctcccatagagaaatccgcataagtgggattgttcctttcaaagaagaaaaagagcagcgtggaaaagaccagcatcaacgtatttatcagtacgataatctttgtgtaaaggctgaacttttttacgttccccttgctgtccacgatatccccccagacgcagaaaccgagtccgccgatgatgataagaccgcaaagggtaagagatacgacgggatcggcggcatagcgggtaaaggaaacgaatgtatcgccgccgaaggtcccgcccatcagatcgaatcccgcgttgcaaaaagcggaaaccgaatgccacacggcataataaatgccctttgccgcgccgaagtcgggaataaagcgaatggaaagcaatatggctccgcagccctcgaaaatgcccgtgccgataaagatacggcggataagacggcgtatgccgctgagtttccattctcccgccgactgcatgaaagccttgcgttcgtaaagacccatattgcgtttcagcattccgaaaagcacggaaacgaaggtcataaagccgagcccgcccgtctgaatcaggagaatgatgacgacctgcccgaacaaactccaatgcgtattggtgtcgtaggggacgagtcccgtcacgcaggtcgccgaagtagacgtgaatagggcgtttacgtaagaagtggattggccgtccttcgtcgcaaagggcagcgtcagcaaaaggctgcccaaaaagatgacggcaagatatcccagcgataggaactgccagacggtcatttttgtttttgatttcaatttcatatagatatctcgaaaagagggcgcttggggcttgaacgccgggaaggggaagcggactcggaaaatgttaggggtattgtagcacattccttcggctttgtcaaacgcgtttaagcgacctaaaaaaataaagaagaaaagctttggggaggaacgaaaaaattattgacaatcgggataaaaggcgatataatgaaaaaggtttcttaaagaaaagatcgtgcgtcggaaattttagagaagcttcaaatcgctgccgatattttttagaacggaattctataaaaattaaagtttttatagaagtgcggcaaagcgatcataacgaggcgggcttgaaaagtaggcggctttgtctttgttttgtctttgtcggaaaagccttgattttggcgaggttgacggggggatgcagggcgagggaaggatagttcgcagtttttccgcgattgtattttaacgtaataattttatgcagagatggtagagaggtcgattacggcagtcttgaaaagtaggcctttgcgttgcggcggattttcccgatgtcgctgtttcagcggattgtacggagagttttgtgcagtttggggagagggcaattcgcagttttcccgcgattgtatattagcgtaataattttatgcagagatggtagagaggtcgattacggcagtcttgaaaag

SEQ ID NO: 4445 - DNA, 15502 bp, Unknown
  16S sequences of unknown bacteria
gcgcaaaaaccttgcacctgaacaattcaaaagtttacaccgacatgctcgggttaaggtacttttgaattcttcggcaggcattaattaattcggactttgagaatgccgtaaatccgcatgagtccgatgtaataaaagctccgctgcaggttaaagctttttgtctgcagcggagtttttgtattatttgcggtcaccggatacaatgctgagggttctgcagggcgcagctgtcggcagcttcggcttttataatgccgcttatatcatcagccgagcacagattgtggtagtataatttattcattttatcgcttgtacacagcatataggcttgctttgaatgctctaacattttaagtcttaccaagttttcgggctgtgaaatatcggttagcctgccgtcttcggatatacctctgcaggcgaaaaagcaaaagtccgcattgtagtgttcaatagtcctgtgggcttcctcacctacaaaggcaaggcaggaatttataaccccgccgcccgtgcctatgcaggaaatattattttcgctcaaggctgtgagggttttaattccgttggttataacaatgagatttcttttctcggctaaaaacggaatcataaaataggcgcttgtggaggcatcaaggaaaatcacgctttcgtcttctacaagctccgccgcaattcgtgcgattttaattttttcgtcgcttttttcaagctctcttatcaaaaacggaattttgatttcgttaagcgcgttttcgttaagcaccgcgccgccgtgggtgcgtttcagcaggccttgcttttcaaggctgcaaagatctcgccttatagacggctcgcttgaatatagcctttgcgcgagatttttcaccgtaacggctttttctttaattgcaatttcaagtatgcttttttctctttctttgttcatatcaaactcctaatgctcaatcttttgattgtttaatcattttctgcggcggttattgattgttcgcttataaaggtatattatatcatatattaaaatttgtcaacagaggaatgacggatatgcttgcaaataaaatttttgattgccacacgcatacgcatttttctcacgattccgaatgtgacccgtatgacagcttaaaggcagcaaaggaaaagggtattgcggggtttgcgattaccgaccactgcgatattgaattttgcggcgacagggatgtaaaaacgcctataaaaaagtcagccgtttgcgctcacgaaatgggggacggtgtgcttgtgggggttgaaataggtgagggaatatggcataaaaaagacgctgaggaagtgcttgcgggcagcgatttcgatattgttttaggctcggttcacgctgtgaggtacaagaattatacacagccgtattccgtgatagatttttcttttctttcgcaaaacgaaataaacgaatacatttccgcatattttgacgatatgcttgaaatgattaaaacgacagattttgacgtgctttcgcaccttacctgtcctttgagatacataagcggaaaatacggaatagcggtggatttgaaaaattttgccgataaaacggatataatactgaatgaaataataagccgaggtgtcgctctggaaataaatacatcctgtcttgatacggattacaatgttcttatgcccgatataccgataataaagcggtataaggagcttggcggttatcttttaaccttggggtcggacgcgcacattgcaaagcgcatagcgcacggctttgattatgccttaagcgagctttcaaggctcggctttaaaaatatttattattacaaaaaccgaaaacccataccgcaggagatagaattatgagatacgatattacggctttaggcgaaatacttatagattttacgccgtccggcagggactcggcaggtgaccttatttttgcgcgaaaggcgggcggcgcacctgttaatctgctggcgaccgtttcaaaattcggcggaaaaacggcgtttataggcaaggtcgggaacgatatgttcggcagctttctgcgcgaaacgcttaaaaacgctggcgtttctgacgaggggcttataaccgataatttgcacaacaccacccttgcgtttgtggcgctgaacagcgacggagaccgcgatttcagcttttaccgcaatttcggcgcggatgtttttcttgaaaaagaggatataaaggcggacattataagaaattcgcggatattccatttcggctctttatcgcttacggcagagcctgcgcgcagcactaccgaatatgcgcttgatattgcgaaaaaagcgggctgtactgtaacctacgacccgaattacagagagccgctgtggaaagacaaagcaaccgcaatagagatgatgaaattacaccttgataaggtggatattcttaaaatcgcaaaggatgagcttttaatgctgttcggcggaaatgaggaaagcgcggtaaagacggtattttcttacggagttaaaataattcttgtgaccgacggcgcaaagggcgcggcgctttatatgaaaaacgcgcatatagctctgcctgcagaaaaggtaaacactatagatactacaggcgcgggggatatattcttcggaacatttttaagcgaatggataaataacaaaagcactgcctacaatatcacgcccgaaacggcggaaaaataccttaaaaaagcaatttatgttgcgggcaaaagcaccgaaaaacacggcgcaatcgccgcattaaaggagatatgacaaaatgaaagcagcggtattttacggaaaaaacgatttaagagttgaggaaagagatgtgcccgaaatcggcagaaacgatgttttggtgcgcgtacacgcctgcggaatatgcggaacggacgtacatatattctgcggcgatgagggcgccgcgcccacgcccgaaaacacggttttgggtcatgaatttgcgggcgaggtcgtaaaggtcggagcagatgtaaagtcggtagctttgggcgacaaggtgtgcgtagaccccaataagctttgcggcagctgcgagttttgccgcaggggaatagggcatttctgcaccgatataacaggtatcggcacaacggtggacggcggctttgcggaatactgcgccgtacccgcttcacaggtttataaggtggcggacagtctttcctttgagcaggcggctatgaccgagcctgtttcctgctgcctgcacggaatagagctttgtaatatcaagtgcggcgatactgttacggttataggctgcggaatgatagggcttataatgctgcagttggcaaggctttcgggcgctgcaaatattatagcgattgagcctataaaggaaaagagggaacaggctttaaaacttggtgctgacatagcgcttgaccccaaagcggataatatttcggaaattcttaaaaagcagggcttagatcaggtagatgttgtaatagaatgcgtgggcagacccgaaacaattgaacaggcaatagcccttgcgggaaaatattcaaccgttatgatgttcgggcttacaaagcccgacgccgaaataagcgtaaagccgtttgaaatattcaaaaaggaaataaccttaaaatcgtcctacataaacccatatacatttcccgcggcaatcaagcttattgaaagcggaaagttagatgtatcatcaatgatttacaaaacagagccgcttgaagagctgccgagcattttggcggacggtaaaaggcggggcgccggcaaatatattataactatgtgaggtgcagtatgaatataattgaagctttgctgcggtcaatcgcggcggtggtaataggcactcttataggcagcgagcgtatgcggcacggcagagcggcgggtatgcgaacgcatattttagtctgcctcggctcttgtatgacgagtatgacaagtatgtacgttgcgaatatgttaggcaataacggcgacgttttcagaatacccgcacaggtggtatcaggcataggctttttgggtgcgggaatgataattcttaaaaacaataatgttataaccggtcttacaaccgcggcgggagtgtgggctaccgccacaataggcgtggcgctcggttacggcttttatgtcggcgcggtaattgtaacgctgttgtttctcggcacaataatactgtttgcaaaatttgaaagaaaaagaaaaagcgccgaggttatatatatcgaaatagacgatttatataaggtcaacgcggttttatcaaggctgcgcgaggtaatccccgaaagctttacataccagattttcgccccgaaatccgagaaaaacgggaatatagggatgaacattgtgatagataaacgtattgattttgatatttcgtcgctttgcgatattgaaaatattgcgtatgcgattgaggacaattaaagcattatatcgcaatcaatataatggcggctgaatattgccgaaattcttttgaaatattccgataccgcccgccgagcaagattaaatggcagccgagacgctgacaccgtaaggcggctgaggaattgtcagtgactgaagcttatttgcaaattatggactaaaaatgcataagataacctatgaaatgaattagctttttaatcaacttaagcctttgacaacccctccgaggcggattcccgccccacctccccttacacaggggaggcagcggattgtacaaaacatatggattgtttatattactcagaatagaatttttcggcgcagcgcaccgattccatagcgtcgcggccgtagtaatcagcgcctatcatatcggcgtattcctgtgttaaaactgcgccgccgacgatggtttttattttcgggtcggcctttttaagctgctttatagtttcctccattgatgggacggtagtggtcataagggcgctcaagcccacaagacggcaattttcttcaagcgccgctttgactaccgcctcgggcggcacatcgcgtcctaaatcgcacacggtaaagccgtagctttcaagcattaccttgactatgtttttgccgatatcgtgaatatcgccctttacggtggcaagtattacctttctgtcgctgctctcagacttagggggcagcttttcttttatgacttcaaatgctgcggacgccgcttcggcgctcattaaaagctgcggaagatatgcctttttgttttcaaaatcgttcccgacggtatcaagcgccggaataatgtaattattgattatttcaagcggcggagtattttccgcaagctcatgcgccgcttttacagcctgctcgcggagaccctttatcactgcggctttaagccctaaggcttcacctgcggtcacggcggtatcggttattcccgcggcataggatatatattcggcgcaggaggcatcgcgcccggtaagggcgttaaatgcataatatgcgttaagcataccctccgcaaaggggttcattatcgcacagtcaagccccgcgcagagtgcggcggtaaaaaaaacggaattgaccgtttcacggtggggcagaccgaatgaaatgtttgatacgccgaggcttgtgcggattccggcgtttttaagcattttaaccgtatcaagcgtaatatttgcgctttcctgatttgaagagaccgtgagcgctaacgggtctgcgacaatatccttttttgcaatgccgtattcggcagcccttgcaattattttttcggctatcgcaaagcgttcggcggcggtttcgggtattccgttcttatcaagagtcagtgcgattaccgtgcctccgtattttttaacgagagggaaaacgctttccatgctttcttcatcgccgtttaccgagtttactagcggcttgccgttatatatcctcattgcgccctccaaaacggcggggtcggtggaatcgatctgcagcggcagctcacagaccgcctgcagctgcagaacggcccttatcatcatttccttttcgtctatttccgggagacctacatttacatcgagtatatgcacgcccttttccgcctgcgaaagcccttcgtttacaatataggggatatcgtttcttctgagtgcttccttgaatttcggcttgccggtggggttgattctttcgccgataagggttggctttttgccgccgacctcgtgagcgtgagtgtaggaggaaacaagggtgtaatttttttctgttatattaagcggaatatccgcggttttttcaactgtttttttaatgaattccggcgttgtgccgcagcagccgccgagaacagccgcgccggaaacggcaattttccgcatacagtcggaaaaagcctctgcgtttatattgaattcggtcttgccgtttttagtggacggaagacccgcgttcgggtttacgatgacaggaacggaggaatatttgcaaagctgctccactacaggaagcattttatcaggccccaacgagcagttaacgccgagcgcgtcaacgccgagtccttcaagcagagcgaccattgccgcagggtctgcgccggtcattaaatgcccgccttcatcgtaaacatttgtaacgaatatcggcagcgaggagttttcctttgccgctaataccgccgcctttgtttcgtaggcgtcgttcattgtttctattaaaattaagtctgcgccgttttttaccgcctccttaacattggcggcaaaaagcgcgaccgcgtcttcaaaggaaaggtcgcccagcggctctaaaagtctgccgcagggtcccatatcataggcgataaatttatcttttctgccggttaccgctttttttgcgcaaccgattgcagcggaaataagctcgcggtaatcggcaaatttatcacggttaataccgaaggtattggcggtaataatatcgctgcccgcgtcaagataagccgcgtgcagcgaggttataacatcggggtgggttatactccaccgttcgggggcttcgccgggcagaagcccggcagcctgtaaaagtgtgcctgtgccgccgtcaaaataaaatctttttttacgaataagttctgttatcataaatcttcatcctttcggcggcaggagttttaattaatatgcaacaccctgtgcgagcattgcctcggcaaccttttcaaagcccgcaatattagcacccgcgagcagattgccttccatattgtatttctttgcggcattgtaggaattgtggaaaatattaaccataatatccttaagctttgcgtcgacctcatcgaatgtccagctgtagcgcatggagttttggctcatttcaagcgcagaggttgcaacgccgcccgcgtttgcagcctttgcgggtccgaagagaatgcccgatgattggaacacttcaatagcctcaagggtcgaaggcatgttagcgccctctgcaacggcggtcacgccgttcttaacgagaatctttgcggattcttcatcgatttcgttctgtgtggcgcagggaagagcgatatcgcacttgatcgtccaaatgcccttgcagccctcgtggtattcggcgccgtctacacgctcggcatactctttaattctgccgcgctcaacctctttaatctgcttaacaacatcgagctttatgccgttcgggtcgtaaacatatccgtttgaatcggaaagagcaacaaccttgccgcctaattgtgtagccttttcggtagcgtaaatagcaacgttgcccgagccggaaattacaacggtcttgcccttgaaggaatcgttcttcatgcacttgagcatttcctcggtgtagtagcaaagtccgtagccggtagcctcggtgcgtgcaagcgagccgccgtatgtaagacccttgccggtaagaacgccggtgaactcgttgcggagtctcttatactgaccgaacatatagccgatttctctcgcacccgtgcctatatcgcccgcgggaacatcggtatccgcaccgatatgctttgaaagctcggtcataaagctctggcagaagcgcataatttcgccgtcggatttacccttggggtcaaagtccgagccgcccttgccgccgcctatgggcagacctgtaaggctgtttttaaaaatctgctcaaagcccaagaatttaataaccgatgcattaaccgaggggtgcagacggatgccgcccttgtacggcccgatagcggaattaaactgaactctgtaaccgcggtttacctgaaccttgccgttatcgtcaacccaggaaacacggaagaaaatctgtctttccggctcaactattctttcaaggatgccgttttcctctaacttcggattagcggctacaaccggctccaatgagcctaaaacctcgcgcacagcctgcaaaaattccttttcgcccgggctgcgcttttcaacgccttcgtatactctgtttaagtattctgatttaaacatttatagacctcctataatttttttcgtatttaagaatactactaaaatgcgccccagtcaataaaaaattaagtcctaaaagtaaatttttttgcatttacggtgcatatgctttgaaattgtgaaaaaatatgctaaaatataaaaggtgatagaatgaaaaactttgaatatatacttttcgatctggacggaacaataaccgattccgcaaagggaattaccgattcggtaaaatacgctcttgaaaaaatgggagagaaaataccgccgtatgaaacgctttgccgctttataggcccgccgcttaaaactggcttttccgagttttgcggtatgagcgacgaagcggcggaaaaggcggttgaatactaccgcgaatattaccatgttaaaggcgtgcttgattgcgaggtgtatgcgggaatacccgcgctgcttgaaaagctgcaaggtgcagggaagagggcggtgcttgcaacctcaaagcccgaaaaatttgcgaaaatcattctggagcatttcgggctgtcgaaatatttttattttataggcggcgcaagctttgacgacacgcgcaatgaaaaatatcaggtaatagaatacgttataaacgcctgcggcataaaagacaaaacggccgccgttatggtgggcgaccgttttcacgatatagagggggctaaatttaacggaatagcgactgtcggcgtgctttacggcttcggaaacagaaaagagcttgaaaacgcgggagccgacgctatagccgaaagcgtttcggcgcttgaaagcattctgctttaaaaatttataatgtctaaatgctcaagcagaatttttatacctattaaaataagtattattccgccggcaatttccgccttgcttttgtatttcagaccgaaaacattgccgaccttaagccctatgcccgaaataataaaggttatggcgcctataaagcacactgcagctataatatttacattcggcagcagtgcaaaggttatgcctacggcgagcgcgtcaatgcttgtagcaaccgccagcaccgccattgccgatacgccgaaggacgaatcggtggtttcggtgtcctttgaaaagccctccttaagcatatttccgcctataaacgagagcagcacaaaggcgacccagtggtcgtaccttgttatatatttttcaaaggttgagcctaaaaggtaaccgatagtgggcataagcgcctgaaaaccgccgaaccatgcgccgattattaaataatgcttcggcttcagctgccgcgtggacagccccttacataccgaaacggcaaacgcgtccattgaaagccccaccgcaattaagaaaagctcaacaatacccataaaaattacccccgataaaaaaagacccgtgtgccgcgcggcaccgagtctcgttatttaatacaagccgggcaataaatgccgatatgtcgacttgcaacgcgctttatgcgcgccactactccctcaagtcattaagatattaacacatcggtttgcttttgtcaaggaaaacagcatggcggcggcaaaaactttaaatttcctgccgctcactattgacaaaaatcatatattcatgtataattgtatacaatgataccgacggagggtgaatacattgcttgaaatatcgggtaaaacaaatttacttgaacaggacaattacaaatattccttacaggatgtggctgagccgaacctgtacagggatttttatacatatgaggatgtgccgcgagttgcgtttaaccaccgcagagtgccgatgggtatgccgaaggatatttggataaccgacacatcattacgcgacggtcagcagtcggttgagccgtacacggttgaccagatcgttaatctttacaagcttatgtcgaaattgggcggaccttacgggattatccgccagaccgagtttttcgtttacagcaaaaaggaccgggaagcaatcgagaaatgccagtctttggggcttaaattccccgaaattaccacttggatacgcgccagcaaggaagacttcaagcttgttcgcgaccttggaatcagagaaacgggaattttggtttcctgcagcgattatcatattttcaagaaacttaaaaagacccgcggcgaggctatgaaaatgtaccttgaggcggtatcggaagcgttcgaggcgggcgttatgccgcgctgccaccttgaagatattacaagggcggatttttacggatttgtggtgccctttgtaaacgagcttatgaaaatgtcgactcaggcaaagatacctgtaagaataagggcgtgcgatactatgggctacggcgtgccgtaccccgaggttgcgcttccgcgcagcgtgccgggcataatttacggcttgcagcattattcggatgtacctagcgaaatgctcgaatggcacgggcacaacgatttttacaaggcggttgcaaacgcctctaccgcgtggctttacggcgcatctgcggtaaactgctcgctgctcggcataggggagagaacgggcaatattccgcttgaagcaatggttatggaatacgcctcgctccgcggctcgcttgacggcatggatacaacggttataaccgaaatagctgaatatttcaaaaaggaaatgggctataaaataccgcctatgaccccgtttgtaggcaaaaacttcaacgttacaaaggcgggcatacatgccgacggacttttaaaggacgaggaaatttacaatatcttcgataccgagaagattctcaatcgcccggcttccgtgtcggtgggtaaaacaagcggacttgcgggaatagcctactggataaaccacaattacggcttaaagggtgagaatgaggttgataaaaaagaccccgcggtaatcgcccttaaggattgggtagatacggaatatcaaaacggcagacagaccgctatatccgacggcgagcttgaaaggcatttaaaagagctgtcggacggaagattttagtttgcctaaggagaaagaattatgattgaacataaaacaatatcccttgcagatcaggtattcgatcatcttgaaaacgatattttaagcggcaaataccggcgcggagaaattctgaccgagagcaaattaagcgcggagttgggagtaagccgcaccccgatacgtgaggcgctgcgccgcttggaacaggaacacattatagaggaatcgggaaagggctctgtggttattggtattaacgaaaaggatcttgaagatatttttatgatacgcaagagccttgaatgccaggttgcggcgcttgcggcgaagaaccgcacagaggagcagctgaagcagctgcgcgaggcgcttgaattccaggagttttacctgaataaaaaagaccccgaccaaataaagctgatggacagccgctttcatgagactctttacaaattgagcggcagcaccgcgttttatgatacccttgtgccgctgcacaagaaaattcagaaataccgccgcgcctctgttgcaaattcaagccgcgcggaggcgtctgttgcggagcaccgcaaaatttacgaggctatcgaggcaaaaaacaccgctcttgccgcaaaatatgcgtcggagcatgttgaaaacgcttacaagcacattatgagaaaggactaataattatgggctacactattgcacagaaaattattaaagcgcatatgctctcgggcgatatgaccgtcggcagcgaggttgcgctgaaaatcgaccagacactgacgcaggacgctactggcaccatggcgtatcttgaatttgaaaccatggggcttgaccgcgttaaaaccgagcgcagtgtggcttatatagaccacaacactctgcaatcgggctttgaaaatgccgacgaccaccgttacattcagtcggttgccaaaaagcacggcatttacttttcacgccccggcaacggcatttgccaccaggtgcatttagagcgcttcggcaagcccggcaagacccttatcgggtcggacagccacacccccacaggcggcggcataggtatgcttgccatgggtgcgggcggacttgacgtggcggttgcaatgggcggcggcgcttactacattacaatgcccaaaatgtacaaggtaaatttaaagggtaaattaaagccctttgtcaccgcaaaggatataagccttgaaattctgcgaatactttcggttaagggcggcgtgggcgccataatcgagtggggcggcgagggtattaaacatctttccgtaccggagcgcgccaccattaccaatatgggcaccgagcttggcgctaccacatcaatcttcccgtctgatgaggttacaaagaaattccttgaagccgagggcagaggagaggattatacagagctttcaagcgacgcggacgcggtttacgataaggtaatagatattgaccttgataacttaaagccgcttatagcatgtcctcacagccccgataatattgttacggtcgagtcgttaaagggcacaaaggtggatcaggtctgcataggctcctgcaccaattcatcgctttttgatatgctgaaggttgcggcgcttttaaagggcaagaccatttcgaccaacgtcagcctttccatttcgcccggctctaagcaggtgctttcaatgctggcggattgcggcgcgctttcagatatattagcaagcggagcaagactgcttgaatgtgcctgcgggccctgcataggtatgggcttttcgcctaattccgcgggcgtatctttacgcacctttaaccgcaatttcttaggtcgcagcggaactaaggacgcaagcgtgtaccttgtttcccccgaaaccgcggttgccgcggcgcttacgggcgaaattaccgacccgagacttttaggcgaagaaccgcagattacaatgcctgccgctttcaaaattgacgacagcgctgtaataccgcccgcaacacccgaagaggctaaggacttagaggttctgcgcgggccgaacattaagcctttcccgaaatcggaaccgcagaccgataccctttcagccgagcttgtgctgaaagtcggtgataatatcaccaccgaccacattatgcccgcaggcgctaaaatattgccttaccgctcaaatataccgcacctttcacagttctgctttgcggtatgtgatgagaccttccccgagcgcgcaaaggcactgggtaagagcataattgtaggcggcagcaactacggtcaaggctcatcgcgcgagcatgcggcgcttgtgcctatgtatttgggagttcgcgcggtcattacaaagagctttgcgcgtattcatgttgctaaccttataaacgcgggaattatgccgcttacctttaaaaaccccgatgattacgataagctcaaccaatcggataaattaacgcttacaaatgtgtttgacggaatgaacagcggtgaaataacgctgaaggatgaaaccacgggcgatgaaataccgcttgtatgctcctttaccgagcgtcagaaagcaattctcaaagcaggcggactgcttgaatataccaaaaaggaaggctgatataaaatggaaaagtacattgaggcggcggttgaacagttccgcacacttttaaacgagcagattgcgcgcgagcgcaaaatggagcaggataagcgctataccgattataaaaagcttgataaaattataatcggtatttgcggcggcgacggcatcgggccgataatttccgccgaatcagagcgtcttctgcagtttattttaaaggacgaaattgcggcgggcaaaattgagctgcgcaccattgaggggcttaccattgaaaaccgcattgcgcacaatcaggcaatacccgatgatgttttagccgaaatcaaggcttgcaatgttattcttaaagcgcccaccaccacgctgaaaggcggcacgcttgaaagcgcaaacgtggcaatgcgccgcgagcttgatttgtatgctaacgttcgccccgtagccgtgcccgagcttggaattgactggaccttcttccgtgaaaacaccgagggcgagtatgttctcggcagccgcggcgtcgaaattcccgataccttggctttcgattttaaggttaccaccaacgagggcacaaagcgcattgcgcgcgccgcttttgagtacgctaagaacaacggcaaaaccaacgttgcaatagttacaaaggctaacattatgaagaagaccgacggcaagttctcagagctttgccacgaggttgcgaaggattaccccggcattaccgccgaagactggtacattgatattatgaccgcgaaccttgtaaacgagcgcgtaagaagcaacttccaggtaatacttctgccgaacctttacggcgatattatcaccgacgaggcagcgcagatacagggcggcgtaggcactgcgggcagtgccaatataggcgatgtttacgctatgtttgaggctattcacggctccgcaccgcgtatgatagaaacgggcaggggagcatatgctaatcccaccagtatgtttaaggctaccgaaatgctgctgcgccacatcggctttaccgaaaaggcggataagctgaataaagcgctccacatctgcaccgaggttgataaaaaatatgttatcaccggtcatgaggacggcgctacctgctcgcagttcggcgattaccttatggcaacgatcgagcagctgtaagatatttccgtcatagcttacgcatgacacccgctgactgcggcggtcaccttttgttgcttctcgacattttcccagcactgcggggtcatcctccacttacacagaggagctgccgacgcggctgactgaggtgtattaatctaatgtccgccgtctaatatctatcgtataaagcataaacctgccgctgtcggttaacagacag

SEQ ID NO: 4446 - DNA, 32759 bp, Unknown
  16S sequences of unknown bacteria
tttgaaaattcatgtatagaataatatttactcaaagcatcaactcctttcaatagtattctaccctaatatcctataaaactcaacatgtaattatataattttataatttatatttatctgttaactgccttcatgccggcattatgttcagccacatacttctatatctcatcatatgtcgccttaatatccgctgatgttacatccatatcatcaagctcatatcgttacattaatgtaatcatctggcttttgtttcagttgggacaaaagaacaaccgtctcaacatgcacgctattcccaaacatatcaaccgggcagcatttttgtaacgcatatccgttctcgcacaagtacttcagatccctggccagggtcgcgctgtcgcagctgacatagacgatgcgcttgggctgcatctggatcatggtggtgagaacgctctcctcgcagcctttgcgcggcggatcgacaacgatcacgtcggctgtgatgccttcggttttatatttttccggcaggacttcttctgctttgccgacgaaaaattctgcatttgtaaagccgtttaaggcggcattttttctggcatcctcgatcgcggcggggacgatctcgacgccgcagactttctttgctctctgcgcgaggaagagggagattgtaccgatgccgcagtagagatcccatacggtttcttccccagtcagtccggcgtattccagtgcttttccgtacagcttttccgtctggagcggattcacctggaagaaagaaagcgacgagatcctgaaacgaaccgcaccgatcgtatcctcaatataaggacggccccacagcaggcgctgcttgcgccccataatgacatttgttttttcggtgtttgtatttaacgtgatgcttgccattcccggaatcctggtcagtgcggtgatcagcgcttcctcgtgtggcagctttgtgccatttacgatgagacagaccatgatctctccggtcgaatggccgacgcgcgtcatgacgtggcgcagcaggccctttccggtctgctcctcgtacggctcgatctgaaactgctccatatgagaaagtaccgtctccagaatttcctgatttacctctgctccaagcaggcagtcctcgcactcgataatcgcgtgggtacggccggcgtaaaatccggcgatcctgcgtccgtctctggaatacccgattgggaactgtgccttgttgcggtagcgaaacggggtgtccatgccgatgattggttccatcggaggattttcaaacttgccgatgcgcatcagattattccgcaccttgttttccttaaaacgcagctgcgccggatagctcatggactggatctgacagccaccgcactggcgcgctaccgggcagcatgcttcgatgcggtccggacttggcacaagcagcttcgtcatccgcgcatagccatacgtcttcttcatcttcataattttggcttccacttcatcaccgatcaccgtatccttgataaaaaaagccatgccgtcgctgtggcccacgcccaggccgtcactgctgagatcttctattgttaccctgatcagatcgtctttctgcattctgtcttctcctgtcctgtttcgtttatacgtcaaaaaaatattcgtaatctgctttcgctgcctgtagaatcataaggatcttcccctcgcttaaaacgtcggaatgcctgtctgcgttcaattttttctacagatccgagctccgtctcagatttgattcaaacagccgattatacccaagccagtcctttgaatcgcctgctcccttgaagatttctttcattgtttccagctttgcgtcggtgttatcggcgaggttcagcgccagcgcctcggcaagtgccggttttttcggagaaccgtactccagctcgccgtgatgtgccaaaatgcagtgctgcagctcgctcatcagacgcttcgggaaatttttgatatggcggcagccaaaacctacgagctcacagcccatcacgatatggccgagcagctggccatcgtccgtataatcgttctccgggaaatttgaaatctccttgagttttccgacatcgtgaaacagggccgccgtcagaagcaaatcttttttgaggtacggatactgttttgtgtaataatcacacagctttacgacaccaagcgtatgctcgagaagtccgcccacgaagctgtggtgcacggtctttgcagcggaatgatgcttaaatgcatcgataaacgcttcattttcgataaagtacatagtgatgagcttctgcagatatggattttctacctgcttcatcagcttcatcagttcctcatacatctcatcaaggtcgcggtcactgaccggaagataatctgccggaatatattcactctcatctgccttgcgcgcccgcttgatactcatctgcagggtgccctgaaaatttgtcacatcaccggtaataaagacgtaatccagtgcctcaaattcaccgattcctgaggaattcggatcccagatttttgcgtcgatcgtgccggtcttgtcctgaagcacgacattttcatatgcttttccattttttgccgtcgccgactgtctgtatttgcagaggtagacctcgctgatcttgtctccctcacgaaatgcctcgatatatttcatattctttttcctctcatttcactgttttagttcaccattttctctttccacaatcgtgtccatccctgtgatatccacagccacgtgctattatagaagattttccaggcatctgcaacctggatttctgcgcacaccgtctcttctactcttccgccagaatctccaacagctcttccctcgtcatcgccgtcgcggaaatgccctctccgctcaagatctggctcgccatctcctgctttttctcctgaagatggagaatcttctcttcgatcgtattctgggcaataagccggaaaacaactacctgatttttctggccgatgcggtgtgcacggtccgtcgcctggttttgcgcggcaacgttccaccacgggtcaaaatggatcacgacgctggctgccgtcagattcagtccggtaccgcctgcttttaaggagatcagaaaaaccgggacatcgtcctcattaaacgcttctgtcaggcgctggcgctcctccttcggtgtactgccggtcagctcatagcatggaatttcgtatgcttccagcttctgcttcagtaccggaaacagactcgtaaactgagaaaagataagcaccttatgctttccatccactgcgtctcgcaccagctccatgcaggcatccaccttgcaggaattttccttataattctcatacagaagcgccggattgcagcagatctgccgcagtctcgtcagctgcgccaggatctggatttttcctttgcgtacttcctcgtcactctgtgtctccagactctgcctcagctgctgcacatgtgcctgatacagctgctcttgttccccttccatccgcgcgtaaacgacctgctccagcttttccggaagctcctttaagacatcctgcttgagacggcgcaggataaacggtgtcacttttcgtttcagccgctgcgtcaccgtctcgtcgttctccagcatgatcggcttttcgtaatttttccggaatttctcgtagcttccaagatacccaggcatcagataatcaaaaatgctccacagctcaccaaggcggttctcgatcggtgtaccggtcagcgcaaaccgcaccccggcatgaatttttttgaccgccttcgcagccgcagttccctgatttttgatattctgcgcctcgtcgatgacttcagtggagaactgcagatcacggtaaaacgtaaggtcacgcttcaccatatcataggaggtgataaacacctgcgcctccccgctttctttttgctgctgcaaaatcgcctcccgctgagcagccgtccctgtcacaagacagaccgacagttccggtgcaaagcgttcaaattcctttttccagttgtaaagaagtgaggtcggacagatgatcagatccgggaaggtgctctctccctcctgacgccttgccagcagggccgcgatcgtctgcagcgtctttccaagtcccatgtcatccgccagaattccaccgaaacgcagatgcgcgagtgtccgcagccaacggtaccctgttttctgatactcccgcagaatttttaaaagctgcggtggaatctggtaatcgctgtcctccacatttttcatctcgcgcaccatcgcgcggtatgattccccgcgatcgacctgcagctgtccattctggtttttcagtgcactgtccacatagtacgcgctgtataacggcacctcaatcgttccgtcgagcagtttcttttctgaaagatccagccccgcaaacagctcggcaagcgctgccaccgaagaatccttcagattcagcagctctccgcttttcagtcggtaatacgttttctttttctggtacgcaccgagaatttccgagagttcttcactggaaaatgcttccgaggaaatgtcgagcgccagcagatcacttttgatactgacacctacctgtgctttcggcgcacgcacaattttgtgtgcctttacacggtccgtcgcataaacctttccttccgtttccagctgcgcaagccctgtatccatcagctgatacatccgtgcatcatccgctgtatcgaaaaacagctgacgcatggtttcatcctcataggggtaatagcctctgagcatgccaagtgcccgtctctcccgcatccggtcgcgaaacgcaccctcctgcttaaatgcttcccggtcggtcagctcgatctttgtctctccatagctgcactgtgcccgcgccgtcattttcccgttttcttcatcaagataataggtgatctccgcttttggcggctgatattctttcagggaaagctttcctttgtcaagtaccccaagctcatccagttccggaagtactgcactgcaaaatgacatcatatcatttttcgcaacacgaagcactgtctcccggtccgcgttcgcataatcgagcagcttttccatcctgatccgataggcattgctgcagcgatagaccgtctgccctatccgcacaaacagatgctcacttcctttccagagcgtaagcggcggaagcacaagccggaatacgttttccagttcccgcagcgtaatttttaatggtggatttttatccagaatttttaatgtatcataacgatatcccaccgccgtataatttacttcccgtccgagattcagattcaggaactgttccatcgtcaccgtattgagcagaagttctttcagctgaccaccgtttctctgagcattcatttcatttgctgcgcggatcagcttcacatactcccagcccctcgcgctgaacatactcttgcagtgcacgaatgccagcttctttccataagccagctctttttcttctttcaccgcctcgcaaaatgtgtccatatttttgagaacatacttttttccgtctgccggtccgaccgtaaacgtcagcgtgtaactctttcttccataataatagttccagccgttttcatgcagggttgcttccagctcaatatttccgctcgcttcctgcgcactttggcggcggcgcatgtcgtactcccgcataagttccagaatctgcggatccgaatggactttcgccgtctgctgtacactctggcgatagctgctcattctggtatttgcacgtacctggcgcagatatttcagtgccacagcgccacagtgcttgcacatcccatcatagttatggtaggcttcgcactcacactcataatcttcgatggcgtcctcttccagattaaagcggagccatacgtaataattttcaccactgcttccttcaacatttgcttctatataaaaggcttccgctccgtcctcgctctcctcggtccggattctggaaacctttccttctgccagcaccttctgcgcccgcaggtatgtgatatcctgtgtacacagatgcctgatgtcttcttcgttatacatattttcccttctgatcttcctgttttcctgcataatcctgtcatttttcactgcgcacagcgtaacctttcgcttctgctgcatgaaagtcaaagcggatattcgcggtcactgcagcgtctctgtttttccgcagagtataagacaggtcaagtatactggatttgcctgtaaatctcaatactctcttttctggatttttctttcacacctgaatcacattcttacgcagtaagtgttttgcgctgagaaaacagtatcttgtaagattctgttttcaaattcctctttttgcggtacaatgtacaagtatcgcatgttttacccgggcagccgttatacagaagctcacgcggccgtccggttaagtgactgattttaagaaaatgaggtaacacatgaacgaaaaagctttaaaggtacttgagtacccgaaaatcatacagaaactcaccgactacgccgcttcccagccgggcaagcagctctgccgcgacctcacgccatcctcggatcctggcacgatccgccggatgcagacggagacaagtgacgcagtcagccgccttctcagaaaaggaaatatctctttttccggcctgaccgatatccgtggctcactgcgccgccttgagatcggcagttctttaaatatcgaagaactgcttcgtgtctgccgtcttcttgagacgacgctgcgtgtcaaatcctggtccagaagcgcaagaaacgaagccgaaaatgcaccggaagattccctggaatccatgttttccggcctgcagccgctctcgcctctttccgccgagatctcgcgctgcattctctctgaggatgagatcgccgacgatgcaagtccgggacttcgccaggtgcgccgtcagattcatcagacaaacgaccgcatccgtgtacagctgaactcgctcgtcaacggttccgccaggacgtatctgcaggatgccgtcgtcacacagcgaaacgggcgcttctgcctgccggttaaggcagagtaccgcggtcaggtgcctggcatgatccacgatcagtcctccaccggttcgacgctttttattgagccgatgtcggtcgtcaagctcaacaatgatctgcgcgagcttgagatcaaagaagaaaaggaaatcgagatcgtccttgcaaacttaagttccctggttgccgcagaaacagatgccttaaatgacaacattctgctcttaaccgaactcgattttatctttgcacgcgcacagctctctttgttttaccgcggttctgaaccggatttcaatgaggagggccgcatccgcatcaaaaaaggacgccacccgctcattgacccgaaaaaagtggttccggtcgatatccgcatcggcgaggactttacaatgctcgtcatctccggtccgaacaccggcggtaagacagtttccctgaaaaccgtcggactttttaccctgctcggccagagcggcctgcacattccggcatctgaccattccgagctctccgtctttgacgaagtctatgcggacatcggcgatgagcagagcattgagcagagcctgagtaccttctcctcgcatatgaccaacatcgtctccttctgggagcaggcggatgaacgctctctcgttctctttgacgagctgggcgccggtaccgatccgaccgagggcgcggcactggctatggcgattctctcaaatctgcaccgcagggatatccgcacaatcgcaacgacccattacagtgagctgaaggtctttgccctctccacaccgggcgttgaaaacggctgctgtgagttcagcgtcgagacgctccgcccaacctaccgcctgctgatcggcgtaccgggaaaaagtaatgcctttgcgatctccgaaaagattggtcttccgaattacgtcattgaagaagctaaaacgtatctctccaaagaagacgaaagctttgaggatgtcatttccgacctggagcagagccgtgtcctgatcgagcgtgagcgtgaagagaccaaccgctaccgtgaggaagcggaagagctgaaaaaacgtctctcccgcaaggaagaccgcctcgaatcaagccgcgacgaaatcctgcgcaaagcgcgtgaggaagcacaggcgatcctgcgcgaggcaaaggaatacgccgacgaatccatccgcaaatataataagctgggaaacgcttccggctccgcaaaagagatggaaaaagaacgcacaaagctgcgtgaaaaaatggcttcccttcagaaggacaacgcggtcaaaaccgataaaaagccgaaaaagacgctccaggcaaaggatctgcgccttggcgacagcgtaaaagtactgagcatgaacctgcgcggtaccgtgagcacgcttccggatgctaaaggaaatcttttcgttcagatgggaattctgcgctcccaggtcaacctgcgtgatcttgaaaagcttgacgatgatcttccggcttacgcatcgaaaaaatcacctgccacaaagggcaccggttccggaaagattaagatgtcaaaatctgcatccatcagctccgaactgaatctgctcggcatgacgaccgacgaagcaatcgtagaacttgacaaatatcttgatgatgcctaccttgcgcatctctcgccggtgcgcattgtgcacggaaaaggaacgggcgcactgcgcaaagctgttcaccagtttctccgccgccagaagcacgtagatacgtatcgtctcggcgaatacggcgaaggcgatgccggcgttaccatcgtgacatttaaataaaggaggctttttatggctgccagacagaaaattctgatcgtcgacgacgatgaaaatatttccgaactgatttctctgtacctgaccaaagaattttatgatacaaagatcgtgcacgacggcgaggaagcgctgcgtcagttccggcttttttctccaaatctgatcctgcttgacctgatgctccccggcatcgacggctatcaggtctgccgtgagatccgccagcagtcttccgttccgatcatcatgctctcagccaaaggcgaagtctttgacaaagtgctcggcctggagctcggtgcagacgactatattatcaaaccatttgataccaaggaactggtagcgcgcgtaaaagccgtactgcgccgctaccagcctgcccagactgccgccccaaaaccgaccggcaagtacgttgagtacccggatcttgtgatcaatctgaccaattattcggttctctacaaaaatcataccgtggacatgccgccaaaggagcttgagctgctgtattttctcgcttcctcaccaaatcaggtctttacacgtgagcagctgctcgaccacatctggggatatgagtacctcggagacacccgtacggtcgatgtccatatcaagcggctgcgagaaaagatcaaggaccatgagagctgggcaatctcaacagtctggggcatcggttataaatttgagctaaaatcataaggatggacctattatgaaacataagcttttaaacactgtgcttgccgcttaccttggctttcttctggtcagtttcattctggctcttgtgctcgtaccacgctttctgcagcattacctgtatcagatttccgatgatccgcagtatctgcagtatctgcacagccagtcgatcgcgatccagaatgtctgctatctgctgatcgccgttatcttcctgctctcgctctttcctctcgccgtcttttatctgcggctgtaccgcccgatgaatcagatttccgaggcggctgcccgctacacggaagaccggatggcacacggtacaagacctccgcacacggtctatgacagggacgatgaactcggccgcctcaacgcaagcctgaaatacctggtcgaggcggctgataattccagtgagtaccagcggaagtttatttccaacatttcccatgacttccgttctcctctgacttcaatcaaaggatacgtcgaggcgatcctggatggcacaattccgccggagctgcaggatcgttaccttcacatcgtccttgatgagacgaaccggctgaacaagctgaccgaaggcctgctgctgctcaacacctttgacgacaatgcgatttatctggaaatgagcgaatttaacattgttgatgtgatccgccatacagtggattcttttgaagggacatgcaaaaagaaaaatctgtctgtgattatctctgcgcaggaatttgtacctgtctatgccgatatgagccgcatccagcaggtactctacaatctgctcgacaatgcgatcaagttcagccctgcggaaaaagagatctggatcaccgtcacgaccagaaagaaaagtgtttttgtctccatcaaagatttcggtgtcgggatttcaagagaaaacctttcccggatctgggatcgtttttacaagaccgacagttcacgcggaaaagataaaaaaggaatcggacttggtctctccattgtgcgtgagatcatttatgcgcacggccagaacatcaatgttgtcagcacggaaggcgtcggaacggagtttattttcacgcttgatatgccgcaaaaaacagataagaaatgaaaaatacccggaagctgtgatgattcacctgctcccgggtatttatgtttctgaatttttttgtgtcctgctttactttccgtactttttgcagaatctctttatttttgaatccacgaaattatccctcagatcgtcttttccgatggattcttctctgatcctgcattcattttcttacagccactctttgatctgggcgtaaacgccctcgccatccagctgatacttgtgcagcagtgcaactgccgggccggactctccgaatacatcctttacgccgatgcgcagtaccggagtcggtgctttctcagaaagtgtctcgcaaactgctccgccaagtccgccgatgatggaatgctcctctacggttacgacttttccggttgcctttgctgcagctacgacaagctcttcatcgagcggtttgatcgtgtggatgttgatgacctttgcggaaatgccatcctttgcgagcatctcagctgcttccagagagctgtttacgcaaagtccagttgcgatgattgtcacatcggtaccttctcttaaggtaacaccttttccgatctcaaatttgtaatccggattgtcattgatcaccggaacagccagacggccgaaacgcaggtaaaccggtcctacgtactcataagcggctcttactgctgctcttgcctcgatatcgtcagacggattgatgactaccatgcccggaatcatacgcatcagagcaagatcctcgttgcactggtgggaagcgccgtcctcaccaacggaaatacctgcatgggtagctccgatctttacgttcatatgcggatatccgatggagtttcttacctgctcaaatgctcttccggatgcaaacattgcaaacgtacttgcaaacggaacctttccggttgtggaaagtcctgctgcgatgcccatcatgttgcactctgcgataccgcagtcgatgtgacggtccggaaatgctttcttgaaaatacctgttttggttgcgcctgcgaggtctgcatccagaacaacaagatcctcatgctctgcgccgagctcagcaagtgccttaccgtagctctctctcgttgcgatcttctttacttctgacataatgcttcccccactttctctaagtctgccatagctactgcatactgctcatcattcggagcggtgccgtgccaggatgcctgattctccatgtaagatacgcctttgccctttacggtcttcatgatgatcgcggtcggcatgccctttgtctcgcgtgcttctttaaatgctgcgcgaagctgatccatatcgttgccgtctgccacgttgattacatggaagttgaatgcttcaaattttttgtcgatcggatacggagagcatacatccgcgatatttccgtcgatctgcagcccgttgttgtcaacgatcactacgaggttgtccagctttctgtggcctgcgaacatggaagcctcccatacctgaccctcctggatctcgccgtctccaagcagtgtgtaaacacggtaatccttcttgtccatctttcctgcaagtgccatgccgactgctgcggagatgccctgtccaagggatcctgatgacatgtcaatgcccggaacgtgctgcatgcacggatggccctgcagatgagaaccaagatgacgcagtgtcacaaggtcctccaccggaaagtatcctctgtgtgccattgcagaatagtaacccggagcggtatgtccttttgagagaacgaaacggtctctgtccggattcttcggatccttcggatcgatgttcatctcttcaaaatacagatatgtaaatacgtctgctgcggaaagtgatccgcccggatgaccggcttttgcactgtgtactgcagtcacaatgcccttgcgaacttcattcgccattttctgtaattccaatgtcgtcataatggatattacctttcctttctgctgaaattccggccgcgcggatcctgatgccccgcaccatggcctgattcgattgatttattgtttcggatacccgcgcttttatttgcccggctgtccgtagtaagcgttcggtccgtgctttctcatgaagtgcttttccttgatgcagtccggtgccggctgtacctttgggttgttcagctcggtgagtgtagccatctttgccacttcttcgagtacgactgcgttgtgcactgcctctgctgcatttttgccccatgtaaacggtccgtggttcgtgcacagcacggccggaacgtataccgggttaatatttctgtttttgaatgtctcgatgattacaagaccggtattcttctcatattcgccgttgatctcttccggtgtgaggtttctcgcacacgggatcggtccatacatatagtctgcgtgtgtggttccgtagcacgggatgtctcttcctgcctgtgcccaggatgttgcccacggagaatgggtatgtacaacaccgccaagctccggaaatgccttgtaaagttccagatgtgtggccgtgtcagaagacggattatattttccttccacacgattgccttccatatcgatcactaccatgtcatccggtgtgagcagctcgtaatccacaccgcttggcttgatcacgaacagcccggcttcacgatcaattccgctgacattgccccatgtatacgtaacaagtccgcggcgtggaagctccatattggcttcatacacctgctttttcagttcttccagcataactgcttcctccttacttttcactgccttccggaggaattttctccatccgacaatatgcattctgcttcctttatcatacacttctttgcagtattcgtccagtcaatttttgcgtttattcgaaattctgcactaatctacacgaaaaaaagcggggatttttccatgaaactgtacaacttcacgaattttattgtgagttgtatggttttcggatgaaatcccacgctttttttactccacgctcttcagggattcgaccatgtcgatcttcttcagcttaaagtacatcaccatattgacaaggatcgaaaatccaaacgtaaagagtgttccgtaaatataacttgccagtttgaggctgcgtccgaacatgcaggcgtccacctccacggtcgtgatgataaacgcgtgcaggaattttccgataaagattcctgcaatcgctccgattactgtgagcaggatgttctcgcggtatacgtaagccgctacctctccatcgtagaaaccgagtaccttgatggttgccagttctctgcgccgttcattgatattgatattgttcagattataaaggacaacgaatgcaagcattccggccgacacgataagcactacgatcacgatatcgagtgcgccaagcatatgatccagctgttcctcaagcgttttcgtgtacgtcacattgagcaccgcatcgtttttcagcagctgctcaccgagtgtttccgcctctgtcagaccgttttctgtcttcacgaaaatactgttgtactcaggctcttcctcaaatacggtgcggtacagcgccggtgtcagataaatgtagtgtgacagatagttttcgcagaccgctgcgaccgggatcccgatgtctttctcagaggtctttaagatgatcgtatcgcctgcactgacgccgaattcttttgcgatcttttctgtaatgatcgctccgtcatcgccgagtgtgtatgtttcttcacggttctcccggttgcggaagcagaaaaattcatcaagatcctgtgtatcctccggcacgtacagataaacggtccattcctttttcgccgcttttgcgccctttgtctgaattttctgcatataaaagcgtttctcggcctgcacgctgtcattttcctgcacagttgtccagactgcttcctgctccgtttctttcgcatccgtatcgaggatcaccatctcatcataaagctgcagctgctcaaactggaggatcgccacatccatgatcgaatcccgcaggccaaagccgacgagcagcaatcccatacagccgccgatgccgatcaccgtcatcagaaaacgctttttgtagcgcatcaggttgcggattgtggatttccacgtaaatccaagtcttctccacaaaaacggcagatactcaagaaacaccctccttccttctttcggtgccggcggacgcatcagctgagccggcacggcctgaagctcccggatgcaggcggaacatgtcgctgccatcgtacagatcagcgccgcacctgctgcaagtccgccgaacttccactcatatggaatcaggatcttcggaagatactgatacataatgccgtacgcgtccacgatgatccacggtaagatcttttctcctgcaagtaccccgacgatacttcctcctacggtcgccagaaatgcatatttcagatattttcccgcgatatcctttttgctgtagccaagtgccttcatcgtgccgatctgggtacgctcctcctctaccattcgtgtcatcgtggtcaggctgatcagcgccgccaccaggaaaaagatcagcggaaatacccgcgcgatgttcgtcagacgctccgcattctcgccaaaaccagtattatccggcagttcacttcggtcatagacgtaccacgacggatatttaatctcggaaagcttctgctcagcatccgagatctctgcctcggcatccgccagttccttttttgcatccgcgatcttctgttcaccgtctgcaatcttctcctgcgcctcttttttgccttcctcgtaatctttccagccgtccgcaatcttctgctcgttttctgtaagttccttctcgccatctgcgatctgttttctgccgtccgcaagtttttctcttgcttcctccagctgcgtcttcgcatcggaaagctgctgccagccgtctgaaagctgttttctcgacacattcagctgcgcccagcctgtatccagctgcgctcttgccgcatccagctgtacttttgcatctgcaagctgctgttttcctttcgcgatttcctcttttgcgctctttagcttctcttcatttgcctcaagctgcgtctttgcatttgcaagctgtttttcaccggattcaagttcttttttcttttgtttcagttctctccagccctcgctcagctgcttttttgcctttgaaagttcttccgccttttccttcagctgtttacccgccgcttccagtgtggctctcgtcttcgtcagctttgtctttgcctgctgaagctctttttcctttgcttccagcgtcttttttgcctcttttagcgcctgctcattcgcatccagctcctgttttccttttgcaagttctttctgccgtctgtcaagttccgtgcgggctgccgcaagctgctgctctgtcgcatccagctcctgctcccggtcagccagttcctgctcttttgcagccagctcttcttttccttttgcaagggcgtcctgagccgcttccagctgctttttgctctcatccagaacctgacggtttgccgcaagtgtctgcttctgcttcgacagttcctcttctttcgcgtccagctcctgcttctgtaccgcaagtgatgtgttcgccgtctcatactgatttttggctttttgaactgcgtcagcctgtgcctccgctttttcctgtgcctgcgcggctgcctgttctgctgcttttgctgccgcttctgcctgcggaagcgcattctctatcgtggatgcctgcgatgcggctgtctgggcacggtttttcgcctccgcggctgcctgctcctgtgcatttgcttcgctctccagtgacgtaatctctgcctgaagtgcatctgcctcgtttcggcgcgcttccacagatgcagccgcattttgaagttcttcttccgtcactcctgtctctttttgcagctgttcataagatgcctgtgcctgtgcaagttccgactgtttggcagtaagcgcagactgcttctcaccgatcctggcacgaagttcctgtgctttttcctcagccgtgctccgcttctgctcttccgcctgctcctgcgtgcgcagatccttcgcctgtgtctgctgatcctcatagctctgccgaagtgctgctgcttctttttgtctctgatctgcgtctgcctgcagactttcaagcatctgaaccgccgtgtcatatgatgtctttcgtgcctgcaccgattgttctgccgacgcatacgcctcacgcaccggtgtcagtgccgcatccgaggcactcaaggctttttccgcctgcgtcagttcctcctccgtgccggcaagctgcttttcctgcccggaaagctgctcttcctgtctggcaagggtctttttcgttgctgcgatctggttttttccttctttgatcgacgtgcgcccttcttttacctgtgtcatgccggatgcatactgttcttctgccgcggccagctgtgatgccccggattcatactctttttttgcctccgtcaactgcgcagctccagcttcatactctttccagccctgggccagctgctgtgctccggattcgtactgcgcctcaccagactccagctgcgtcatgccatcctcatattgctttttcgccgcagcaagctgcgcggctccatcctcgtattgtttctgtgattcttccagcctggtttctgctgccgcaagctgttcgcttcctgctttcagggcttcactttgcttttcatactctgcccagccttctttcagctgcgtttctccgtcacggatctgctcctcaccctgtttaaacttctttgcagctgcctccgactctttctgataagccgtcaggccggtacgataactttcctcaccgctttgcagctgctcttcgccactggcgagttctgcctcgccgtcctgcagtttctgttcattttctgcgatttccgcttctccatctgaaagctccgcttccccatccgcaagttcttttctggaatcttccagtgtctcttttcctttttccagctctgattcgccctctgtcagctcggactgtgcctgtgccagttcagattctgcttcatttctgccgctttccagctcggactgtgcttcggcaacctgctgttttccgtcctcaacctgctgacgcgcatcatctaacttgccgttcgcctcttccatgaccgcatcatagcgtgtctggcagcggatgtcctcaatcgcttcgatccggtcctgtacgtctgccaccagcgtatcatacccgtcggtataggcaatctcatcctgtgcaccatccacgcggacgtagattgtgctgtaaacctccgagtcaaaatcctccgggacaagatagagaaaaccggaaaccgcaccatttccaagtgtcgtgctgccgcgctcaaatgcgatatagcttgggctgtagccgattccggcaatctgaaatttcgtccgcttcagctgcgtatcatcactggaaggaaccgtcacctgcagcatatctcctacgtgatatccgtgtgcctccgcatacgacgcatccagaaaacattcccccgcctttgccggaaccgcaccgtcttttggtgtgagaaggttcatatcctccggaatcgattccacatggagtacctgctgcacctcctcgccgcagtaaacatcttccatatatacgcccttcgcatccgcgacgccctccactgcccggaccgcctccagatcatcctctgaaagtccgagtgtgccaagcaccctgatgtccatcagttttgtgctgtcaaagtagtaatcgcctgtcgcacgcatatccggtgcagacgcctgaataccggaaaaaaaagcaacgcccatcgccacgataaaaaaaatcgacaaaaagcggttcaggctctttctgacctccacgcgaaattcttttttcagtgctttcttcttcaaatgctcctacctgccatttctcattccgattctgctgtctctttatctcttacttttattcttttcttcccctgctttctaccactcgatctgctctaccggagttggctgcgggttcaggttcatatccgaaacctgtccgtttttaatgcggatcacgcggtctgccatcggtgtaatcgccgtattgtgcgtgatcacgatcaccgtcatccccttctggcggcacatatcctgcaaaagcttcaggattgctttaccagtctggtagtcgagcgctccagtcggctcatcgcaaagcagcagctttggattcttcgcaagcgcacgcgcaatcgacactctctgctgctcaccaccggaaagctgcgccggaaagtttcccattcgctctccaaggcctacctcttttaacactgttttcgaatcaagaggatttttgcagatctgaagtgcaagctcaacattttccagcgccgtcaggtttggaatcaaattgtaaaactgaaatacaaacccgatatcatccctgcggtatccggtcagttttcgctggctgtattttgcgatattctttccatcgacaaacacatgcccgctgctcgctgtgtccatgccgccaagaatattcaaaacagtagtctttccggcgccgctcggcccgacaataacgacaaattctcctttttttacctcaaaattgattccgtcaaccgcgcggatctcaacttcgcccatcttgtatacttttgtgacctgctccagcttcacatacgcttcctgcatggcatctgctccttctgttcttacttttgtatcttcttttatgtcttatatgttatgtatttcctgattattgtctgtcttaattttttctgacactttatctcatttgcttttttgcagatttgttgtcactgcatttcatgatagcaattctgcaaaataatgcatcccctccgatctgtcagagcgtgaaatactgcgtcagaaatctttgccgtgcgtcacctcatacttttgaaacatttttatgtgctcttaccattacgcttgtcgtccgcttcaattttattttactaacccgattatgctcacgcaaccattttataaaagttttagaaaaatgcttatctgcaggctccagagcgcgtttgaaaaaggagcggtgcttctggcagccgctcctgatattttttttcctgtgttttattcttatttccgatcctccagcgccacatacggcatgtgatgccccacatacttgtacgccggacggatgatctttccttcgtttaccagttcctcgatccggtgtgctgaccagcctgcaatacgggaaattgcaaagatcggggtgtaaagctgtttcgggattccaagcatcgaatacacaaatccactgtaaaaatcgacattgcagcaaatcggcttatgcagctttttgcggctcgtcagcagttcggaagcgatccgctccactctcgcatagaatgcaaactcatcggtgagccccttttcctcggaaaggcttctcgcatactccttcaggatgacagctcgaggatcggacagtgtatagaccgcatgtcccataccatagatcagtccgctgcgatcaaacgcctctttgttgatgatctttgtcaggtaatcgcagatctcatcctcgctctcccagttatgcacatgttccttgatatcggaaaacatattctctactttcaggtttgcaccgccgtgcttcggccctttcagagaaccgagcgatgcagcgatcgcagaatacgtatctgtaccggtagaggaaacgacgtgagtcgtaaaggtcgagttatttccaccgccgtgctccgcatgaatgacgagcgcgatatcgagtacccttgcctccagctccgtatactgcccgtcgcttcgcagaatccgcagaatattttctgctgtcgaaagttccggatccggataacggatcacaaggctctggtcgttatggtaatgctggtaggcatggtacgcatagacagagatcagcggcatcgtcgcgatcagggaaagtgcctgacgcagaacatttggaatggaaatgtcgtctgcattgtcatcataggaatataacgtcagcacacttcgctgcagcgcattcatgatatccatgctcggcgctttcatgatcacgtcccgcacgaatttgttcggcagctcacgatactggcttaggatctcaataaactcctgaagctgtgtcttattcggcaaagcaccgaacaaaaggaggtaagtaatctcttcgtaattgaactttctcgttgcaaatccgtttttcagatccatgacattatatccctggaaatacagttcaccaggacatggcaccttttcgccgtgcaccgtcttaaatgccacgacatcggagatctcggtcagaccggtcaggacaccttttccgtctgattcacgcagtccgcgctttacatcgtattcctgatacagattcaggtcgagcgcaccggaaatcatacagtattttaccagctgtcccagtctctcatcccttgtttttctatccgtttcactacgtaacattgtatactcctcccttttctgtcacatcagccagacaaagctttatatgacgaaccgttccatctctgatgaagcagcccttttattctattcccatttttttcaaaagaaacaaaacgttctggccttcaatctggctgaacacgctgtcgctgaaatcatccggctctaccgtgccctgataccaggactgcccgtcaaaatagttttgtactgactgtgaggaaaactttcttccatgtcttgcatatatttcattgatcgccatctgcagttcttcataactcattccatccacatcgctgtctgccaaaagccgctcagaactctgcgacagaatgtaggaaccgctctgtgcctgagtctgcttagttggatcctcgactgcttcggtctgcttttctgttattttttccgtctgctttttggatgcccttgtggtctgtttttctgtcacccgttccgcctttttctctgtcgccgcattttgatcctttggagtttcggccgcggccgtctgcttcgtagtcccgctttgcgcctgtccgtctccatccagaattgtgattacgctgtctccaccgctgtcttctcctgcagtcgttttcactgtctcggtctgtgtgacctgcacatttcctccgtcttgcgcattacgttttccgcttcgccctttcatccagaacaggccaagcgcgacgagtgccacaatcagaatcgctatcaatccgagtagcagatactgcaccggcgtaatcctgcgttcgttctcctctggaagctcccggttccatgactcctcccagctgccctgcagccgttcctgctggtaacgtgtgcggcgttctccggtatcctgcggcatgcggcgctgctgctctccggcgcccgtctggcgacgtacgttttctccgttcgtccgtggctgagcactctgcaccggtgttcgccgacttcctgcatcgccgacttcagacgggcgacgtgtattttctgcatccctccgtggctgagcactctgcaccggtgttcgccgacttcccgcatcaccgactccagatgggcgacgtgtattttctgcatctatacgcgtttgagcatttgacactggtacgcgcctgctgccctgctcatcagttcccggctcgcggcgtgtgctctgtctctgcgcactgccgtctccacgaggtgaaaacacaccagattcctgcgggcgctgtgtacgcggagcttcccgctcaacctttgcgccgcagtattcacaaaatcggctttcatctgacagcgcatgaccgcactgccggcaataccaaatgtttcccatatcctacctcacgcttttctgtatttcttcaggtagtccgctgccttctccatcacttctgcattgattgaatagtaagaccagcgcccctcgcgtctgcagttcaccgtacctgaatcgcacagaatcttcatgtgatgagacagtgtcgactgtacaatgctcacggatttcagcaaatctgctgcacacagctcatgctcctcgagcatcccaacaattcgaagcctcgtctcatcaccgagtgcccggaaaataagggctgcctcatcctctgacacctcgccggctgtttttttccgatttgctgtttttactgattttccggttttgtctgctttgcgtccaatcgtctttcctgctgatttttctgctttttcagtctgattcaaagcggtaaaggcctcttccatctcctctgtcttccagacaccctgcgatgtcccaccttccggaaccacttttgctgattcttttctttccaggtcctctgctccctgaagctgcttctttttcttctttttcttgtcccctttttctatcttttcatccgtcagaagcgccagtttcttctttttcagcttttcttctgatttctgttttttcttctttttgtctttcatgatatcccctttatcatttcctgtttcttttttgagcatgagcgtttctcatggttcttatcgttccccttatcgctgccctcatcttttttcgctgttttatatgtttatatgcttatatgcataaatattcatttgtaactgttcagagccaagcaaaatttcataaaacaggcgtaaaatgctcgcatttttaagcctgtttttgaaattttatttggcggatacgccacaccgacgaaatgcgtagcattttggaggttggctctgaacagttacattcattttatcttttcagcaaaagcaaacatttgtattatatcacgacagtgattttccgtaaagtcatttccttttatgcaaaaaatggcaatcactttttgcccctgatatcatcatgataatacaacaggttcccgcccggcagtcatctaggccgcctcggaggaacctgtcttatttttcagaaccaatcagccctttgagaaatatttttccttgataatctccaccggcatatccattccggtccagagcttgaaggacgctgctccctggtacagaagcatatacatgccgtttccggtcttacatcctgcttcttttgcctcgcgcagaagccgtgtctcctgcggattgtagattacatcaaatacaaacagatccttgtggaacatggtcgtgtcggtaatgatcgtattttctgtcttcggggccattccgacggaggttccgtttaccagaattgcgctgtctgcgattgaagcacgcagcacttccggatcagagaaatcatgcagtgttactttgcagtttgtacgctcattcagctttgcaacgatctcttctgctcttccgtaaaatgcatcttttacgttaaacacattgatctcagccacaccatccagtgccgcctgcaccagaatcgccgttgctgctccgcctgcaccgagcagtgtcatcttctttccgatgatgtctacacctttttctgctacagctctcataaatccaacaccatcggtcgtataagctgtcagaacgccattatcgttcacgatcgtattgcatgcgcctgaaatttcagaggccggtgaaaccttgtcagcaagcctgcacatgatattcttgcccggcattgtgatattccagccccttgctcccatcgtgcgaagaccctccactgcctgcggcatcttctcctccggaacatcaaatgcaagatatgtataatcaagtcccagctggtcacacgcttcgttgtgcatttccggtgaaacgctgtgtgcaaccggacttccaagtaaacataataatccagtatgacctgtaatgtgttttgacataagcttatcctctctgtttctttgcccctttaaagcaatgatttgtgtttgtgttgtattatacatgaaccgcacctggaacgcaacccaaaaacaagggaatttaaccgagtcaggcaagtcccctgcttcaattgcgctgagcaataagcagtgggtggggacttgcttgtatcaggagtggtacaagccactcctgataagctgcgaagcagctactcggttatgagcaagtagcgaagcggattgcgaatatccgctttgacaaacgcagaagcccataagaacccctgcgcaaaacaaatggccgttatttctcagattcccagcttttccttcatgtaatcaaccggggtcttcttgccggtgtacagctcgattgcgatcagcgcctggaagagcatcatgcccatgccgttataaatgcgttcacagcctgcttccttcgcctgcttcatcatgaccgtctcacgcggtgcgtaaaccgtgtctgtcacgatcagatctttgcgaaaacaggaggtgtccggaatgttagtgagatcctccagcggatgcatgccgacacctgtcgcatcacagaagatatctgctgcctgcatcttctctttcagaagcgcaaggtctgccagatcatgcatttctgccttacagccggtgttcttgttgataatgtcaacgatctcctcgccgcggctgtagaatttatctttaatgttgaaaatatcaagctgtccgattccgtccagagcgccgcgcactgcgattgccgtcgctgctccgccggtaccgatcagaaccatcttcatgcccctgaaatcaatgccttcttctttaattgcctgccagtagcccattccatctgtgttgtagcccttcagatgtccggtcactgcgccgttctcatcgcgctcattgacgacggtgttgattgccccgcacagctttgcagcctcatccacgtcgtccagatatttatgtacgactgtcttattcggcatggaaatgttggagccgagcatcttcagcgcacgaatgctctccacagcagcctccagtgtgctgttgtctacttcgaatgccagctgaatgacgtcatctccgtttttgtcgtatgcaaggttgtgagtcatcggtgactgggaatgacggattggataagccatcagtcctactaactcggtatgtcctgtaatattcggcatgataatttcctccctggatatcctctctttttgcccgggaatcctcctgattcccgggcaaccttttgattataatcttttgtaaaacggatctttacaatccgttatctgcatgcagcatctgcctttactccaacggagccagatcgatatatcctctgttttccagtacattcaggatcgcacgtccttccatcgtaccttccatgatacggcgggcacgtacagaatccccaatcgtatagatgtacgtatctgtatccgcgaacgcttcctcaagctgcggaagcagcggattgttgctccgcatgccaaggcagttaaatccgaggtcaaactccagatcggtcaccgtgccgtccggaagcttcacggtaaatgcattctcttttacttcctgcagcgctgtgttgacatactcttttacaccgtacttgtcgtgtgtctcgcgcattgagcatttggtgatcgggtctgcgagcataccgatctgcggaagcatatcgatgatcgtgcactttgcgccgtgcggtgcgaagtattcgatcacgtcaagtccgacagaaccgccgccgactacaacaaccttcttgtccctgcaggattcatccggatacttgccagcatttaagttgttgatcatatcaaagatcgttgcgacattgcctgccgcaatattttccttcaggcccttgatcggcggaacgagcggaacggaaccggttgcgttgactacaatatctggcttgaattcctgtaccttctcgatggtcgcttctgtgttcaggaaaacgtacagatttttcagccttgctgcacgtgcctccaggtatttcgggaaatctttcatacgggtcttgctcggaagatcggaaataaaggtggaaagtccacccagatgatcctttttctccagaacaaagacattgcagccgacctccgctgctgtacaggctgcctcaaggcctgcggtaccgccgccgactacgaccacattgcactgctttttgattttcagattcttatagatatcgccctccggtactgccgggttgacggtacagcggatcggacggttgacgccgatccggttgcctgcgcagccgacgttgcaggaaatacatttgcgcagcagcacttcctcgccttcctggactttctttacccagttcggctctgcgatcagtccgcggcccatgccaacgatatccacatctccgctctccagaatcttctctacgatctccgggtcacggtagttacctgcgttgatgaccggtttgccaaatgcatccttgaccgctcttgccatgtaggaacgccatccgtccggcagaaaatttgaatcgatctgatactgcaaagacgggttcagtccacaggaaacatcgtacatatctacaaattcatcaaggtacttcagatattccagcgtatcctcgagggtattgccgcccggcacacgctcttcagcggaaatacggataataatcgggaaccatggtccgacctgctttcttacttcctcaagtaccatgcgcgggaaacgaagacggttctcgacgcttccgccgaattcgtcttctctcttattataataaggagaaataaactggctgatcaggtaagaatgtccgcagtggatttccactgcatcaaatccgatcgtctgcacgcgctttgcagcctctccgtattttttcactgtggtaaggatctcttcctttgtcatcggccgcgggatctcgccgcccgctttcgtcggtacgttggaagaagaaacggtctccattcccgtacgtgccgaagatgccgacgcacctgcgtggttgatctggatcgcaacggtcgcaccgttcttgtgcaggttctccacgagctgataatagcgcggcataaagctgtcatggtcgatccggatctgactcgtgccgtttgatccgaccgggtactctacatttgcattttccagaataataaggcctgtgccgccctttgcacgctgggaataataattcatgtgacggctgctcatctcaccgctcgtctcaccgtaattggtgcccatcggggtcatcgcgatgcggtttttgattgtcgtacgcttaatggtaatcggttcaaaaattttgggatatttactcttcatgattgatctccttacactacatcgttcgttacatgagaggcattccttcgtttgtgacacccttatcatatcgcgtttgattaaaaattaacaatatctttcaggtaaatttttgatgcattcaatctatcgtttttcttctccatttcctctttccgtgcttcttccttaatataccggataaaccgctccaccgccggaagacggtaacgctccttcatccagaacataaaaacctgatgataaatgctcagatctttcagcctgtgtacatttacctgatcttccccggcaagaaaatcggtctccggcatcagcgcaatcccgaaattccgcttcaccatcgcaagaattgaatactcatccgggcattcggcgatgatatccggatgcactccatatttccggtagagatatttcgtatgggttcccatccacgaagcctgatcatagccgatcaccggataacggtccagaatctgaagcggcacttcctcctgcccctccagttcatgcccctttggtgtgacgatcagcacttcctggtttaaaataggaaaatgttccattccttccttctcaatacacccgccaaacccaatatcaagctcaccgctttttactttttctgcaatcgcagacgtatgattctgccagaatccaaacacgacacgcctgttttccggccgttccagaaattcttttaccttacacggaatgtactgtccggccagaggaaagacgtagccgatctcaattcttccaccgtccgacgcaagctcactcatcttttccattgccacccggcagtcctccacaatccggtctgcgtactccagaaaaagctttccggccttcgtcaggtttacgcctctgccgcgtttttcaaacaatggtacaccgagttcctgttccagtgatgccatggaacggctcagagaaggctgtgagacatacagttcttccgccgccagatggtagttttccagtctggccaccttctgaaaataaatgatctgatttaatgtcatatccgtttctcctttctgtttccgcagtcacggatatccgctttttttattgtaacatatcaatacattcaacgcattgtttttttactttaaaagtattagaccgtccgcgaaagaattgttaaaattgtatcaaacgttatgttatttttttaacagagcagcgaagcggattgcaaatacccgctttcagcgaaaccggagaaacggtgttccttcgtttgtgacaggacaaaaggacaccggtttttaccggaaaatggtgacaaaaaaggagaataccatgaacaagaaatatctgccaagtgcactgatcctgtacctgaattatttcatccacggcataggctgctccatcctcggacaggccgtcattaaagaatctctggctgctgcctggggcgtggaagcaatggccatcacagctatttccgcagcactcggacttggacgtctgattgcccttccgttcgccggaccgctctctgataagctggggcgccgcatttccacagcaatcggaagtgcctcctacgcgatctatctgatcggccttgccctcgcattcggcgccggcacaaacggcggctacatgatcgcctacgtatgcgcaatcatcggcggtatcgccaattccttccttgacaccggtatctacccggcagttgccgagatcatttacaaagcacccggtgttgctaccatgggcatcaaattttttatcgcgatcgcccagatgctcctgccgttcgtacttggcgttgcagtaactaccaccgattccggactgaattcctacaatccgcttttcatcggctgcggtatcatttacctcgcactgtttgtgcttgttcttctcttcccgcttcctgattctgaccagaaagcaggcggcaaaaaagagggtctgatcgaaggactgaaacatacgcatttttcctttgaatccatcgctatgatcctgatcggattcacctgcaccggtactttccagctgtggctgaactgtgctcagaactttgcaaaagaaaatgtcggctgggcagatccgtcgatcatgcagtcctggtattccgcaggtactctgatcgcgcttgttgtcaccgcgctgctcaccagaaagatcaaagatgttcgtttcatcctgatctacccggttgtatgcctgctcacactgatcgccgtgctcatgggacagaaccagacactgatgattgcaggtgcattcctcattggttgggccggtgcaggcggactgcttcagatcgtaacttccgtgtgcaacatgcttttcccgaagatcaagggaaccgttaccgcgctcgtcatgatcgcatcctccctttgcaactacacgatcctctccgcagcgtctaaaatgactccatctcaggttatgacgatgaacatcgtgctcactgcaatcggcgtagcgctcggacttttcgtaaatgttcgctataaaaaaatgaccgaacttgtaaacgagtaaaatcatcggccacattcaaaaacactcgttaaatggtttcatttctctgtagaaaaatcatctgtttcatattaaaattaaagtaactgttcagagccaacctccaaaatgctacgcatttcgtcggtgtggcgtatccgccaaatcaaagcggatattcgcaatccgcttcgctacttgtagaatcataaggaatcccagctcgtaagggatcctcccgtaaacgggtccctccttacgagattccgcaagcgggtccctccttgtgatatttcataaaacagctgtaaaatgcagctctgaacagttaccaatcaaagaaaggaaattctgccatgaataccgtaaaagtaagaaaccttgaaatcggcaccggagcaccgaaaatcattgttccgatcgtcggtgttacaaaagaggagatcctctctgaggcaaagacctttgatacacttccgatccatgtcgtcgagtggcgtgtggactggtttgagcacgtttttgagacggagcaggtcatcgatgtactgaaagatctgcgcgaagtgctcggagatacccccatccttatgacctttcgcacctccaaagaaggcggagagaaagccatcacaccggaagcctatgcggaactgaacttaaaggctgcaaagagcggttacgtggatctgatcgatgtcgagatctttaccggtgatgcagtggtccgcaggatcatcgacggtgctcacgctgccggtgtcaaagtcatcgcttccaaccacgattttgacaagacacctgcaaaatcagacatcatctaccgtctgcgcaagatgcaggatatgggcgctgatattccgaagatcgcagtcatgccacagagcaggcgcgacgtgctcacactgctttccgctactgaagagatggtaacggactatgcagaccgtccgattatcacgatgtccatggcaggcaccggtgtcatcagccgtctgtgcggtgaagtcttcggttcttccatgaccttcggtgcagcaaagaaagcatccgcgccgggacagattggtgtcagtgacctgaactccgtgcttacgctgctgcatagttccctgtaagtaacgctctgaaaactgatgatgctgcaaagttccctgtaagtaacatcctgaggactgatgctgcagcgtttcgccgcaaattcatcccgctgtctgaagcagccatccggctatgttcacgcagtaaatcgatttgcaactgtctactttgatataagacagagttttgtctttcccaccggaaagccgccatgcagccgcccggatctgcgaccgatatctccatactcctgagtacagtaaagcggacattcgcaatccgctttgctacttgctcatgaacgcagtcgcttcgcgacctgtcagtgggagctttcaactcccactgacataagcatcccccttacccaccgcttagtgctccacgcacttgaagcgggggaatgcttatctgcgttcaaggtatactccggcactttggtgatatcggtcttccgactgtccggaagaaatacctgaagtgctccggccttttctgtgacagtcccctactttttcccttcggaggttccacatgaaaaaaatactccactggcttgacgaaaatctggaagaatttcttctcgtcttctttctgatcgctatgaccctgattatgggcattcaggtcttttgccgttacgtgctcggacagtctctctcctggtcggaggagatcacccgctatctttttatctggtctggctttttaagcgtcagttactgcagtaaaaaatgcctctccattaaaattgaacaatttgtcgcgatcttcccgcgcaagggaaaagcgattttcaagcttgtcaaccacacctttgagctgatctttttcctgtacatgatcccgtttgcctggtcttatctgatgtccgccgtacaaagcggccagctctccccggcctgccggattccaatgtactatatacaggcagctccgcttgtttccttcgtacttgtcgctttccgtgtccttcaacgctggatcatcgagtttcgcatcgcgcgcggagagcatgtcatcgatccggctcatccggagcgcaacacaccggaatccttcatcgccgcaaatgcggagactggaatcgaacatgctatcgagtcaggaattgacaaccggatcgaaacgatcacaaatgcaaatgaggaggaacactgatgcctgctgccgtattatttctgatttttgtactcttactcgtaattgcaatcccg

SEQ ID NO: 4447 - DNA, 32759 bp, Unknown
  16S sequences of unknown bacteria
aatatatataaatttatatatgtttttttatgcaaaaagaaagtccccgaaaaatcggggacaatgtgtccgtttgaaatttacagcgcaaaatcaaggttttccgcttctttttccaactcttttgcttcgttgacaaagccctcttcacggctttcgggcaaaaggttcgtcatgcttttaaggctgatgccgagagtagacatattgtgaagcattgcggaagtcgtgggctgaataaagcccgcaacaccgagaactataagcataaagttgaatccgacaatgaagcggtagtttctgtctatccgctttgtcagtgctgacgcaagttcacggagtttgacaatttcgaaaaggtcttctgaggatattgttatatccgctatctcctttgctattgccgcgcccgtgtttatcgctatgtcgacatcggcttccgaaagtgcaggggtgtcgtttactccgtcgcctatcatgataacggttcgtcccgccgtcttttcttctctgatgaactttgccttgtcttcgggcagaacctccgcatgatattcgtcaacgccgacttctcttgccaccgccgccgcggtcttttcattgtctcccgtcatcataacaacgtttttgacgccgagagcatgaagcgcttttatagcgtctttcgcttctttgcggagcgggtcggaaatacatataaccgctgtcagaacgcccgaaacggcaagataaaggtgcgagtattcgtccgaaatgtctgcaaatttttgttcgtcgccgtcgggtatacggcagttttcgtcttcaaaaacaaaatggtaacttccgataacgacctttctgttttcgacggtgctcgatattccgtgcgcaacgacgtattccacttttgagtgatactcttcgtggttaagacctcttgcttttgcttcttccacaacggcatttgcaagtgagtgcggatagtgttcttcaaggcacgccgcaagacgcagcatatcgttttccgcacggttgccgaacgtcactatttttgccactttcggttgtgcataggtcagagttcccgtcttgtcaaaaactatcgtgtccgcttttgcagccgcttcaaggaattttccgcctttgacggaaatgttgtattggttgcattcgcgcatagcggaaagcacggcaatgggcatggaaagtttcagcgcgcaggagaaatcgaccatgagcaccgcaagagtttttgtgacgttgcgggtcagcagatacgtcagaacagttcctccgagcgtgtagggaacaagtctgtccgcaagtctcgacgctttgtcttccgcggtcgatttgagtttttcggattcctctatcatctttacgatacggtcataccgtccgccgcccgagactttttcgacttctataacgcattcgccctcttcaacgaccgttcccgcataagcgtagctgccgcagactttgcgcacggggagagcctctcccgtcattgaagcctgatttacagccgcttcgccctcgacaacttttccgtcaagcggaatcatgttgcccgtgcggacgattattctgtcgccctctttcacgtcgcttacggaaacgagcgtttcttctccgtttttgagccatactttgtcaacattcagagacatcgctcccgcaaggtcggaaacggattttttatgcgtccaatcttcaagaagttcgccgagtccgagcatgaacataaccgaacttgccgttgaaaagtcgcctctgacaagcgagacagtgaccgccgttgcgtcaagcaccgaaacggaaagtttgccgttcaaaagcgatttcagtccctccgatatgtagcggacggaacggattatcgccattcccgctcttatcggcgcgggtaaaaacgatttcgatgcaaagcgcagcagcactttcattacaagtttgtcttcaaattctctgttcagaacccttgaagtgtggtcgggaaccaacccctcattttctgcggattcaaacgaaaacgcggcaagcgcttcgattattcttttgttgcttccgcggaaaaagataaccgtatctgcggttctgtcataaacttttacgtccgttattccgtcgatgttccgaatgtaatattcgagtacgtcggcttgtcttaacgtcatgccgttcacacacagatgaacgcggatacgtcccgccgaagtgtgtaatatcttacatttcatatttgtgcctcaaaaatgaaagagccgctttcggacggctctttcgatgttttttactgttcggataccggttcttcgcaagagcagtcttctatcacggtttctttttccgctgcgcgcttttcgttgagcgcttttgcgtctgcgagaatgtctcccgcattttccttgataacggttgctctcttcataacatcgtcttttgcacgaagagccgccgcagttgcgtgagtgtaagcctttttggcttctttgctgccgaggatctttatgcccgccgtgccgaaaagaaagccgcctgcgaacagtccgatcttaccccaattgcatttcatggcaaatacctccaaaaatagttgttttatatttaatagaataatatcacaaaatccgacatttttctaccccgaaaagacagttgcgaaatcattgcaaatacttcaaactcccgaaaaaaactgacgtgattacatgtttttcgcttgtagtacccgcaatacttttacgttttttcggaaaacaaaggctttgtatctgaaaaatctcgaaaatttttcagttgaggctccaatcggacatttttacttaaaaacgaattgaacgagcagcatatagcatactgttcctcccgctatggaaagcagcatttgccttttccacagatgaagagagacaacggcggctattgcaatgagttcgggtaacccgtggcttcctgagaatatgctcacatatttgagacagtaaacgacaagcaaaccgaaaatcgctgacggaagtaccgttccgagatatgaaatatatttcggagtcggctttcccgcgggaaaaacaacgaatggaatataacgtgtcagcatcgtagcaaaaacaacaaccgctaccgttattatctgttgcgttactgtcattttgcttcaccgcctttcttttcaaaaggcttgcgcagaatcgtcagcgccgcaagtatcgcaaacattgcgggcagcataaaatttgaagaaccgaatactgcaaggctcaataccgaaagcccgagcccgataagagagggaaagtggtttttgtctttgaaccattgttcgagaaaaatgacaacgaacattgccgtcataacaaattcaagcccttttgtgtcgaacgttatgaacgagccgaaaatgccgccgagcgtcgcacccgcaacccaatatatctgattcagaagcgttacgaaaaacataaaccaccctcggtcaacgtctttcggtatgtccgcggtgtaattgaccgaaaatgtttcgtcgcacattccgaaaataagataaatctttttaagtcccgtgcctttgaatttgtcaagcatggatatgccgtaaaatatatgccgcgcgttcagcataagagccattacaaacgcttgaacgggatcggacgaaccgagcagcagattgaccgttacgaactctaccgaacccgcaaaaatggttatgctcatcagcatggggtaaacaaagttaaagccggaaacattcatgtaaatcccatacgtcattccgagaaacaggaaacccgcaagaatcggaaccgtgtgggggaacgccgcttttaaggattttatatacttgttttgtgtttttgtttccgtatttgttttcattgccgcttttttgttaaatcttacagggctgtaaaaaacttacttttacagccccgcaaaaaattttttccttgttaaactttttaatagtagattgaaccctcatagacgagttttgtgtcgcccgtaaggattattccgttttcgccgtagtttacggtgaggtcaccgccgcgaaccttgacggttatgtcttcgcctttcttgcagtatccgttttcgaccgccgcaacaacagccgcacaagcgcccgtgccgcaggcgagggtctcgccgcttccgcgctcccaaacgcggattttgagcatagtcgggttgacaactcttacaaattccgtgttgacacgctcggggaatatcggtgcgttttcgaactgcggacctaccgttgcaagatctaccgcgtcaacggaatcgcagaacactacgcaatgcgggtttccgacggaaacgcacgttacgttatattcgttgcccgcaacggttatcggtgaatttataagtttgtctttgtccgttatcacgggcacggcagccgctgtcagatccgctttcccgatgtttacatcagccagcgtcactttgccgtttcgagtgtagagtgtcaggttctttataccgcttgaagtttctatcgtaatatctgttttcggcactatgccgtggtcgtagaggtatttgccgacggagcgtatgcagttgcctcccatcgacccctccgagccgtcacggttgaatactcgcatttttgcatccgcgacttccgatttctctatcagcgcaagtccgtccgcaccaatgccgaaatggcggtcgcatatacctatgctgatagattcggggcagtcgatgttgccgtctctgccgtcgatgatgatatagtcgtcgcctgtcgcctgcatcttgaagaaatctatcttttgtttttcttcacgcagtttgttgatgtcaacaagttccgtgttgctttcgttgaacccgcccgcgatgatgtccgccgccgcgtgcgccgtgtcaagagaagtgaagcagggtacagaaagctgcagacagcgtctgttcaacgcaatatattcatccagtgtgccgtcaagcaaagcgcccgtgtaaagaacgtaacttattttgccgtcatcaagaagcggaacaaagtctttgaatgtgacttccgttacgtcaatgccgagagaacgtacagcctctgccgtttcgggtgtcgcataaatcgagaatttaaggtcgtcgagttttttcgcaagagaaacaacttcgagcaagtcgtgcgtgtcaacgcttaaaagcactccgacgcttccgtccttgtgcgggtatttgaagtttctgcccgaggcggtcattcccttaaaaagagcctcgcttaatgttctacctatgccgagaacttcgcccgtggacttcatctcaggtccgagtgacgcattcgcatctataagtttttcaaaagagaaaacagggaatttgaccgcataatacggcggagttctgtaaagtcccgtgccgtaacccgcgtcgcggagtttgccgccgagcattacgcttgaagctacatcgaccatgggaacgcccgtgaccttgcttatgtagggaacggttctcgacgctctcgggttgacctcgattacataaagttcgccgtgccagataaggtactgaatatttacaagtccttttgtgccgagcgccagcgcaagtttttcggagcaatcgacaatagtctgcgtcatcttgtcgttaatgctgtaaggcgggtataccgcaatggagtcgccgctgtgaaccccggcgcgttcgatatgttccattattccgggaatgagcacgtcttctccgtccgagataacatcgacttcgagttctacgcccatcatatatttatcgacgagaaccgggttgtctatcttttgcgcgagtattctgcgcatataaaggcggacttccttttcatcgtggactattctcatattctgcccgccgataacgtatgagggacggagcagtaccggatagcctattctttcagccgcggcaacggcttcttcttccgtcgaaacaccgcagcccacgggtctgtgtatgttgaatttttcaagcagcgcgtcaaaacgttctctgtcttccgcaacgtctatgccctctgcggaagtgccgagaatgggtattcccgctttatccagcgcgcctgtcagttttatggcggtctgaccgccgaacgccacaacaacaccgacgggtttttcaatgcggattatgttcatcacgtcttcttcgcagagcggctcaaaataaagcctgtccgccgtgtcatagtccgtcgagaccgtttcggggttgttgtttatgataacaacgtcatatcccatttgtttcaacgaccaaacgcagtgaacggacgagtagtcaaactcgatgccctgacctatgcgtatcggtcccgagccgagaacgattacaacgggctttccgcttctgccgaatttgacagcttcgcacgagccgtccgcaacggaatagaaatacggcgtttccgcatcaaattccgcggcgcaggtgtccaccattttatatgaaagcgtgaagcgcgggcagggaagaatgtcacagcccgaaagtcttttaagcgccttgtcgggatagccgaatttctttccttgcaggtatttttcggaatcaagtccgttttctatgctcttttcatagtccgcaagatgtttgagtttgttcaggaaaaacgtatctacacgggtaacgtcgtggatatgttcaagcgtaacgcccgcttttatcgcctcgaatattgtaaacagtctgcggtcgtcgggtgttgcaagccttgtttcgaggtcattgtccgatatcgggcgtgcattgagtgtgtcaagcgagatctccgcaccgcacaccgctttcatcagcgcattttcaaaagacggcgcgatagccataacttcgcctgtcgctttcatctgcgtgccgagttttcgggacgcacccacaaacttgtcgaacggccatttcgggaactttaccacaacgtagtcaagcgcgggttcaaagcacgcacaagtcttgcccgttatatcgtttttgatttcgtcgagagtgtagccgagcgcgatttttgtcgttatcttcgcgatggggtagcccgtcgctttcgacgcaagcgccgacgaacgcgaaactctcggattgacctcgattaccgaataatcaaaactgttcgggtcaagcgcgaactggcagttgcagccgccgactattccgagcgcggaaatgatgttcagcgacgccgaacggagcatctgatattctgtgtccgaaagcgtcagcgcgggtgcgacaacgatgctgtcgcccgtgtgtattccgaccgggtcgaagttttccattgagcagaccgctatggcgttgcccgccgcgtctctcatcgtttcaaactctatctctttccagccgaatatgtatttttccacgagtatctgcgttatgggggaagcgtcaatccccgtttttgcggcttttttcatctgttccgcgtcataagccacaccgccgcccgttccgccgagcgtgaatgcgggacggatgatcacgggataacctatcttttcggcgatttcgagagcgtcttcaaccgttgtggcaatatcggaaggaaccgtcggttcgcctatctgcgccattgtttccttgaacagttttctgtcttcggctttgtctatcgcttctgcattcgtgccgataaggcgtacgttgtgatcttccagaaaaccgtctttttcaagttctgtcgcaagcgtcagtcccgtctgtccgccgagcgaggcaagcaaactgtcgggcttttctttctcgataacgcgctcaatggttctttttgtcagcggttcaagatatatttcatcggcaagagccttgtccgtcattatcgttgcggggtttgagttgacgagcacaacgtttacgcccgcatctttaagcacgcggcacgcctgcgctcccgcatagtcgaactcagccgcctgtccgataactatcggccccgagccgataacgagaactttttttatgtttgtgtcaaacggcatatcagttcctgcctttctgcatcagttcgcaaaatctgtcaaagagaaattcggtgtctttcggacccgaacacgcttcggggtggaattggacggaaaaagcgttgtattcgggatagtcgataccctcacacgttccgtcgtttgcgtttacccagcgcacaacgccgtttttgatgctcttttcgtcaaccgcatatccgtgattctggcttgtgataaacgttcttgttcccaaagcgtccctgacgggctggttagcgcctctgtgtccgtatttgagtttgaacgtccgtgctccctgcgaaagagccataagctggtgaccgagacatattccgaatatgggaacgtttccgaacagtttgcctatctctttgattatctgcgtattctccgcagggtcgccgggaccgttggaaagcataactccgtcgggtttttccgcaaggatttcttccgcggtcgtatcgtagggaacggacacgacttcacacccgcgtttgcaaagacagcgttcgatgtttgcctttgctccgaaatccataagcacaactctgaattttctgtctccgacgggcgtaaaaatcgtttttttcgatgtgctgacgttctttacggcgtccttgtcagagtatcttttcaaactctcaaaaacagcagtagaagcggcggcacccttcggaatgtcgtcgcttatcgttgcgttcataactccgtattcacggataatgcgtgtcagccgtcttgtgtcaacgccgcttatgcccggaataccgttgtttttaagaaatgtatcgagggtatattccgctcggaaatttgacggttcgtcgcatttttcatgtacgacgtatcccttgacaaagcatttgccctcgaaatcgggactgattatgccgtaatttcctatcagcggaaatgtctgtgtaacaatctgcccgtaataactcgggtcggtcaatgtttcgatgtaaccgcacataccggtcgtgaaaactatttctccgacctgcgtcacgtccgcgccgaacgcttcgccctcaaaaacgcttccgtcctgcaaaataagatatctttttttcatactcatacttccgtaagtgttgccgccataacggcttttattgtgtgcatcctgttttccgcttctcggaaaaccacggaatttttactctcaaatacttcgtccgtaacttccatttctgttctgccgaacttttcgcccatctctttgcctatctttgttttgaggtcgtgataagagggcagacaatgcataaatatcgtcgtggcttttcccgttttgcgcataagttccgcatttacctgatacggcgaaagttcttctatgcgctccgtccaaacgctttctggttctcccatggagacccagatatccgtatatataacgtccgcgtccttgaccgcttttgtcgcgtcggtctcaaacctgagtacggagccgctttcttttgcaaactcttcgcattttgcaacgaggtcttttgacggaaaatatttttcgggacagcacgccgtgaagttcagcccgagttttgcgcaaccgaccataagcgagttgcccatgttgaaccgtgcgtcgcccatgtaaacaaaatttatgcctttcagtttgccaaactgttcccgtatggtcagcatatcggcaagtatctgcgtcgggtgcgcttcgtccgtcagcccgttccaaacggggacgtcggaatattcggcgagttcttcaacggttttctgcgcaaatcctctgtactctatgccctcgaacatcgacgaaagcacacgcgccgtgtccgcaatgctttcttttttgcctatctgcgagccttgcgggtcaagatacgtcacacccatgccgaggtcgtgcgccgcaacttcaaaactgcaccgcgtccgtgtgcttgtcttttcgaagataagcgcaatgtttttgccgttgcaatacctgtgcggtacgccgtcctttttcagcgttttcaacttttcggcaaggtcaatcagatatgttatctcctcacccgaaaagtcgagcagcttcaaaaagtctcttcctttcaaattcattctttttcctccgcgcaaacttttttcagtatatcaatggatttttccagcaattcaaacggaatgttcaatgcgggcaacaggcgtaccttgtcttttgccgtcaaaacgagaaccccgtttttcatacattcggtaacgacatcttttgcgggacgcttcgtttttactcctatcataagtccgagccccacaacgctttcaacacccgcggcaccgcccaattcgttgaatatatattcggattttttgcgaacgtcttcaagcagggtatcgtcaatccttgaaagcacattcagcgctcccgcgcagcaaacggggtttccgccgaatgtcgaaccgtgcgaaccgggagtgaaaacgttcccgactttttcgccgagcattgtcgcgccgagcggcaacccgccgcaaagcccttttgccgtggacacgatgtcgggagtgaaaccgtaattcatatatgcgtaaagttttccgcttctgccgttgccgcattgcacttcgtccgcaataagcagtatatctttttcttttgcgatattcaccatcgcccgaacgaactctttttcaagcggaataacgccgccctcaccgcggacaatttcaaacattatcgccgccgtgtcgtctccgacttccgctttcaacgcttcttccgtcggttcgacggaaacgaagccctctgtcagcggcagaaaatcgtgatgaaatgcgtcctgtcccgttgccgcaagcgttgtcagcgttcttccgtggaaactgttgttgagcgtgattattttgaagcagtcttttccttttttatccgcggcatatttccttgccgcctttatcgcgcattcgtttgcctccgcgcccgaattggaaaagaatactttcttcattccggtttttttgcagagttcctccgcaagttttgcgcagggttcggtgtaataaaggtttgaggtgtgctggaattttccgagctgcgcggtgaccgcttttatccactcttcgtccgcaacgccgaatgtgtttaccgcaattccgctcccgaggtctatgtattccttgccgtcgcaatcgtaaacaagcgacccctttcctgaaactatatcaatgggaaaacgcgcgtatgtgtttgcaacgtattccctgtcagtcgaaaatatatcagtcatttttgtctccctcaaacatcgttccgatgccctcgtccgtcaatgtttcaacaagaatagagtgcggaacctgtccgtcaatgatgaaaacgcgttgaacgccgtccgcaatggcctgcacgcagcattcgactttcggaatcattccgcctgcgataacgccgtcgtcaacaagtttttttgattcggaaaccgtcaggtgcgaaataagcgatgacgtgtcgtttttgtctttgagtattcccgcaatatcggtcagaatgataagactttccgctttcagtgcacccgctatctttgccgccgccgtgtctgcgtttatgttgtacacttttccgtcatcgtcgcagccgagcgtggaaataacgggaatatatcctttttcgagaacgtcgagtatgggctgcgggtcgatttccgtaatctttcccacatatccgagacgttcgtcttttatctgcgcttttatcatgtgtccgtcaagtcccgaaagccctatcgccgaaccgccgcgacattcaagcagattgacaaggcttttgtttattttgcccgcaagcaccatttgcgcaacttctatcgtctcttcgtcggtaacgcgaagtccgcctacaaactgcgtctcttttcctatttttgaaagcatttccgttatttcgggaccgccgccgtgaacaagaacaactttcacgcctatcaggttcaaaagcacgatgtctcttgcaacggaatctttcagtttttcgcttgtcattgcgttcccgccgtatttcacaacgagaattttgcccgtatatttttttatgtaggggagcgcatgaacaagtattcttgctctgtcggcatttgaaacagtcatcttgtccgctcctctcatgtgcgataatcgccgtttatcttaacgtaatcgtatgtcaggtcgcaaccccacgcaacggcgcttcccgtgccgtcgtcaaggtcgatctctatcgttatatcgtgttcgagcagtatatttttcgcaagttcttccgaaaaatccactcccgcgccgtctttgcacaccgttatccgtcccgcggaagatatgaacgtaacgccgacctttgaaacatcgacatcagcgccgctgtaaccgagcgcgcagagaacgcgtccccagttcgcgtccgctccgaacatcgccgctttgacaagggaagaacatataacggactttgcaaccgtttttgcgcagacctcgtttttcgctccgatgacggcacactctatcatctttgtcgcgccctcgccgtcgcccgcaatggatttgcaaaggtgaaccgtgactgtgttgagcgcctgcataaacacttcatagtcgccgttcggctcggttatctccttgttttcggcttcaccgttcgcaagcataacgaccatatcgttggtcgaagtgtcgccgtccacgctgaccatgttgaatgtgctttgtatatccgtagaaagcgcttcggaaagcatttccgaacttatcgcgcagtcggttgttataaaaacaagcatcgtcgccatgttggggtgtatcattcccgagccttttgcaatgccgccgatatgacataccctgccgtccaactcaaactccacggcaatctcttttttctttgtatcggtcgtcattatgccctctgcggcaagttcgctgttatctccgagccccgaaacaagttcggctatcccgttcgagataggcgttacgtcaagcggcaagcctataactcccgttgacgcaaccacaacgtcgcttgcttttattccgagcgccgtcgccgcgatctcactcatttcttcggctttttcaacgccgtccgcgttgcaggtgttcgcgtttccgctgttgcagattatcgcttttgcctttccgttggtaaggtgttgttttgtcacaagcaggggagctcccttgacaagatttgtcgtatagaccgccgccgcgtttgcgactttgtccgaaacgataagcgcaatgtccctttttgttttgttcttgcgtattccgcaatgtattccgtttgctttgaatcctttcgcggcacaaacgccgccgtttattatctccatattcatatactccgttttccgctcttcgcgtacattttcactctttgtcttggttctttcactctttgttctggttctttcactctttacgttatattcagcccgcttgtttcgtctttgccgagaattatattcataacttcgaccgccgcacccgacgcgccttttccgagattgtcgtaaaccgccgtcagaagtattctttcatcgtttccgaaaacgcatatcttcatcgaatccaatcccgacatcgccgccgcggaaagcattccgtccgccgccttatcttcataagagactatcgcggaagcgtatttggatttgtatatctctttgatttcgtccgctcctacaccgttttgcaaatcggaagagaacaggggaacggtcacttccattccgctgtaaaacggcgccacaacaggacagaatatcggcgcgttttcaagccccgttatcgcctgcatttctttcagatgcttgtggttctgcgtcagaccgtactgtctcggcgcttccaaaagtctgtccctgccgtcctgttcatattgcgctatcatcttttttccgccgccgctgtaacccgtcagcgaatgacagcacagttttatgctcgggtcgataactttttcgtcaatcaacggttttacaagagcgataaaaccgcttgcgtgacaccccggaacagctatccttttcgcgcttttcagtctgtctgaaaaatccttaccgagttcgggaaaaccgtatacccaaccgtttgccgttctgtgcgccgtcgatgtgtcaataacaacggcgttcgggttttctatcattttcaccgcttcgaccgccgcatcgtcgggcagacacaaaaaagcaatgtccgcattgtttaacgccgctttgcgcttttctgcgtttttcctgtcttcctccgcaagcgtcagcagttcgatgtcgtctctctgtccgagcctttcgtatatccgaagccccgtcgttcccgccttgccgtcgataaatacctttttcactctttttcaccgtctttcgaagccgttgcataaataatccgacttgcggattttatgtgcgacctgatttgctgtaaggataattattcacaaaactgcatataaatgaattgttatgcatatataatagcactttttgagcatttatgcaatatcttaatttgaaaaagttaaaaaacggcaattcgtacaaacacaggcgtatatcaaatatatgaattgtatatattggaaaaacgctgcacgaaaaaagaaaaaagcgtttccaaagaaacgcttaaaaatcggtgattatattactgtcggcggaataagaatttgaaaaaacggggtaaaaaggcactttttttcggcaattcgttttgcaaacaaacaccgttcccatctcgttgccctccgccttaaattctctttttttattctatcatatataaagaccgatgtcaatacgccataaagtattatttaattgaactttttgcggacggttaaaatacactatggcattttatgatttaactatgcatcagccaataaatgtaaagtacagtatttctgtatgaccgcttgcagcgagagagccggagcgtgaccgagccgcagcgagacctgccgattccgtgttggcagagaataaaatcgacaagcagcatgtgcggcttgtcggtttttggtgcgggtaacaggacttgaacctgcacagccttgcgaccattagaacctgaatctaacgcgtctgccaattccgccatacccgcatattctgttgttcctcaatttttacacggcgagggcaaccgaggcggagcgttctgcttgatccgcttacataaaaaagcattactgcgattttatcgtaaatacaaggagttatggtgcggatgaagggacttgaacccccacgtctgagacatcggatcctaaatccgacgcgtctgccaattccgccacacccgcagacatagacaaaacaactccgttgctaaaagattataccacacaaagcgtcggttgtcaatagcaacggagttaaaaaacctttttgatttgtgaaattttgttgatagggaagcgttactttcggatcattcggcagagaataccgaaactatcccgttataaacgaaaacagccttgcaaaatatgttccgaagcctgcggcggagactttttcggtcgtgattatcgggcaggtctttattgtttcaccgttgagcgtgtatgtgaccgttccgacctccgtgcccgcttctatcggggctgtgagttcgctttcaactgttatatgtttttcgacgtttcgtccctgtccttttgcaacaagcagatcaagcccctccgattcacggattccgacgcttgaagatgttcctttcaatacgggtatcggttgatattcttctgcttttgaactgtaaacggaaaagttcgcaaacccgaaatcgagcatttttgccgtgtccttgaatttgtcttttgcggacggcgcgcccatgaccgtggcaatcaactgcattccgtcacgttttgccgtgccgctgaaacaatgtttcgcaagttgcgtgtaaccggtcttcatgccgttcattccgttgtaggttttgagcatcttgtttgtgtttgcaagcccgaactgaccgccccgcaaagtgtccatccaaatcgttgtatattcaaatattctttcatggagcaaaagagcgcgtgtcataatcgccatatcttttgcggtcgtataatggttgtcgtcgtcaaaaagtcccgtgcagtttgtgaaatgcgtgttgttcattccgagagcggaggcgtgttcgttcatcatctgaacaaagccttcttccgagcccgcaacgaactccgccattgcaacggttgcgtcgtttgcgctcggaacggcgatagcctttatcatatcgttcacgcacatctgctctccgacttcgaggtatatctgcgttccgcccatcgacgcggcgtgttcacttgttgtaacggtatcttccgttgtgaacgttcctttgtcgagttcttccattattatcagaagcgtcataacttttgtcacgcttgccggggcatggcgcgcgtcgccgtttgctgcgtaaagaatcttgcccgtcgaggcctccataagcaccgccgaagctgccgtcaggtcaagtttgatttctggtgaatcggtttccacacttgaaagataattcattacatccgaaaatgttttgatttccgcttccgtgtcggtctcgtctgcgtttgtcataacggcgcacccgagaaaaagtgtcgccgcaagtatcagactgaaaatttttttcatatcgctgtctccgtttacttgaatagtgatgagaaaaaaccgtttttctgcgaattttggttgggcgggtcgatacagacaagcaccgcgtctttgccgattttctgaatatcgcaccaacggatatatatttcttctccgcgcccgaaaagtccgaaaaaccgtgcgcgtcccaaaacggttattgcgcagatgtcgcctttcggcagcgtgaactccacgtcgtccacaagcccgagccgcgccccgtccgtgacgttgacaacttctttgcaccgcaattcgtttacgcgcatgtttatgacctccgaaccgtttgtctgttaatctatatgccgaaaatttgtccgttatgatattgctttttcgacggcggtatgatataatcaatcaaaaggggagatttgaaaacaaaatgaaagtgtattacgaaacaactgttcccgcaaatatcgtaaaagataagataaagcgaaaatacggagagtatctgcaagagattctttccaaaaaactctttcccgaatttgtaaaaccgcgggaaaaacttaacagacttgattattattacaacacatacgcagagaagaaaaccgtttccgagggtgtgaattcccgctaccgtatctcgataaccgtcgaacagttgcgcggatattcttccgtttgcgtgaatgttgtgaacggttggaaaaagttgctgcctgtcgatccgtttgcacttatccctgtgtgttcgtttggcccgatttcgttattgcctacgccgggtcaaattcggagtggtttagaaaggtttttattccgttcgccactgcttcattttttgatttttacgggaataggtgctgtcgtgtccgttcttttttcgttcttgcgcagagtgcttacagaaccgaaagaagacccgcagcagaaactcgacgcctttgccgaacggcttatttcggacattccgaacctgaaaaaaacagatatacaaaaataagaaatgcctaccgcatatttgaaatgtgcggtaggcatattaaatgcttgttttgttgattgatgactatttcacggtgtcggtgaaaatctgttcctcgtcgtctccgtcgtccttgttttcttcttctttcgcaatatatttcacaagcacgggatataccgcgaaattgttgagcaggaatacaagcgaaaagttcgtcagaagcaaaaaggcaagtcctaattgccagaagtaagcgaaggcgccgagaaatacgattgcgaaaagcaacattccgagcgttcggaaaatttttgcggtgcagaggataaggctgtttcttatcaactgtttaagcggcaaatcaaaagataccatcatcgggaacagatagggcagagaacccgccgcaagaagcactattaagagcataagcccgaacagaagcgcaaacccaaacccgccgcctgttgtatactgcgaacggtaccacgatattgcaaatccgagcagaatgccgacgatgatgtaaagcaccgttaccgccgtgccctgcttgaaattctctctgcactttttaagaaaatcgtgataagggtcaacgtgaacgccgcggacatagtttctcataacatagttgagcgcggcggttgacgcgccaatcgtaactatcggaagacagcagaagagataaagcaggttcagtccgaccattgtcggaaaatgcgtaaaatacgttttgaaaaatctgatataggcaggggctttttcttcgtttttgctgaccccgggacctattttgtctttgaacgaccaaatgctcataaattgtcctcggattttaatgtatgtatttgattgcgagcggcgtaagaaaaatgcgccacagcacaggtattgccgccagcacaaaaagcgcgccgcagactgcgaaataccgctttataagttttttgagaattgctctgtccgttgccctgtatgcgtgatacgaaaggtccgttgcttcaacgcagaacaggcacagcacgcataatatcagaaacgcataggggagtatcgcagttgcgaccgtaagcgcgccgcgaacaccgttaagacagtagcacgcacttgccgttatccccaaaaacatcgctttcagaaacagaaaaagattgcagaaccaaaagccgaacagcgaaaaacctagcagaaacagcgtgacagtaaaaaacagcgtatctgcaattatcggaaaaattttgaccgaattttcaaatgaggtcttgtactctgcgcagatttgcgaaagtccgccgccgcagaaaaagccgatatagagacagcctgtgataaatcctatggcgataacgcaaagcgcaattaaaaaaatactgtttttatattttcgctcaaacggcatttttgcgaacctctttcatcagtcttacggtcaatgactatgaaaaaaaaacagttcttatgccgtcaaaaaactattttgccgagttgaccccgaaaattccgccgagagacgccgtgcaaatctccacggcaaacagcgcgaatacaagcgctccgacgtctccgagccctttgaagattatgcaggcgagaatgtggataagcgcatagaacgccccgcatattattccgtttcggagtccgttgctctttatcagacgtgccgtcagaaaccctccgaaaaacgaacctcccgcaatgcttatccccgcaaaaaggggcataaacccgtccgagatccgcgttaaagaaagaatcagcgcaaaaatgcacatcagcgcgcaaaaaacaacggcgccgccgagtattcctattaaaaaccgcaacagaaaaacgcctttcggcaggtctgagttttttttgtcgtaatagttcataaacatcacactcccgagtctcggcaacggcttttgccgcgcctgtcaaaacaagaatatgatgtttatgaaacgattattctcagtcagagattacttcttcttttcgccgttcagttttgcttctgcggcggcactttcagccgcaaggctttccgcaccggcagcgtctttggattgaagcgcccatctctttaccgctatcttggacttgtcagcggaagattcgatgataaacaggtcttcgtcttctttgatctgacgaacgatgccgttgataccgccgatggtggtgatggtatctccgaccataacgccgttacgcattttctgtgtttctttttcctgctttttctgaggtctgattataagaagccaaaaaacaagaacaagaccgatgatcataagcgcggggaagaggtactgctgaaccgttgcccagctgaatcccgacgaagcggcgctcgatgctgtcgaagttgcagcctcggttgcttctttcgtaagtgcaataagaaaattcatgattgtttcctccgaaattatatttatagatattttaacatatttttaccgttattgcaataggtgatacaaaactttcgcaaaccgttaaattcttctgcccaaaacttctttccgttcacggtaaaattcttcgtatctgccctctgcgagagcctgtcttatctttgccgtaaggtcgttatagaagaacagattgtgcattacggcaagtctcatcccgagcatttcgtcggcttttatcaggtgtctgacatacgctttcgaatatgttttgcagacggggcattcgcagttttcgtctatgggagagaagtcgcgcgcgtatttctcgtttttgatgttgattatgccttttgacgtgaacagatgtccgtgacgggcatttcttgacggcataacgcaatcgaagaagtcaacgcctctgtaaaccgcttcaagaatattgacgggggtgcccacgcccataagataacgcggtttgtttttaggcataaacggttcgaccgcctcaattattctgtacatttcctcggcgctttcgccgaccgccaatccgcctatcgcatagccgtcaaggtcgagtgtcgctatatttttcatgtgcgtttgacgcaggtcttcaaaagtgcagccctgatttataccccagagcatttgttttggattgaccgcaacgcccgtttctttgagtctgtcaagttcggtcctgcatctgacaagccagcggtacgttctttcgcacgattttttcgcatatccgtattccgcggggttttcaacgcattcgtcaaaagccatagcaatggtggaaccgagattcgcctgtatctgcatactttcttccggtcccatgaagattcggtgcccgtcaaggtggcagttaaacgtaacgccctcttcttttatctttcggagctgtgccagagagaaaacctgaaatccgccgctgtcggtcagaatgggtctgtcccaatgaacgaacttgtgaagtccgcccgcttccgcgacaagtttgtcgccgggtctgacgtgcagatgatatgtgttgcacaaaagcacctggcagccgagcgttttcaagtcgtccgcgctgacggcgccttttattgcgcccgcggttcccacgttcatgaaaaccggcgtctgcaccgtgccatggacggtctcgaatttgccgagacgcgcgtttccttcctgttttataagtgtatacatagttttgcctttcaatacggtgtgcccgtgtttttaataaatgaacatcgcgtcgccgaacgagaagaatctgtatttttccttgaccgcctcttcataagtcgcgagtatcgtttctctgtcaacgagcgcggaaacaagcattatcagcgtgctttcgggcagatggaagttcgttataagtctgtctatgacatgaaattcaaagccgggatagatgaaaatatcggtctctcccgactgcgctttcagcggcatagagcgtcccgccgtttcgagaacgcggacagacgttgttcccaccgccgtgacctttccgcctcgggcttttgttctgtttatcatatcgaccgtctgctgcggcaagatgtaatattcgctgtgcattttgtgctgcgtcgggtcgtcaactttgacgggtctgaacgttccgagcccgacgtgcagggtaacatatcctatctccacgccctttgccttgattttttcgagcaattcctgcgtgaaatgcaagcctgctgtcggtgcggcaacggagccgtcatattttgcgtatacggtctgataacggttcgcgtcttttagtttttcgtgtatatacggcggaagaggcatttcgccgagttgtttgagtctttcggtaacgtcgccgtcgtatgtgaattttatcgttctgtttccgtcttccgcaatgtcgagaacctcgcattgcacgtcttctatgtcaagtatcgttcctatctttgtctttttgcccggtttgcagagacattcccaaacatcggcgccgcttgtgggacgaagcagaaatatttcgaccaccgcgcccgtgtcgcgtcttaccgcataaagtcttgcgggaataactctcgaatcgttcagcacaaggcagtcgccctcgttgaaataatccaaaatgtcggaaaaatgacggtgcgaaatttcatgtgtttttctgtttaagcagagaagtctcgagccgtctcttttttcaagaggtttctgcgctatgagttcctgcggcaggtcataataaaaatcggataatctcatctttttgttaaagaatctcccttgctaaaatgttgacaaaacgccgaaaatgtgctatactttcaatattataatgcaatacgaaaaatttgtcaaccttatcggggtaacaaaacataaaactttttcgtagtatattggtaggagtgatcgaaatgcaaaatctgaaaatcgccatcgtcggcgcaacgggcatggtcggcagaacctttttgaaggtctgcgaggagtacgaccttaaagcggattacacgcttttggcttctgcgcgttcggcgggcaaaaagcttgaattcttcggcaaagagcatgaagttaaggaactcacggaacacagttttgacgagggctttgacatcgctcttttctctgcgggcggctcgacgagcgagaaattttctccgatagcagcggcgcacggatgcgttgttatagacaacagttccgcgtggcgtatggaccccgaagtgccccttgtcgttcccgaagtgaaccccgaggatatcaagtggaacaagggtataatcgcaaacccgaactgctcaacgatacaggctgtcgttgcgctcaaaccgctgcacgacaagtacggtatcaagagaatagtttattcgacttatcaggctgtttcgggcgcgggtgttgcgggctatgaagacctgaaaaacggaatcaacggcgaagcgccgaagaagttcccgtatcctatcttctcgaactgtctgccgcacatcgacgttttcggcgacgacggttataccaaagaagaaaagaaaatgataaacgagacgcgcaaaatcctgcatgacgacactctcagaataacggctacgaccgttcgcgttcccgtttttgactgccacagcgaatccatcaacgtcgaactgaaaaagcctttcgaacttgataacgtgagaaaagaacttgcggtttttgagggcattgtggttcaggacgatccgaagaacaacgtttatcccatggctgttacggcaaaggggacgaacgaggtttatgtcggaagattgagacgcgacgacagcgctgacaatgcgctcaatatgtgggtggtcgcggataatatccgcaagggtgccgcggcaaacgccgttcagatcgccctcaaactcatttccatgtgggagagcggcgaaatcaagaaatagggtgacttttttgcctcatgctccgatttttgtcggttccgcggcggctgtcacgactcctttcctcgaggacggttcactcgatctttattcgtttgaccgtatacttgattttattctcgaaaggaacaccgatgccgttgtcgtttgcggaacgacgggagaagcgtctactctgacagacgaggaaagaacggcgctcattgcgcgctgtatcaaaaaagtcaataaaaagattcccgtgattgcgggaacaggaagtaacaacaccgtccacgctctggaactgtcgcaaaaagcggctgacctcggcgtggatgctcttttgctcgtaactccgtattacaacaaaacaacgcaaaaaggacttgtcgaacattacggcttcatctccgagcgtgtggctttgccgatgatagtctacaatgttccgtcccgcaccggactgaacattttacccgagacgtatgccgagttgaaagaaattccgaacatagtggcgataaaagaagcgaacggcaatgtttcggctctttgcaaaactttcggactttgtcgtgattctcttgacgtttattcgggcgacgacgctctgataacgccgtgtctgtctctcggtgcaaaaggtgttattagcgttttggcaaatatctgtcccgctcaggttcatgaactctgcacatcgtttttcgagggcgaccatacaacggcggcgatgatccaaacggattaccacgaccttatcgaggctctgttctgtgaagtcaaccccgttcccgtcaaagttgctcagtcgcttctcgggctgtgcaccgacacggtgcggctgcctctcgcaaagatgagcgaaagcgcaagggaacggcttgtttcggcaatgcgtcggcattgtcttttgccatgaccggtggatgttccgaatattgccgcatcacgataaattattccgcagatacgaagaaaacttccgaatttcttcgcgcacttgcggaagcgggaatagaaactcacgcgctctgcggttcgttcggaaaaaagaacagactgacttttaccacaagggctgcaaatgtcgccgcggcgcttcgaagtgttgcgctccttaacacggacggaaaaagaacgaaaacgagagtggaagtctgccgaacgttcgatattgttcctttcaggggcttgtcttcgatttcggaagacgaaacgccgctttccgtttctgcgacaaggatagaaaaggctaaattttaaccgtcggggtcgaaagaccccgtctcttttttcagagtatacaatgaccgacggatcctgaacaattctttatgccgaaaatcaaaattacctaaaatgattaaagaaaaaatatctttcgctattgctaaacaggaaaatatatgatataatatatttataataagtcgcacggaggtgccgtccacgatgaaagaaagcgttcttcgcgctgtcgcggttttcgcggctgtcatcaatattcttgttttttccgtcttttctttttcgggaaatacggacgggacatcttccgcgcctgtttttgacaattcagataatatttattcagtttccgttttctcgccgaagtccgtttatcgtgacgaactcgtcgggggagcggatattgatttttccgtatacagaaacggagtgaaacttgcgtccgacgaaatttcatcattgaatatttctgtctccgccgacggcagaccgtttgagcgggagatattgtccgacggaacggttcgcgttcgcgtttacgggcttacggcttcttcgtttctttcaacttttgcaaaaccgctttctccgttctttcttaaaacaggcgattgccgtgtcagactgacgttttattcggcagaagatactatgacggtcggaaactccgcaacggtatgcgtcttgcccgagccgttcggaagatacgttttttatgtatttcttccgtttttggtattgttcattgctctcggctacgtttttaagagccgcttcggaaaaaaatacaggctgcttgcttttgacgttaccgagaccgacggaaaactttctttcagtcggaaagtaaagaaaaatcccgcaaaagtcggtttcagaagttttgttccgtatatcagaaacaaggcgtatgtcggcggagtaaaagttgcggcttacggggtctttcggaaacggttttatatccgcagtacaaacaaattgctttctttttccgtgcttcctttgacggagattgaaaacaacggtttaactcttcccgagactcggaaaaaaggcgctaaaaagtctcatatcattttttctgcgggagaagcagtattgttaaagacttccgacggatttgtttgtgtagcggcaaaagaagtaagaccgaaaagaaacgaaaattcttacaaaataaaagagttgtctgtttcggaaacggagcgttttgaagaacctgcggaaacggagggcaaaaaagaatgaaaaaactcggacacttttggtttgctccgcgtattttgcttatcctgcttgccgcgcttcttatctgcggaataatttttgtcggcgcgtgcgtcggctacggacggtcattcctcgatattgtggggtacgatgaagaagtaagcaaagccgatgtgataaacgcacttgaacgcggagaagatatttcatctttgggtttgaccgatgtcgagatatcgaacgccgtaaaagcgtatcagaaactttccgctcctttggcactgcgcgatacgcagaataccacaacagaagaacttttgtcccgattggaacggcaggcggcttacaattcgacgagagcatcggcgtatctgacaaattatctgcttgtcagcacggataaggacgatacggaaatgatactctgcgttctgctgtcgctcaattcgaaaacgggcggctgcgttataacgtctctgccgtcgtatatgcttgtgcttgacgacgaactcggaatgacaaaactcggaaacgtgtacttccgacgtggaataaaaggcgttgcggaagattgcggaaaaatgttcggactgaccgtatcggaaacgggaaaactcaacatcgggtcagccgctgaacttataaccgccgcggatacggatttcgggtatgagataatcgtttcaaactcaggtataggcgtaaaacacaacagcaagccgctgacgttttccgcgcttgacaaaatgcttcgtttgcttgtccgcgatgtgagaacgaatatggatacgttgtctctttaccgctttgcgctcggagttcgcaatgctcttaaaacagagatgcttatgatatctccagcggcaatagaaacgagcgctgttacgacttatgacggcaattcggcattggtcgtcgattttatcgccgcaagaagccttatcggctgatgtgattgttacggaggaagtatgaccgaaaatgtaaaggtgaccgaaaagggaaatgacggtgcgatttttctgtttcatcagggaacgaattttcgcgcttacgaatatatgggctgccaccctctcggaaaagataggactgtattcagaacatgggcgccgaaagccgattcgatagaacttgtctccgatttcacgggctgggatgagggcattcctttcgaaaaagtctccgaaaacgggatatggcatgccatagttgacattccttatagcgaacttgtaggaaaattctataaattccgcgtgacgggcggcggggttacacgttataaatccgacccgtatgcctttgaatcgcagacgcttgaaaaaactgcgtcgatagttgccaaaccgtcggattttgcatggaacgattctgcttggctcaaacacagaaaaagcatttttgcgggcggcaggcatttttactccgctccgatgaatatatatgaaatgcacctcggttcgtggcgcacacgcgacggcgcggataattccgacggaaaacattatctgaactatcgcgagattgccgatttgcttgttccttatgtaaaacacctcggctatacgcacatcgaacttatgcccattgcggaatacccgtttgacggctcatggggctatcaggtctgcggctattacgcgcctacatcgcgtttcggaacgcccgacgatttcagatactttgtcaacacgcttcacgccgcgggcgtaggcgttattctggactgggttcccgcgcattttcccaaggacgagcacggactgtttgagtttgacggtcacccgctttacgaatatacgggcaaagaccgtatggaacataaaggttggggtacacgctgttttgacgtcggtcgccccgaggttcaatctttccttatctcaaacgcgctgtattggcttcgcgaatttcatcttgacggacttcgcatagatgcggttgcgtcaatgctgtatctcgattacgacagaaaacccggggaatggattcccaacgcttacggcgaaaataagaatcttgaagcgattgcctttttcagaaaactgaacaccgccattttcggcgagttcggcgatgttctgatgatagcggaagaatccaccgcatggccgatggttacgggacccgtggacaagggcggcctcggcttcaatttcaagtggaatatgggctggtcgaacgatatgttcgattatgtcgcccgtgacccgctgttcagacggtacgaccacgaaaaactgacgttcccgctgatgtatgcgttttcggaaaactatattctgccggtttctcacgatgaagtcgttcacggcaaaaaatcgcttcttgacaagatgttcggcgaatatgaggacaagtttgcgtgtatgcgcgcattccttgtttatatgataactctgcccggcaaaaaaatgacgtttatgggcacggagtttgcacctttccgcgagtgggattatcagaatcaactcgaatggtttatgctcgattatcccatgcacgcaaaaatgtttgagtttacatcggcgctcaacaacttttatctgcaaacacccgcgctctggcagatagacgacgggtgggacggctttgagtggatagatgccgacctgcgcgatatgaacactataacatacagaagaaaatcttcggacggcgcgtcggtttccgtcatcatcaacttttcgcctgtggctcatgaacgttttcgcttaaaagttcccgaaaacggaacatatcgcgttgctttttcatcggacgacgaatgttacggcggcaaaaattctttggaaaaacggtcattcaaagcaagacgggacgaaaacggcggatattatattgacgtggacattcccgcatacggcggtcttataatttcagacgcaaagaaaaaacagggaagataaataaagataaaaaagaacagaaaaaaaatacggaggtacgatatgaacaccaagaaagaatgtgttgcgatgcttcttgcgggcgggcagggaagccgtctttacacgttgactgagaagaccgcaaagcctgcggtgcttttcggcggaaagtacaggataatagattttccgatgtcgaattgcgtcaattcgggtatagataccgtcggcgtgctgacccagtatcaaccgctcgtgctcaatgaatatatcggtaacggacagccgtgggatctggacagactttacggcggcgttatggttcttcctccttatcagggaaaacagggcgcggattggtataaaggcacggcaaacgccatatatcagaacttgcagtttattaaccgctacgaccccgattatgttcttattctttcgggcgaccatatctataaaatggactacgcaaaaatgctggacgcgcataaaaaagcgggcgcggattgcacgattgcggttttgagcgtgcctctcgatcaagcgagccgtttcggcataatgaacacggacgatacgggcagaataatcgagtttgaagaaaaacccgcacacccgaaaagcacaaaagcgtcaatgggtatctatatattcaacaaaaaactgcttgaagaatatctgataaaagacgaagctgatcccgagtcttcaaaagatttcggcaaaaatgtcattcccgcaatgcttgccgacgaaaagaaacttttcgcctatccgtttgaggggtattggaaagacgtcggaactctgacaagcctttgggaagcaaacatggacttgctcggcacaaagcccgcgtttgacctgcatacaaaagattggcgcatctattccagaaacaacaatcttccgccgcactttatcgcggacacggcaacggttcagaactcactcataacagaggggtgcgacattcacggcacggttgtcaacagcgtgctttcaaacggcgttacggtcgaagcgggcgcatttgtgcgtgattccgtgctgatgaacaacgtaacggtaaagagcggcgccgttgtcgagtattccattgttgacagcgacgcagttataggcgaagatgccgttgtcggcaaagagcgttcggaagcaaaaggacttgccgttatcggtgaggggcttacgatagcggcgggcagagttatcgccgacggcgaaatgataggttccgcttcgaagaacaactgatgaaagggagagcattatgacaaccgcgggtattattttttctaacattcatgacagcaatatccccgaactcacaagcaaaaggactatggcgtccgttccgttcgcctgcaaatacagacttatagatttcaccctttcgaatatggtgaattcaaatataacggatatccgaatagttacgcagtacaattatcagtcgcttatggaccatatcggctcgggcaaggattgggacttggctcgccgttcgggcggtgtcaagatagttccgccgtacatttctgcgggttctccggcatcttcggtctatcccacacgccttgaagcgctgaaaaacgtcaattattccataactcacataaccgccgactacgtcgtgctttcggattgcgacgttatctgcaatattgacctgacggatatgatagagtatcatatcaaccggggcgcggacataacggttgcgacaaggcttgtcgaggtggacagcgagaccgcaaaaaagaatgttctttttcaggcgaacgatgagggcagaatcacggacgttatttcttacagcccgatattctgcggcaaggcgcacgtcaatctgaatatcctggtcatcaacagagattatctttttgagcttgtcgcagacgcaatttcgcacggttacagaagcttgacacgggatataatgacaaaccataccgttgacagaaaatattccgtttatgagttttcgggttattatgcgtgtctgtcgtctctgaacgattatttcggttgcagtcttgaccttatatctaacaaagagtcccgcaacgcattgttcaacgttaagaacagacctgtttataccaaagtcaaaaattccgcaccgacatatatcagccccgacgcaaaagtcagcaacagccttatcgcggacgactgtatgattctcggcgaagttgataactccatactgttccgaggcgttaaagtgggcaaggggacggttgtgagaaattccattctgttccaggacgtgtttacgggttcggacgttcacttaaactatgtgcttgccgataaaaacgccgttatatgcgacggagtgactttgagcgggcactctcaacttccgagttacatcgaaaaaggaaagtcgataggctgattttttccgcaaaaagaaatacgtcgaaaaggagtgtcgatatgaaaaaaatactatatgtcggttcagaggtcctgccgtttgcttcgacgggcggacttgcggacgtgcttgggtctttgcctgcggcggtcgcaaaaaaactcggtgacggcggcgatgttcgcgttgttttgccgatgtacaagtcggtcaaagaaaagttcctttcaaatatgacacgcgaatacgaaacatatataagtcttgcgtggcgctggcagtattgcggtatatggagcctttgcgacaagtgcgttaaatattatttcatagataacgaatactatttttgcagaggtcctctttacggcgaatacgacgatgccgaaaggttcgcatttttctgcaaagccgttatggaaatgatgaacattgtggatttccaccccgatgtgcttcacgcaaacgattggcaaagcgcgttgactgtcatctatctgaaacggaaatataataataacggggcatttgcgaatacccgcgccgtttataccattcacaatatcggctatcagggcagatacggtttcgacattctcggcgacgtgtttgaactttcggaagcggataaagagatagtcgagttcggcggggatataaacctgaccaagggtgctatcgtgtgcgccgataaagtaacgacggtaagccctcgctatgccgaagagataatgaccgattattattcggaggggctgtctcccgttctgaatatgtaccgattcaagacctgcggcattatcaacggcattgatatagcttattacaatccgcagaccgatacggaaattcccgcaaattattcggcaaaaagtttttcgggcaaagccgcagataaaaaagcgttgcaggaacgctgcggacttgaagtcagaaaagacgttccgatcatagcaatggtttcgcgccttgcttcgcataagggctttgaccttgtcagatacgttttggaggaaatccttgcgaatgacgttcagtttgttctgctcggaacgggcgaacacgaactcgaaaatttcttccgttatatcgcaaacaaatatcccggaaaagtgagcataaatcttgcctacgacaaggctttttcaaaacttatctatgccggttcggacatcttccttatgccgtcgctttcggaaccgtgcggtctttcgcagatgatagcgtcccgctacggaaccgtgcccgtcgttcgcgaaacgggaggtctgttcgatacgataaagccttacaacaaattcgacggcagcggcaacggcttcacatttgccaattacaacgcgcatgagatgaaagatgccgttttgcgtgcggttgaactgtatcatgatgaaaaagagtggaagaagttcgcaaaacacgcaatggaaatggatttctcgtggaacgcttccgcggaaaaatatcttcgtctgtatgacgatttgacataaaaacgaaccgttcgtctttcggaacggctcggaaacaggaaaaactgaaag

SEQ ID NO: 4448 - DNA, 5058 bp, Unknown
  16S sequences of unknown bacteria
tgccagttccccgatcgctacggatacgccgccggcaccgaagtcgttgcagcgcttgatcagcgtagaaacttcatttctgcggaacagtctctggagatttctctctaccggaggattccccttctgcacttccgcaccgcaggtgaggatagattcttctgtatgttcttttgaagagccggttgcgccgccgcagccgtcgcgtcccgttcttccgcccaccaagatgattcggtctcccggagcaggtctctctctgaccacgtttgccttaggggccgcgccgattaccgcgcccacttccattctcttggctacgtaaccttcgtcatacacttctgcgacctttcccgtagcgataccgatctgattgccgtaggaactgtagccgtgcgccgctccggtggtgattttccgctgaggaagttttcccgccagcgtatctgagacactcgttctcgggtccgcgcagcctgtcacgcgcatcgcttggtacacatagacacgcccggaaagcggatcgcggatcgctccgcccagacaggtagccgcaccgccgaaaggttcgatttccgtcggatgattgtgggtttcatttttgaacatgaccagccagtcttcttttttaccgtcgatttcagccgtcacgttgatgctgcaggcgttgatctcttccgattcgtccagatcatccgccagtcccagcttcttgacgtacttcgtgccgatgacggcgagatccatcagcgtgatatccttctccgcgatgcgttcgccgtaaacctcttttctgatctctaaatatctgtcatatgccttttttaacaattgggagtacttgtctgtgccgaatgtcacatcggtgatctctgtggaaaaagtggtatgtctgcaatgatccgaccagtaagtgtcgatgacacggagctctgtaacggtgggatcccgcagcagatcctcggaataatgctgtcttacgaaaaaaagatcctcttcgctcatggcgaagcccatctctgcgcgaaatgcccggagttcactgtcgttcatctgacaaaaaccgtcgacggtttttacatcttccggcgcatcagcaacgatagcgatcgtttccggcttgtccatggaggattcctgagaatccaccggattgatgcagtaatgcttaatcgcttccgcatctgcgggggcgacatctccgtaaagagcgatcactcgggaaaacttgacctcaggcttctgtcccatgctgataagctggatacactgcgcagccgaatccgcacgctgatcgtactgacccggaagatactccgaagcgaatacgaaagccgcatccgacaaatccgcttcttctgtgacagtatcgagggcaggttctgcgaaaacatcaaaaaccgatttacgatagagctcatcgctgagaccgtccatatcgtaccggttgagtacgcgaacgcctttcagccctttaatgccgaggttttctctgatatcggcacagagactctgcgcttcgacatcaaagccctttttcttttcaacgaagattcgtcttaccatgttttcctcctgaatctataggcataaaaatttacagcacagcgccggcattcttcgcctcagcaggcggcgcgcggcctatttcctgcctttcgccagagacacaaatcacccgcgcgaaaccggaggatcagagttctccggaactgtgccgaaaccgtccgcaagttctgatcaaacagacttgccgcggctttgcttcgatttaaaattcaaaattaccgcattttctacattagccataatattatatcagttttttctctccatttcgaccgaatattgaattaaacatgaagaaattaagaatccgccttatccttcttctccgttgagaatcgctttcgcccgcgcgtatttttccctccagcgcttccgctgctcttcatccatgccatccgttccggcaaatcttgtctcgtccgaattatgagccagatctgccagctttacagcctttgccgccggatttgaccggatattcctgatataatcaaagtaatccatatccttttgatgagtcaaaagacgcagcacttcgacgatttcttttggaaattcccgctttagctgttctatcgtcaccggggtgtcctccactacatcgtgaagtagcgctgcgcatactgtgacttcctctttcatctgctccgccagatgatacggatgaaaaatataaggctgaccgcatttatccgtctgtccgtgatgtgcccgatacgccagtttcatagctttgtttgtcaacggtgtataaatcatctgtcttctctcctctgtttttctcttttgtttttagggacttttacgccagaacaaatttctttaccgcttccgccacgccgaaagaccgccgcgcttccgccacataatccgccccgtttttcagctccggcaccgcgttggccacggctacgcccagccccgcccattccagcatttcgatatcgttggtattgtcgccgcaggccatgacctcctccctgcggatctcaagactctgcgcaaaacgaattaatgccttctgttttgaaacatccttcggcatcatttccaacagatattctttcgatttggccatatagagctgatcccccagcagcgtttctaaatctctgcggatggcaggaattcttttcgggtcatcgagaatcatcatcttcggtgacgggcgcagttcagcctttgtgagatcaccgatttcccgtattcctgtcactttagaatccggatcgatcagtgtggattcgcagattttatccactacgatatgatcctcatcgtacatctgaagatagagtccccgctccctacaaaaaaacgcgatccttttcatcagtccaacgctcagactcgcagagtacagcggcggctgtcctgcccggcgaatcaccgctccattgtaacagatcacgggacattcagatcccagtatcccggcataaattttcgccgacggataactccgtccggtggctatgacgattccgacgcctcgtctctccgcttcccgcagagtttcagccacaccctccggaatcgtaccgtccggcatgagaagtgtatcgtccaaatccagcgctatcaactttatcacttttctctgtcctttcaaaaaacgcagcagaactcgcgggacttgtcctgcgcgccttcttaaaacggctgacctcttcctgtcctcaaaagtgcctgcgttatcgcggcagaatacaaaaagaggatcccccgaaatctgctttacaccacatcaaaaaacggtcaactttgccgttttgcgatatcacctgcaaatacagaaaacttttcgggacaccctcccataaattcatttctctcaccggcagacgattccgcctgctccgaccggaaccggttcagcatccggccccttgccttttctattctaactctgttttatcagtgcgtcaagcgtatccaactcattgtcctcacaggaataacgggacgcaccgcgcagcatccagccgcttttttcgttccacagctccgcaaaagtatagctgcagtaatccttcgcatactcatttgtgaaagcttcttcttccctgtacagaactttacaggactcctcatcctcaatctggacaaatacattctgcacatcatataaattcttatcggcagaatgtgcacctgcgatattcataaacaaaatcacccttctcacatcctctggaatctttcccagatggatgaccatggtctcgtcacttcctgccccgataccggtacggctgtcctttttcagaacgatactgcccgtactgtccgctctgctcctctgaccgtgaaacacgagttccggctttttgccaccgtcatattccacgacagccgcaagattcagatcatagctgttgtcggaaattcccagaaccatcccttccaccacgcccttgatcttctcttttggagtaccgctcttggcatcccatcccagcttgaccgtaagggtcgtgtctctcttcttgacaggaaccacgattgaagattccagtacgagtgtctcttttttcatagccaaatacctcctgtatttattttaccatttttgattcaattatcaatcttgtaaatcaaattcatgttgaacccccttattttctctaatcagaaccgttttctgcaaagtcagtttgatcggaaacgcaaaaatctcctcggcagagcgccggtgaatatcgccgctctgttctaccggccggtttcggcaaatgaaagtcccgcccgctgcgccgcacaccgtatcggcttcctaacgtaagctttccccgattgaaagaccttagccccggagatggcagaaaattaatactgtatacttacaattttcgacaccgttcttaattgacatcagcaatgtatatgagtatacttactctattattttttaccgacaataatgaagggagaactcatatggcagacatgacaggaaaaaccgtaattatcaccggaggcggcaagggcctgggctttggaattgcaaaagcattcgcgaaagaaggtgcgaatgtcgtcatcacgggacgtaccgccgctacgctggaaaaagcaaaagctgagctggaagccctcggcgctcaggtgatctattttaccgccgatggagcggaagaagacgcggtaaacagtgtggtcgcacagactatcgaaaagtacggccgcatcgacgtgctgatcaacaatgcgcaggcctccaaatccggtctgatgctggaggaacataccaaaaaagattttgatctggcgatcaattccggtctttacgccacgttcttctatatgaaagcatgcttccctcatctgaaggagacgaagggagtcatcatcaacttcgcgtccggcgccggtctcaacggcagactgggacagtcctcctacgctgcggccaaagaagggatccgcggcatgaccagagttgcagccaacgaatggggacagtacggcatcaatgtcaacgtggta

SEQ ID NO: 4449 - DNA, 8691 bp, Unknown
  16S sequences of unknown bacteria
caagaaacgaaaagtggccattagaaacgcttcgtttctaatggcctttttttattttgtgcagatgaactgacagaaatctgcatatgataagaaagagcccccacgttatgtgggtaaatgagcggtatggcttttttttgcctatgaattttggtaaaataaacaaaggaagataatggaggtagtggaaatgcgttcagcaatcatccttgcggcaggcaagggtaccagaatgaaatcagcattgaacaaagtcatgcatccagtgtccaataagccgatgatcgggcatattgtctgcagcctgcgaaaggcaggcgtagacaacatcgtggtcgttgtcggtcatggcgcagaaagcgtcagggagtatctgggagacagtgtgcgctatgccgtgcaggagcctcagctggggaccgggcatgccgtcatgcaggcacagtgtctggcagatctggatggcgatacgctgatcctcaacggggacggcccctgcattcaaagcgagaccatcgatcgggtgttcgctgccaatgcggacagcgagatgaccgtgctgactgccgtgctcccggacggagagcggtatggaaggatcatccgtaatgcagaagggtatgtcgaacggatcgtggaagccaaggactgtacgccgcaggaactggccgtgaccgagatcaacacaggcatcttctgtttcaagaaccggctgctgtttgcgcatctcaaggagatccgcaatgacaacgcgcagcaggagtattatctgactgacctggtggcaatcttcaatcagtgcgggctgcgcgtgaacgcgcttgtcgcggatgacccgcaggaaacgatgggcgtcaatgaccgcatcgacctggcaaaggcccagaagtggatgacgcggcatgagtgtgagcgacatatgcgcaacggcgtaacgatcattgacccggagacggtatatatcgatgtcggcgtgaagatcggcgcggatacggtcatctatccgaatgtcatcatccagggaggcacggtcatcggtgagcgcgtgaccatcttatccaattcatttttgcgcaacgccgtgatcgcggatgaggtctgcatcgactccagcaagatcgtggagagcagcgtgggcgccaggacgaccatcggaccgatgagccatctgcgcaatcatacggagatcgcggaagactgccggatcggcaacttcgtcgaattcaagaattcgcatttcggcaagggaagcaaatgtgcgcatctgacttatgtgggcgacgcggatgtcggcagcggcgtgaatttcggctgcggcgtcgtgaccgtgaactatgacggcaagaacaaataccgaacgatcatcaaggacggtgccttcatcggcagcaactgcaatctgatcgccccggtgaccatcggggaaaacgcactgctggcggccggatcgaccatcacggatcctgttgcggacggcgatatgggtatcgcccgcagccgtcaggaaaacaaggccggctatggaacaaaatataaaaataaataagagaggaaacagtaaacatggaaatggacaagacaatcgtcatcgcattaacttctagcatcaatctcgcaaacgaagtggtcactgaactgggcatcccgctgggcaagagcgaggtcaagcattttgcggatggagagatcatggtcgaactgggagaatccgtacgcggaaagcatgtgtatatcattcagtccacttgcaaccctgtatccagcaacctgatggaagtgctgatcgccatcgatgcctgcaagcgtgccagcgcgtctcacatcacggtgatcatgccatatttcggctatgcgcgtcaggaccgcaaggcaagaccgcgtcagccgatcacatccaagctggtcgcatcgctgttagagactgccggtgctaaccgcgtgatcacgatggagctgcatgcgacgcagatccagggattcttcgatatcccggcggatgacatcagcgccatcagcatcatcggcaagtatttccagaaaaaggatctcggggagatcgtcgtcgtttctcctgatcatggcggagtgacccgtgcgcgccgtctggcggagatcctgcatgcgccgatcgcgatcatcgataagcgccgcccgaaaccgaatgtagctgaggcgatgaacctgatcggtgaagtagacggcaagaccgcgatcatcgtggacgatatcgtcgatacggcaggcacgctcgtttccggcatccagatgctgagggacaaaggggcgaaggccatctatgcaagctgcgtgcacggcgtgctcagcggcccggcgatcgaccggctgaaggctgccgacctggctggcttcatctgcacgaacacgatcaatcagaccgaaaaggaaaagctgtatgacaagatgaccgtcctgtctgtcggcccgatcctgggcggcgtcatccgcgccatggaagaagaccgtccggtcagcgaggtcctctccgttttcgctaaataaagatacataaaaaaagcatcagtcggctgatgtttttttctggatgatgcgcggacagaacgcctgccatccggatcgatacagcgcatggaccgcttcgatgccgccgcgctgatacgcatcatggaacgtgagcatgccggccacgagcggaaactgcttccagaaaggcagggccgggacgcgagtgaggatgaggcgctggagcgcagggtcgctttcgccgtatgcctcgttgagcaggcgcatcgcgctcttcagcagaccgtcctggaactgataatcctgtgcatcgctgccccaggccagccagttggccaagccatcccggaagcaacagagatcaagctgctgcgcataggaaactggtgatccgggaaagtcgctcgcgatgcatcgctgcgcgcaggtcaggctgatgaaattgcagatgatgtgcatcatcgcaggaacgatgcgggtgagattggcaacctggatgagatcgatgaccaggtgctgttgaccatcatgctcgcaaagataggtcgggacatccgacgatgctgcgatcaggatgatggtcatctcctccaggaccgtatccaggtgcggaaacaaccgggcatacagcgccgggttgaaacagggccagcgcaggccgcagacctgccggcaaagctcatgcacgacatcgtgacgccgaggatcgatggggtccgtgttgcggaagatccaggcatccgcgtcagcgtatacgggttcatcctgcagatagcgctcgatgagatgtgtgtcaatgttcatgggatcaccttcggttccattatagcggttcgcggagaaaatgaaaagcacacggccgaagccgtgcgctcacgagatagaaaggtatccatagccaaagatagtatgaaagggggaatcatccctgctgccttcaggatagtgcaagcggtgatcctcttcaagacgacagggaaaaactggttgaaataatggaaggatagaacaaggacatcgacagatactatccctgaggtgttgcgtatggacagatcaggaaagatcaggctgttatttgccggcatctgcttcgtgctgtttgcctggctgatgtgcatcatggtggaaaagggacaggaaaacagcgcggtctatctggaaagcgaaccagtggtggcgcaggaggatgaaggcaagaagatcatgtatctgacctttgatgatgggccgagccagaatacccaggccgtcttagatatcctggaagaatatgatgcaaaagcgaccttcttcgtcacggcagagttcagcgactatctgcacctgatccgcgccgagaaagaagcggggcatgccatcggcgtgcatacgtattctcatcgctatgatcagatctatgccgacagcgcatcttattgggatgatgtggaaaagatgcagaagatcatcgaggagcagtgtggatcacgcacgtcgatcctgcgctttcctggcggaacgagcaatacgatctctcagcgctatgcgcaaggcatcatgagccagctggccgaagaagccgagcagaagcagtatgcctattatgactggaacgccaccaacggggacggcgatacctctctctctgcccagcagctcgtcgaacaggccaagcgtgagatcggggaacagccggtggtgatgctgctgatgcatgatggcgcaggcaacgaagcaagcgtcaaggcgcttccgcagatcttgtcgtatatccgggatcagggatatgagttccgcgtcatcgatgagctgacgccggtattccatcatcacatcaataactgaacatggcccgcgtcttgcgggccgttatgatctggcttcttccaccttgatctttcgattcttgatggtgcgcgtctgcagcgcctgcaggacaacttctcctttgccatgcaggatctccacgaaggcgtggtgttcctggatgtcgatgacgccgatgtcttcggccgttacgccgtcgatcccgcagatggcgccgaccagatcgccggggcgcagcttccggctcttcccggcaaagacgcacagcttcatcttttctgcgcgcagggcgtcttcccgtttctcttctttgggcaggggctgcgtcagctgatcatgccattgcggatcggggacccactctggatcctccaagccggggaaatcggcgcgcagctgacggtagacttcctgatcgcggggcgtgaggaaggaaagggcggcgccttctgcttccatgcgcgcgcttcggccgacccggtggatgtagatctccgcattgagcggaaagtcatagttcaggatgagagagacatttgggatgtcgagaccgcgggctgctacattggtggcgatgagcatgcgcagcgtgccatcgcggaaagcctgcagggcgtcgaaacgctcttcctgcatcatggcgccatgcagcgtatcacataggatcccgcttttttgcagcgtctcgcacaggaagtccgctgtttcgatcgtgttcacgaacatgatgcagcggcgcaatgggaaagaagcgagcacatccgggagcacagcgaggcgcgtctggggagagaccttcatgaaatgctgcttcagctggaccggaagctgctggcgaggctgcatcagcctgggcacatcggcgaaatgctcttgcaggaagtccgtgacggaatcgggatacgtggcagaaaagcagacgcgctgcagcggggcgggaagccggtgcaggatcgcgttcaggctcttgcggaagccgaggcggaacatctcatcggcctcgtcgatcacgagcatggacagaccggaaagatcgaccgtcccttcctgcatatgctgcagcaggcggcccggcgtggcgatgatcacatgggtgcgctgcttgaggtcctcacgctgaaagcgaaatggctgtctgccgatcaacaaaagatgacgggtccggcagtacatgccgacattatccagcgtctgtttgacttgcagcgccagctctctggtggggacgaggatgagcgcctggggcaggaaggtctcgaagcggatcttctccagcaaaggcagcgcatacgcgagcgtcttgccgcttccggtccgggattgggcgatgaggctctcgcctgctaacagtggtgggatgcatcgctcctggatcggcgtcagggtcgtataattcatgcgcgagagggtctgccgcagctcgctcttcagcttcagctctgtaaaatccatgtgatcactccttctgtgctgttcagtatatcatgaaagatgaggagaaaaaagcctgactgtgctacaatgaagacgaggtgagaaagatgatgacattgatctggtatccgaaatgttcgacttgccagaaggcgaaaaagaagctggaagagcttggcgcatcgtttgagacccgcgatatcgtgacgcagacgcccacggcggaggagctgcgggagtggatcaggcgcggcgggctcgagctcaagcagctgtataatgtgtcgggacgcctgtacaaggagctcaacatgaaggagcgccgtttgcagatgagcgaggatgaacagctggatctgctgagcagaaacggcatgctcatcaagcgtccgctgctggtctgggaagatggcgtattggccggctatcgcgaagcggcctatgaagcggcagtgaaggcatgaaaaaatccgggatgaccggattttttacttgcccagaaagcgatgatagttttgcaagatctgttcgctcatgcgctgtggatcggcattgcgcagttcacagatcttatcgaatgtgaagcggacgtacatcggctcattttccttgccgcgatgcgggaccggcgtcaggtaaggacagtcggtctcacacaggatgcgctctgccggaacgatcttggcgacctctggcagcgcgcgggcgttcttgaaggtgagcggtccggcaaaggagatgtagccgcccatgcgcacgacttccatggctgtttccgcactgccgctgaaacagtgcatcacgaagggcgtcttcgcgtatgtcttgagcaggtccaggcagtctgccgtggcgtcgcgcatgtggatgctgatgggcagatcgcattctgccgccagcttcagctgccggatcagcgcgtcatgctgcttctctttgtcggtgtcgtcataatgatggtccaggccgatctcgccgatgacatcgacctgatgtgtgcggcagatctcttccaggtgcgcccagtcgctctcttgcagatcgctggtgtcgcagggatagaagccataggcgacatggatgaagggatgctgctgtttcagctgcatcgcgcgcagatattcctcatgctgacagcagatgacgagcagctcgccgacctgatgcgcatggcagttttccaggatctcatcgatgcgcgcgtacaggcgatcgctggtaatgtgacagtgtgaatccagataagtgatcattgcgtctatcctttctatttgcccaggcagaagttcgcaaacagcgtgtccagcagatcttcgcggtgcacttcgcccaggatctcttttaatgaggtatagcattcctgcaggtcgatctccacgagctcaagctccatgcctttctccatggcgtcgatcgcatgaagcatggcgctcttggccatgagcatcagcgagatctgccgttcgttggccagcgatggctgttccaacacgatgcggtgctcgtcgaagaggcggtggatctcctgggtcagccccgtgatgtccgcgtttttggcgctgatgcagatgccttcatgatccgcgttgaggtcggccttgttccagacgacgatgcgggtgcgctggctggtcatgtccagcaatgcctgatcttcgtcctgaagcggcacgctgccatccagcaccacgatgaccagatcggcatgatccatgatctgatagctcttttcgatgccgatcttttcgatcacatcctcggtcgggcggatgcctgccgtatcgatcaggttcagccgcagaccgtcgagcatgatctgtccttcgacgatgtctctggtggtgccggcgatatcggtcacgatggccttttcctcttccagaagagcgttgagcagggagcttttgccgacgtttggccgtcctacgatggcggtgcggatcccctcgcggatgatctgcccgctgtgtgcccgcttcaggatcgtgtcgatgtcctgcagccagcgaagcgcggcaggcatgagcttttcctgcgtgacttcctcgatgtcttcgtattctggataatcgatgttgacttcgatgttcgcgatcatatccagcagggactggatcaacggatcgagcagcttacgcacgctgccgcggatgccctgcacggccagctcggcattttcccgggtctgcgcctggatcatgtcgttgaccgcttcggcctgggtcaggtcgatgcgcccgttgaggaaggcgcgctgggtaaattccccggccctggcaagccgtgcgccctgtgccagcacaagctgcaggatcatggaggtgacgcatctgccgccgtggcagctgatctctacgatgtcttcccgggtatatgtgcgcggcgcgcggaacacggagatgagcacttcgtccacctgctttcccgtatgcggatcgatgatgaagccataggtcacggtgtgtgaggctttgttttgcaggctgcggtcaaacaggcggtctgtgatctcgatggcttgttcgccgctgatgcggatgatggagatcgcgccgtcttgcaaagcagtggagatggccgcgatggtatcattgagcatgtgcattcctcccctttttgatctttctacatcctagcaagcaggaaaaggaaagtcaatagcgcgcacagagcggaaatctggtttttggctgtggaagctggatgtgcaggacaaaaagcattacaatagagaagacacaagaagagaagatgaaacggcagatcgccggtattcatggataaaggaggaacgtacatgacgatcatttatgagaaggaacagctgtctgagatcatcgcggcagttcaggcgggacagacgatcgcctttccgacggatacggtctatggccttggcgtgatcagcacggatgcgcaggcgctggagcggctgaaggcggc

SEQ ID NO: 4450 - DNA, 32759 bp, Unknown
  16S sequences of unknown bacteria
gaatatgttaaaataaatatataatacggaaacggggctgaacttcttaaaaacgagatactatgaccccgaaacaggcagatttattacaatagatgacatttcgtatcttgcgcccgacaccatcaacggattgaatctgtacgcttactgtggaaacaatcctattatgaatgtcgatcccaagggcacatcatttgggaattgggtaaaatcggggattacagcgttattttttcgcggaacgagcattcaagtagctttttcagtggttcttatctaggaatagcaagagcagcgaatttcaataaagatataagaacggatatgaataatatcggctggaatccttttaatgccaatgaagaagcagttttggcgtcaaaatatgtttctttttataagggagcgccagtttttagaacgaatttcgatcgctcaggcacgtttttaggaatatttttaacaagagaaacaaataaacgtgattatcctaaagatatattgaggcatgaatggggacacatcgcgcagcaaataatgttaggaccgattgtttttttgctggggataggtataccttcggggctggaaataggggaatggggcgactattataatgcgccatgggaaacctcggcagatatattgggcggggtacaatcgacagtccatacggaaatagaacgaagaagagcaataggctatttaggttccctttttgtcttcgcaagtggatttgtatatataccgccgaaaattttgaaacttggagaaaaaattaaaggcaaatataaatattggtatattttaagcagataggagggggcatgagaaagagatatcttttagcgggggttttgagtatagtgttattgttttcaggttgcaatccgcttgcgataaagccgtgggaaagaaagaaattatatgcatactacagtaacgacgcgaactatgtaacggtgaaaggaaaaataacttataataatgccgcaaacgaaaaaagatatttatctcttgaaatagatgaagaacaatatttaaaagactatgaagaattgttgcctaataattattggagaagtaattatttcgaaatagaagctgcgaacgaaaagattttagagaaaaatggtttttatgaaaagatggatagtgatacggaaatagagtttattacatcttttcttatatggtgggatggttggtattttccgatagtgggagcaaagattgaagatacggtgtatttatcctacgaagaagggaaaacgaattttctttatcatatccaatatgagatgagataaaaaagattagataatctgattgcgacatcaaagccaagactttgatgaggcagtcagattattttttattataatcaaattggaaaaaacagccgtttatacgagcgaagcgctgtgatgaaatataataaaaataatcctctccttgacattgacaaagcaattgtgctacaatatctcgtactctcgatttattttttaggtattgcatttggttcaatgatatgatataatataaacgggaacgtttatgaaaagagagggaggaagagtgatgaaaaggttgatacggttatgcgcggcgctttcagcggttatgcttttcggttgttgctttacgttcgcaggatgcggaatgaatgtggaagatctgaaatgcgccacatccgaaacgacggactatatcgcggtcgtcaaggatcaggctgtttacggcgataaggttctctcgatcgatgagtgcgttaattcctatataagcgagcgttccgacggcaacggttcttcttacagacacagctattacgacggtccttatatgtatacaatcgttgagcgtaacgcattggttggcgaccgtagtacttacgattttatcagattggatttacgggaggggagcgtttccgtcattcttgcgaattgtccctctttggatattttgtttttctatcagaattatatttttatatgtaagggaaatggtaatagtaattcttattcctttattaatttgtcggattttttcgaaattgaagttcccgacaagtattttctcaatcaaaacggaaatctgtatagaaagtcggaatcggatacgggtattacgatcagtacggcgaaaatcgcagacgagggggacagggttgaaacgacgggagaatataccgttttatataaagggtataagaattacagattattccgcgtttacgacgattgcgtcgtcaccgataagttcatttatgagatcgctgcggacgagtacaactattgtttgtttaaacacgattatctttgcggaagttattatactcgtacacactatattgtttccgaagaaaaaggcattatttcaacaaaggccgaacgttcttatgtatatttgaaaaatgcggattttgtcgacaaaactcaaaacgatctcgaaaaagacagagtattgctcgggccagagatactcggttcgagttcaaagcccgatatacgtatccaatacataggtttttcggaaacgataccctctaaaatgctgaaaaaaaataaatatatcgcggcactgatgaaaaaatcggcaaattttcaaacagccggccttgtcggggacaatgtcgtcttgacgggggtcttttccgatgactcctttcgtaatgaaagcaaatccacctattattacagtactcttctggtaaatatcattactcgaaaagtgacttttttaggcacggttttagttccaagctattatggcatatattatgacgccactgtcttggaggtcaacggatatgaagcgtaattttacgataaaaggcagaatcgctttatgcgtattatttgttttggtctgcgccggaatctgtgcgattttcgtatcctgcgataacggcggagggagtcattcggatattggcgggaccaacgttcaggaaatgggcgtagacgaaggagatattgcgaaatatgtgggagagtatctctatgttttgcagcccgatggcattaccgtttcccgtaccctttcaaacggggcgattcaacttgtttcttcctacaaacaaagcgaagtaacgccctgcgaaatgtatatttccagcgatcgtttgatcgcgatttatacgtacattcgccgtgacggtgttttctgccgagtgtggagcagcgtacgtatttttgatgtgaggggcataagcgaaaatttttcctttgaaaacaatgaaatgtatgctttggattttaaggggaaatatttggattcgcgcattgtaatcaagcagaaaaaaatgcttctttgttacggattgcaggacagagaagaaatcgagtcggtaaacgtggacgaaaatggcagacccgtttccgaatatcgcgcgacagagatggactatgaggtgaacggagaaaagaaaacggctgcggacgcggagccgctgaaaaatattcccgaaggattgatttctcacgatatcaccgtctatgcgtcgatcgatttatcggaaaataagtttgagttgaagatgaaagccacttcgggctttcccttccaaacgttatatgtttcggaatacggtttttatacggcgtattcctatgtggaaaaccgcaggatgagcgggggatgcggagggacggtctggcagatcacccattcgatgatcgctaaaatcgacggaaagacgctggaactcacgggacaaaaattctttgacggaatgagtcttgtttcccgtcacgctgtcaaagatacgggcaaaaacgtttacttcgccatgttgaacaccgattatcgcgcggtagtccttcttgctaccgatgaaaatttgaatttagtcggatatttgagcgatatttgccaggaggaagaggttaaatcggtgtcctatgccgaggatggcgacagactctattgctttatcgtcacttatcaggaagcaatcaatctcgatccgctgttcaaaatagacgtgaccgatccgggaaatatgaaagtgaagggacttgtttcggtggacggcttttcatcttataccataaactttgaaggcggctatacagtcggcgtgggagaggacggagcgggcggaatcaagatttcgctttttgctacggagaaggatcttcccagagagattaattcatttgtaaagaataacgcttattcggaggcgaccgacaacagtaaagccttttgtgtcgacaaaagcagaaagctttttgccgtaccgattatcgaaattgtcgatgcggcgacgcttaccgagcggctgtacttctatcgaattaccgacgagggagagctggaagaattggggtttgtcgaaaatcgggagagctttgcctatcaatcggagtcggagatcagagttcaggacttgtacctgcgccgagcgtttttcggcgaaaactttgtttacgccgtgagcggcgccaatatcaaatcgttggcgatttcggaattggcgaagggaaaccttgaaagcgtttgtgagatttcaacgagaatagagtgacgaggtaaaatttgagggaagcaatcgattttatcgggaatctgaatcccgtttacgccgttttgcttttgctgggcgggatgggggcagttacggcgcattttgtcaatcggaaaaagtatgagaaatttagggcggttactgtcgtttatgcgataggactcattcttgcattctttttgacatatgcgctgaacacgttttttaataagataatcacagcaaaacacgaaaagtattattttaccgatttttcgtttttatatacggcggcgtttttcatgtttacggtgaagatcttttcgcttattctcggctgggattttaaaaagatcaaagagccgtttgcggcaagtcttctcgtattcctgttttttgcgaaaatcgggtgcttttttaacggctgttgtgcttcaaagccgctcggcggaagcggaactatttttcatttgaacctttacgaaagcggtttcgcgctgttgctcgcagcgttgtatttctggaaaaaagtaaaagttttttatccgttttttcttatctatctgccgtatagatttttttcagagtttatccgtgcgtcctacgcctatcagaaaatttttatggggatttttacggggactcagatcgtggccgcgattgtgttttcagttttgattttattcatcgttttccaaagcataagatcaaaaaaggaaaatcacgactgattttaatatggcataaaagatgtcgacgcataggaagaatatggcgtttttttgtacccgatatatctatcgctccttactttacccgctgaatttattaataaagaattataaattcagcgggtaacttaaaacgtggcgtcggttatcttttcggggtttccgatgtcagcggccgcatattttatcgatgtgatcatgacggaagaaaaataaaaagggatttattacggtgcgtttgctaaaacgtcatcatgagggaaaacgctctgttttgtgcgaggaaacgttctttccaaaatagaagaagtattggatccctaagtttaccgtgaggatatcaaaacggcaaagcctattccatgagtgtaacgtttacttgtatcatgcgaatgacgcctattgtatcaagaaaaagcctcacgctcgcaattgccggcgattttgccggcgactagtgcctctcggattaagaaaaggatacgccgcctccctccatggtctttgttactttcttttgagaggttttttatgccttgaaaaccaaataagaaaaaaacaggccccgatagggacttgcttttttcttccatagaggtttaaatgaaattgaagacgatgaaggcagagtaattatgacttttttcgaaagaaagcgtgtaagggataaactacaacataatcaaatagagcctgcaaaagaagggaacgcaatcgatattaccgcaaacagacgggaaacaaaagacagtcagacttctttttggggtggaacagcgctttgaaatgttttgtaaaagtaatatcaagttcgtttaaacgacagtcgcgaagaaatatagagtgaataagcgacaattggcttcaaaaatttgggcgcaaccgataaatgtgttctcacgtcgaaacgagcgaagaagtgtttgtcttgaacgtaaaatcaagagagaataagttgattcgcttgcttagtttattcggtgactttgatttgtaatcacggatttcaggccatcaacctctttaaaatcgataaattatcaaaaagaactacgagtattcgcagtttttttattgtgcagaaaagaactgaaaaaaaataacggaatgaaagaaagaagtgaactaatgtttttatgggaaagctaaggaaaacaggagatgctctttccggggcgaagtatccgccgattaaaatatggattttccgaaaaagagcggggcttttccgttatttaagaaattcccgcttatcgtatctcagacgccagtcgggatatttttttaattcagaaatgctttttccataatattgtttaaaaagcctggatagataattctcgtcgtatatcccgacgctttcgcccgcttgcctgagcgagattcctttattgatgactaaattttttattttttcgagttttaaacggttgatataggaaatgattgtcgttcccgtcactttcttgaaaatattgcaaagatactgcggggtaatgctgacctttgcggctacttcattgacggatatttttttatcgatattttcggcaatatacttctttgcgagattggtatagcgtatattcccgaaagaatcggtctcctttacgatgatagaataggtatctatgatttctaaaatcctgaatatataagagagagcctttaaactgttgccgttcattttatattctaccattaacagatcgagatatttggaaacgtccctacaaattttttcatccgaaaggatttgagaaaacgtgaaggaaaaactgtttgactccgtagggggagaaagcagcagcgaaaaagtatgatgctcatgaaattgcgaggcctgtactttttttatattgtcgaacgtgttgatgaaaatacttccttccttcaatataaaggaggcgtcatgtttatcgatgcaagtcagatttcccgtttttaaataaaaaatttcaatgctgttcggcaataaatcgaccaagccgttataggtctgcgcggaaaagatatgcgcaaaccaaatttgcggaattcctccgatacggattgtttttattgtatttgtaaaaagaccgtttatatttcccatatttgtattataacaaataatcttaaaattgtccatgctttttagtatagtctattgatttttcgcaagaaagttgagataataagaaacgaaaaaagtaaggaggtctatatatcggggatgataaacgacaatacgcctaaaaataaaaaaatctcaattttttgtgcaaaaaaattcagtcgtgaagaagtccggaaacatctttttctcttttcggtctttctgatacccatgatcgcgttcgccgttttttgggtctacgtgaatatccagtcgcttttgaatgcttttcgcttagaggtgaacggaaaactgacgtggtcttttcaaaattggcaatatttttggcaggatttgacaaagagcggctctatggtggatatgcctttgattttacgcaatacgcttatttttttctttaccaatgtttgcgtaatccttcccatctctttcgtcttttcctatttcctgtttaaaaaaatcaggggatataagtttttccgcgtgatattttttgcccccaatctcatctccgcggcggtattggcaactctttacaaatttatgctgaatccctccctcggcggaacgattacaaaattatacaccttattcacgggcagggcctctcccaattttttaatgaacgaaacttacgcgttgggcgctgttgtcgcgtactgtatctggacggggctttcggttaatcttgtgctatttaacggcgccatggaaagggtgccgcaagaggtgatagaagccgcgcagatcgacggcgtcggcgtcggaagggaattgttcggcatcattttgccgatgatctggccgacggtcagcactttattgatcaccacgacctcgggattgtttatggcttccggaccgctgttgttattgacgaacggagcgtacggaaccaatacgctgtcgttttggatttatcagcaggtacaggcgcaggtggcgccgtactatcccgctacggtgggttttatctttaccctcgtcggagtgcccatagtgcttgccgtgaaaagattggcgggaaaagtatttacggaggtgcagtattgatatggataaagctcttcggaaaagcggggtaaagctgggactgaaaaagagaggcaaaaaggaaaaaattgtttttattttcgcttttacggtgttcgctgtgtatgccggaacttatctttttacgtttggatgggcgttcgtcgtttccttgcgggaaaaattggagtttttacacaacccctttgcgctgccgacgatcctgcattttgaaaactatatcgacgcgtttaaggcgttgaaggtcggagaaactaacctcctgctcatgtttgtcaataccgtctggtatgcgggcggggcgacggcgatcggcgttatggcgtccaatatcctcgcttatgccgtcgcaaaatataaaacgacttttacaaaattttattacacgcttactatttttatcatgctgattcccattatcggcgcgttgccgcagcagtatattttatacgacaatctcgggctgatcaattctccgatgtttcttatcacttacgtcggcgggacggcctatcagtttatactctttcacggtttttacggcggggtgtccaacgaatacgcggaagcggcaaaggtggacggagctgggcattatacgatcatgctgaaaataatgctccccatgtcgctgccgatgtcgctggcgatcgggattatcacctttatcggctattggaacgactatatgacggtgctcttgttcctgccggattttccgacccttgcgacgggtttatatctgtttcagtcgcagccggaaatccgctcccattatccgctctattatgcggcgattatcatgtcgaccgtgccgatcgtcgtcttatacgcgtctttccagaacatgatcatggtaaacaccgtagcgggcggtataaaaggataaatatatattttaaatcaggaggataaaagatgaaaaaaattatgaaacggcttgcgcttgcgctgtgcgcgacaacgggcatggccctgtttgcgggctgcggcggaagcaaggaaaccgaggcgctgcaaatcaactggacgatcggcggatacggcagggcgtattgtcagcccttgatggacgcctttacagcaaagacgggcatcgaatgcgaaccgacgtacgacgataattcatcgagcaccattacctctaaaatcggttccgtaaagagaaataccatcgatctcttttttacgcaggtgcctttgttcagcaacattgccgcacaggcgaacaagaacggatacgacaatctctatctcgaactcagcgacctatacgatacgaaggtcccggggaaagacgcgacgttgaaagagtatcttaaagacggaatgtacgaggcgcagctcaccgacgacggaaaggtgtataccgttccctggatcgcccccatggacggactcgtctacaacaaaaaagtgctggattctttcgggatcacggatattcccagaacgaccgacgaattcgaaagcgtattgaaacagatcaagagcggtctttccgtttcgggagagcctgtgacgacggaaaacggggaaaaggtcagcggattgatttccgccaacaattccgcgtattgggctttcgtatggccgacgtggtgggcgcagtacgagggcatggacaacgtacgcaactattttatggcgaaaacggcggacgccgccgaaaacagtttgcccgactggaacgccttaaaacaggaaggaaagctcgtttccatagaggaattggatcgatttatcaataaaaataacggatatatgcatcccgattccctcaatcgcgatcatctgttttctcaaatagattttttggacggaaaagcggcgtttatcccgacgggggactggatggaaaacgagtccacaaaagcgtatcgggaggaaggaaaggacatcgacgttcgttttatgaaaacgcccgttaccagccgtcttgccgtcaaactgaatattacggaggcggaattgagggccgcgatcgattacgtcgacgcgacttcggaaggaaaaacgggaacagctccgacgtatgcgggaaaggacgcggtggcggccgaaaaaatcaccgccgaaatttccgcggcgcggctgctcgtgtcctcgtcgcaggcggctctcgacagagcggtgattcccgcttattccaataatatttccgcggcgaaagaatttctgttattttatgcgagcgacgaagggcagaagatcatggcgcagtattcgggcgccgcgagtcctttccgttatgaagtttcgcaggaacttttaaacggctttacgacgtttacgcgttccgcattggaaatttgcggaagatcgggcgtggggtattggatagacgacatgaaatatcccatccgctataaagcaaacctcttgattacttattggaacagcataaattatcagcgcggtttcgaggaagtattgtataacggaagtaaaactccgaaacaggtttacgataccgattggggctcgtacagagattgctgggacagaatgctctctcaggcggggtattgataaagaatgacaggagaaggaaaatgagaagaaaaataatgatcggcatcgcggcggcggtctgtgcgttgagctgtctgggcgctgctgcctgcggcgggaacggcgacagttccggatcggaaaagctccccccggtggaaaaaatagacatcgtcaacgggtttgaagaggcagggtccgaggctttattcgaagggtttgcgggcgcgcagatttcctggaatgagaacgagaagtttgtcaatacgggaaagaaatcggtaaagatctccgtttctcatgcgtccgttcccaaatttgccttttccgaaaacgcttcccaaacggacatttcggaatatgagtatctcagcttttggatgtacgtggacggcgattcgcccatcagtctttccaatacggtaaacgagggggactatcagggttccgtcgtcttaaacagatattacatcaagtcttccgtggagccgaacacctggacgaaaatcaagatagaaaagggcgacgcgttctatgacaatatgatgtattatctgccttacggaaaattcatcttttgcggaacgggagaaaatttcaacgcgccgctagattacgacgtctatatagacgacgttcgcgtatataaaaagggaatgacgggcgaaacggaactgtatgtcgtcgacgccgacaataacaatcgacggatggatctgcccgacggcgcggtgggcaggacgtatgaaataccgaaaattcaagtcctcggcgcggacggctcggaattgttcgatgcaaagccgaccgtttcggtgacggactgcgacggttttcccgtcgagatagaggataattccttcctcgcctggaaagcgggcgtatacacgctgaccgcaagttacgaaaaagacggattcgtcggaaggtataacggcagtttccgcctgaaattcgtcgccgtggcggatacgaatacggaacttgccgtcgtcgggaagccttattccgttccccgacttacgctgctcgatcccacgggcgacaatgcgctggaaggcgcgcggacggaaacgcaggtattcgatgcgttgggggaagaagtccctcttgccgacggaaaatttacgccgcgggacgcggggtgctatacgttgaagtacgtcgtttccaaaagcgaccatggcgtcgagaatacggaaacgtacgaaaaatacgtctgggcgagcggaacaaagggactcgtttccgatttttcgcgcgacgagagcgcgggactgttctgtgccgcggacgtgtcgggactgtcgtttgaacgttcgtcgctgtacgccaaatacgagccggatcaaacgggaacttccctgtcgtgcatcatcaacagcgtcagctttccctctttctgtttcggggaaaagttcccgtacgcaaaagcgagcgaatcgggaatacactatttaagtttctgggtctataacgacgtggggagcgatctctatctcatcagttcgggcgatctgctaaacagacagctcctgcgttcgggactttggaacagggtcgtattttataccgattccttctcctcgtctttcgactggaagaaaaatcaattcaccgtatacggcgtcgataacgccgcggacagaataaacggcgcactgtatttcgacgatttgcggatttaccgcgacggcgacgtcgaagaagcggcgttttccgagcaaatcaccactacggattacaatgcggcgacgggagagggcgttcgttttgccttgaacggaagctatcggatagatttccgggtcttcggcttggacgggacgttattggaaggcgaggaaagctccgtgctctgggtgaaggattccaacggcgcgaatatggtcgtcaacggcggctcctttacgcccgcaagggaggggtggcacacgctgtcgctctattacgaaaaggacggcatccacaattccgtcatcaagaagttctatgtccggccgcagctggaattcaatcccgacaccgatgcgcgggactcggtgctcccttacggagaggcggaaacggtctataacgccgattctttcagacccgtactttggaataagggaaaagtcgcggaggacggcgacgtcaaatattctctcacggtgacggacggaagcggaaaaaaggtcgaaacgaacgggcttgtctttacgccgatgaaaaagggactgtataatctttccttttacgcgcaggacgcgcagaccaaggaatttgcgacgtactcgctcaaactcggcgtattcgaaaagggaaagaaagggatggcttacgactttgaggacggggacgtttccgctgtcagcagcacctattattactacggcgtggtatcgcccgtaaagttgtccgaggagaatatcggcggaaacgcgaccaaaaaagtcaagatagaagtcaccgacgaatctgtgaacggcagcacggcgagagaaccgcagttttatctcacggaaaacaacattctgcaaaacatttccctgacgaaatcgtttagcttcgacgtgtatatagaagattcggaaaaccgttctttcaatctcgccaaagtgctctattacaattggaacgatcaaggggcggcagaggtgcaaaagggcacgctcacgaagaagatcgcgtccaatcgatgggaaacggtcacggtgacgagggaaaattacgagagcgtactcggcggatacattttcggcggttccactctctcgctcggcgggcaggcatggacggagatagacgaccgattgattacgagcttctatttcgtggacagcacgggatataaggagtgcggcggaatcaatatttatctggataatttcagagtcgaggtgtgaaatgagtaaaaaaacaattgcattttttgcggcgttgatgatgatttttacttgctttttctccgccgcctgtaaaacggacgatccccccgagaaaaagccgcttgccgaaaagacggcgaacgagtatacggacgagcggatgatgctgggaatgtatcatatcacgcccgtaatcgacgacgtaaaaaatcagataaaattcgaggacgcggtagagggggatctgttcaacgtatttttgatgagccgcgtggaaattcccgacgaaacgcagtttgactattattgcaacaaaatttacgaaaagggaaagaggttcttcattttcgactccacgtatctttggagcgcttccgcgggatatacggtgtataaagatatctacgtgcgtatgcacaagatgaaagaaacgctttgttcgaaaaattattacgacgcttttctcggttattacgtggatgagccgttgctgctcggcgttccgctcaacgatctgcacgaagcgagcaaagcgtttatgaaaacttttcccgacaaaagattcatggtgatcttttccgcggcgggaatcagtacggaatacgcgatgggagcgggaaaagatcggctgacgagggaaggcggagagtatatcacggacatcggattcgacatttacggagcgttcggcgattattatctcgacttatgggacgagatgacgcaaatgttcgaaggcatggataaaaattactgggcggtgcccatggtgatgaattacgcgagcaaagtgaccgaggacgacgccataggaagcgtcgaaggatgctgggaggtcgtgaaaaaagccgaaggggggatgggcatgatgctttataacgcctacacctatcccgcggaagtggaaaatatcggcaatatcggattttgcgatatggcgtatacgaccacggaagagtttatgacgtggaaggataaaaagaatccttggaaaaagtattattataaattttacaacgacgacgggacgcaggtgacgcccggcgtggacttcgttccctggacccgcctcgccggaaaaatcggggaaatcgccgcggaaatcaacgcggcaaacgaaggaaagctcgtcaaggcggaaacggagatcgtctgcgccgacaatcagacgtttatctacgacgccgcgccgcactctcccgcgatcggagcgtatattcccaatctcgtctgcgaatacgccaaagagggaacggaggattggacgaaggaggcgccgtcggcaatcggcaaatattccgcgaaaatttccgtcggggaaagcctttatcggaaagccgccgaaaagatcgtcgcgtttgccattacggaagcgaccgatacgatgatcgcggcggatctgatcacggaagactactcttcggacaaaaaaacggtgaaattcgacgtggaagggtatgccgtgtccctgaacggaatcgattatcttccgtacgaaagaaattcggaaatcgacgtgacggatatgatcgtagcggaaggtgccgcgagatacgtgtggctgaaagaggggcaaaaagccccgtatgcctataaagtcaaaaagtacgaaacgatcattgttcaggattttgaaaagggacaaattcccgtctattcctcttacgaaccgtcgggaatcgtcaagcacgacggcgcgtattcgggaaaattcaggttcaaatacaacgacaacgaaagaaagtatatgagcgagaattatttttcggattttctttatcccgcaaattcttccaatctctattcgatcgcggactgtatcaaactcgaattctggatttattcggataaagaattgtcgctaagcgcgtggctcattgccgatacctggggcgggtgcggcacctcgcagtcgtttgcggtggaaaagaatacgtggacgaagatttccttcgatttgtccctgttcagcggcatcacctcgacgccggaatatacgctcagtcatatgcacatgatcacgctgttgacggatcgggaacctgaaaacgtctttatcgattcaatcggcgtggtgggtttgaaataataaggagaaaagaatgaatttcggaatttttcatacggctaaaaacgtatatcccgacgtgttcgaagaattattgaaaagcgattatgtcgacgtttttctttcggaagggaaccccgaggatcccgtttccgtagagatggcgaaagagatcgcgcaaaagggcaagaaattatacgtcgcgtttttcacgtggattttccgccacgtcacctatcagaaaatggtggatgtgggggaagagtattccgtgaaatgcgtgctcgtgaaggattgggaaaaaatcatagaccaaaaaattgcttttttgaaatcgctcggctgcgacgacgccatcgaaggattttatatagacgagccgcttttaaacgggatttcgctggaagattttgaaaaggcgacgggataccttgcgggcgcgtggaagggaaagagaatcttttgctgcttctccgtcgcgggcgtcgcccccgatatctggacgacggggaacattcagccgattacggagaaagcggggcgatatctcaccgacgtggcgttcgatatgtatcacaaattcgattggaagtacaaacatatcgcggacgaaatgaaagagcggctcggcaacagagcggacgtcaggatctggtatattccctgcgtcatgaattatcggggggataaagacgaggcgcactgtctggaacatttgaacggctgttacgaacttctcaaaaaagaaaagaatcccggcgggctgttgtgtttcacctattacacctttccgcgtgaagtggaagaattgggaaatatcgggctggatcatcttttcggacaggaagagggagatgcaaactggaagaaattacacgacgaaattctttccgtcgggaaggactgcgtcggtaaaaaatagaggaataaggagaaaaaagatgacaaaaaacaacaaaacaaaaacgctgtgtctgttgatggcggcgtgccttgccgtgggaatgacggccgcctgcaccgccgaaaagcaaaacgttgtcgcgaccgttacgggcgcagaggaaggcgtcgtgaacgccgtctacaacggagcgcccgtcgccgtgacgacgacgagcgaacagtcggtggaatttaccgtaaaatatgcgggaattgacgggacggtgtatacggagagcgaaaccgcgcctacgaacgcggggaaatattccgtcaccatttccttcgagggggattccaaatacaacgaatatacggctaccgtgtctttgatcatcgcaaaggcggagaatcattttaccgtttcgatgccgaattatacttacggacagacgggcgtagttccgacggtgtcggggaattccggcggcgcggtcagttacgtttacgagggcacggggacaaccgcgtatgaagcgagcgctcagcagcccggcggcgtcggcagttacaaagtgaccgcgacggcggcggaaacggagaactacctctccgcgacggcggaagcggcgttttccgtcgaaaaggcggcgggcagtcttgtgatctcgatggacgattacacggtttctcaaacggacgtatctcccgtggtaaaaacgaacctttcgggcggcgaagtcacctatctctacgaggggacgggggataccgtgtatgcggcgagttctgtaaaacccacggccgcggggacgtatatcgtaacggcgactgcggcggcgaccgaaaattacgaggccgccactgcgaacgcggcttttaaagtcatattgcctcagaggacggacgtgcccgaaactgcccccgctctggatacgaatacgatggtgatggacgacggatttgcgatcgtcgcggaagaggatacggaatatcgattgacggacgcgtcgggcgccggcgtgagcgaatggcagagcacgggcattttctccggactcgaaggaaagacgacgtattatgtggaggcgagaagacctgccacccaaacggcttcggcttccgttccgggcgcggagaaactggaagtaacgaccttggaaggcgcgctcgccgatgatttcgaaagaaagagcaacggggacggcgtggggaatttcaccgcgtctaatgagaaggcgcacggcggcgacatgagcataaaaagctcgacgcccgacggcgcatacggatttatcttgcagccgaattctttgctggaacgagatgataacggaacgaaatacaacggctattggcaaaacgggaattacgacgaaaatcatatcgatatttccggatacagatatatttcgttctgggcgtattttgaaaaggatgtggcgatcggtcagggcatcgagatctggaagacggacggaggagatgtgtttaactgcggcgtcggtcagaccataaagggcggctcctggcagcgtgtcgtgatcgatatgacgatcaacggcgtttgcagaggggatttcgacgatatttgttctcacgtcggaaaaatttactttaatttcgcctacacccccgccagcgaaatcggcacgttctatatcgacgacttcatgtttttgaaataaggcggcagccgtcgcggacggcggaaaagaaaagacggaaagccgctcccgtttgtaaagggggcggctgattattttgaaaaaaggaagaaagagggaatatgggatatgcggcgatgattctggctgcggtactcaacagcgtttgcaacgtcgtcggggaatgttacaaccgcagggtcaagcgaacgaatccgttttgctatacgctgatcgtttcggtcatggtttttctgttttattggatatacggccgattctcttttgcgttcgactggttgacgctggggatgggggcggcgtacggcgtttgttattgtctgtactttgtatttatgctgcgcgctcttgcgtcgggatacgtatccctcgtttcgctcatcatagcgtattcgctgatgattccgactttattcggcttgattttttatcgttcctatcccggcgcctttttttatgtcggtctggcgcttttaatgatcgcggtgtttcttatcggaaagaaaaaagaaacgaagagcgcggaagagggcgcggcaaaaaagcggagtggaggaaaatggatcgcgtttgcgctcgcggcgatgctcgtgaacggaacgctgtcgattttgcagacttatcagcagacggaaaaaaaaggattctataaaagtgaatttatgatgatcgccatggcggtcgtgttcgttttcagctgtgtgtcggtgtatattttcgcccgcagggacaaagaaacggtcgctgtaaatttccgaaagggagggtggattgccgctgtttacggaatcgcaaacgcggtgttgaatcttttggtgatggtctgcgtcggactgcttcccgcgcggctgatcttttcgacgatttgcggaatcagcttggcgcttacgcttctgctctctttattattttttaaggaaaagctcacccgacgacagctggcgggatttttggtggggctgatttcaacgatttttatgaatatatagcacagcggcataaaacggcaaagcggcgggaacgccgcggcaaattttataacttggtggctcaatggagaatattttaaaaaaatataaaataggcataggaaaagggagcaaaaccgttttttccaacgagaatgacatttatcaggacggaacgctgccgatgtatcgggattccgacggaacgctgtgggcgatcagcgggcatacgcacgtcggccatatcggcgtctttaaaggcagttgtttttccgacctccgtgaagcgtatcccgcgcatacgaattttcatacgggaaaagcgggcgccgctttcgatgggataaagtacccggaggggatcctatccaggggatcggtatggccgatgggcttatatatctgtccgagaacgcatcgctttttttgtttttttcacaacgaaacgggctggaacggacagggcagcggctatgattcctggggactttgcgaaaaaccccgtttcgattcggattttaggcatatcgggctgatgtattcggacgacgaaggaaggacgtgggatttttcccggtgggtcgtcacctcgcagcaggtctgtttcagcgagcgttacaatcccgataaaataaacgttatcggtcaaaggggaaaaacgatctctctcggcagcggagatttcactttgttcgtcaatcggaaggacgggtttctctatcttatttataatattctgacgatagaaaaagatacggggaacgcaaagcgctgcgacgcatattacgcgcgcagccgcatccgcaccgacggcacgatgggcgacttcgtcaagtactataacggcagtttttgcgaagcggggaatctcggcagggaaacgtccgtcgtgaaatatgcgtggcatcccaaaatcgcctattcggagaaattggatctctatgtcatgacttccacgcgaataaatcggaactgtaaagatatcaattcctttgtggcggattatgccgaatttcgtacgggaaaagatttgctccattggagcgcacccattcgtttgccttacggcggcgggaaggacggatattttgggaatcattacatatcgttggtatccgacagccgccgtctgcccgcttcgacgctgaacgggaaaatctccgcgttgctttgtcataacgccaccgacgtcatggagtatcctttgagctttgaagaaaaaaattgaaaatttttcatgcgaggtgaccatatggaatttacgttcgggtttctgaaattcaggacagacggtaaaaaagttcgtctttgcgccgtcgacggctcggattcggccgggatttttaccgaggtaaacgtggcgggcgaaaatcgggacagccatttcgggaacaaaatgatctgttcttcggaatccgccgcactcgaatacgtttcgcatagctttgcgaaggactcgctcgttatcgtacagcggagcgaactcgtggaaacgaggacgcattttgcccgtttgggaaacaccgtaagcgtctatacggaagtcgaaaatatctccgacggcgcccttgtattggacgaggtatcctcgtttgtctattcgggttttttaggaggcgcggaaaattcggcggaaatcgagttttacagattcctgcaaagtcaccacggcgaatgtcagccgagaaaggcttttttatacgatctcggtctgttcaagacccgcccgacgagtcagaaaagaattttttgttccaatgtcggcagctggtccaccaaagaggagttgccgcaggggattttgtcgtaccgcgggaaatacgcgatgtttcaaatcgaaagcaatcattcctggtattacgaaatcagcgacaacggcagtatctatttatatctgggcggcgcgaacgggactttcggaggatggtataaaaagctgatgcccgcggagagctatcggactgtaaacgtcgcgataagcgtttccgacagcttaaacggcgttatcggcgagatgacgaaatatcggcgcacaatacgcgggaggaatcgtgcggacgagaatttgcccgtcatcttcaacgaatatatgcacttgtcctgggagagtcccgcggaagaaaatacatggaagtacctttcggaaatagcttcgtttaacgtaaaatattacgtgatcgactgcggctggcacgacgatgttgcgggagatgagatttatccccgcgtcggggcatggaaagaaagccgaacgaaatttccgcacggaataagagctgtgacggacgccgttcgctctttgggaatgaaagcggggctttggattgagccggaagcggtcggctatcagtgcgaggagatgcttgcctattacgacgaggattgttttttgcaccgttacggaaaaaagatctgtacgatgggacggtattttttgaatttccgaaatgcaaaggtcgtcgattatcttaccgacacgattcggcggatggtggaagagtacggcgcggaatacatcaagatggattataatcaggatatggggatcggaacgggcgccgaaggggaaagtttaggagagggccttgaagaggaccgcaaagcctatttggaatggatcgacgcaatccgggatgcttatcccgaggtcttgatagaaacctgttcctcgggcggcatgagaatggattatgaaacgctgaaacatttttctatcgtatcgacttccgatcagatcgactataaaaaatatccgtatatcgctgggaatattttgtctgcggtattgcccgaacaggcggcggtatggagctatcccgtcgcagggaacggcggacccgaagaccttttcgctcccgacgaaagctgggtggaaaagaatatcggcaaagagcagatcgttatgaatatgatcaactcgtttatgggcagaatgcaccttgcgagccgcatagggcttttgagcgaggaaaaaaaggaactgattaaagagggaatcgcctgctatgacaaattgactccgctcaaaaagcgggcgctcccctgctttcctttgggattcgccgattttgaaaaaaagacggtggcgggcggctttacggcggacgggatactctatctggcggtgtggaatctcggcggtgaaaaagtaacggaaataccgctggatgaaacgattttgtcggcgtcggtggaatatccgaaaaatatgccctctgatttttccgtttcgggaaatacgcttaccatccgctttgcggaggagttcgcggcaagatttttcgagataaaactgaaacgagaagacgcttgaaggaataagaaaatggaaaaaacggatatgttcattttcagcgggcaaagcaatatgcaggggcagacggaagcggcgattttcgaaaatcccgtcgaaggagccgaagaatacaggctgctttcggattctttgcttccgcttaaaaatcccgtcggcgaaaacatcggggaattattgcttgcgtcgcatttgggacacgggtctttgctgccgtactttgcgcaggcgtatattgccgaatcgaaacgcaaagtcgttgccgttcacgcggcaaaaggcgcaacagtggcgaaacaatggataaaaagagcgccggagggaaaagaaagatacgaaatacttacccgtaaagccgttgccgccgaaaaaaagagcggtaacatcgataaaaaatatcttgtttggctgcaaggagaaagcgacgctttggcgggaacaagtcctgaaatttatgcggaagaactaatagaattgaagaacgacttgaagcgcgatctcggcatcgataaatttatgatcatagaagtgggatattttgcggcgaattacgggaagaagaaatatgacgaagcgattatgcgggcgcaggaaaaggtttgccgggaagatcccgattttctgctgctgactgatatctcgaaacggctctctttaaaggagcgttggctcaattccgaagcggcgggacattacaacaatgccgcgatgaagataatcggcaaggcggcgggaaaagcggctgcgcataagacgagtatggacgcacagaaatttaattgatcaaccgatatgtggcacagaacgtccggatacactttcttcgcgcttgcgtcgctttcctcctacttctttttctgcgacttcgtactatatcgataaacgcggcggtgctttcgccctattccgactcgtggttcgcctttggaaattcgggacgagagaaagcaaaatacgtataaaaagccctcggcaaagcgctttgccgagggctttttattcacaagtaaaacatgatattttatgagctttcgtgcaaagtgtatctctttatcgcaggacgaaacgctcgttatgtttttgtcgctttttatagggagtaaatgtattttgtcgaaggattttatgggatgaatagtattgcgtatgtaaaactttcccgcagggacgcagagccgttttgcgtaggaggcgggactgttatgagataacggacaaaagttctgattccgcattttaaattacagttccgattgccgaacacttgtccgtcgtatgcgaaaggggaaaatttttaaggctccaaataggtggcggaaattcggatgccttgctggaaatccccgaaatttcttccgaataaatttaagcctcccgcatatttggcgttctttttgacgccgagcttaaaacgcaggcatttttccttggtgataaaggcgaaatcgtctattgagatctccgaggaaacgtttacctggttgatccacacgcccatttcgtctattcttatctgtaccagcattccatactgcgtggacgccgccggccagctcttgggcgtatatttgccgctgcgtccgccgaaatcccccggagaggtgtacgtcccgatctctttatcgttcatccaaaaggtgatgtccgatttgaaggaattgttataattggcgcattctgagcagacttcgcaggatatttgcagggcttcgagcactttattcttaatcgcggcgtttgaaacgtgatattcgagatacccttccgtaaaccagatgatttctcctttgatccgcttatagttataaaaaatatcgggaagagcctcggcgccgatgagattcccgtccgcgtccgcgatcccgcacggagggacgatatcgaaaagagtaaaactgcctacgggaagttcggtgctgaacgcgtgggaagaggagggaaaagaattttccgcttcgtttataaataaaatttccaaacaatgcttttccagcgcgacgatcttttcgtttccccgtttcgagtgattttgcgtgagattgactaaccccgctttctgtaaaaattttacgtgaaaggaagtgttggacagcgacatattcagccgatctgcaatttcctgtatcgtgtacgaattcgccgtcagcagggaaagtatctttcttctcgtgggtgcgttgagcgcgttggctacccgttcgagatgctcgtcgttgcaaagcgtgagggtgagctttttttgaagcaacaaatccctgttggcgaaaaaatctttcggcatagcgttctccttttttagcgcgcggcttcttttctttcattatacgcgcgccgttttataaagtcaagaaaattgccctaaacttcgatggatatcgaagtttaaatgaagattgcgcgtattttaaaaatgtggcttgaaagtgtaagtgcgatatgataaaatgaatttgaaaagaacaaggaggattataaaatgagaaggaccggcaaactgttgatggcgatatttttcggattcaatctgatttttgcgagcggttgtttctttacgggcagccaggggagcggcgacgacaatatagaggcgtcggattttacgctggatcccgccagggaatacaagatagagttcatgatgtggggcgcgaaggacgaggtggacaactatacggcgctgatcgataaattcatggatgaaaacgagaatatcacggtgagcatcacgacgcaggattcgacgcagtatatgagtacgctcacgggacggctttcgggaactatgcccgatctcttctatcttcccgaatacgaattccgtccctgggtggattcgggaaggcttctttccatcagcaacggctttacggaagaagaatattcctccctttggtcgactgcggtcgactggtattcgtataaccgcgcgaaaaaaacgctgggcgtttcggaaggctcggatttgtattgtctgcccaaagacatcggtccgtggacgctgatgtataacgtcgatatggtagaggaaatggtgagaaacgggaagctgacgcagggagaagcggatttgctggcggactcggacaacgctctcacctggaaacagtttacggacatttgcgtaaagatacaaagctatttcggtatggaaaaaaataacgataagttttacgctattccgtactacgaactgagcagtgcaatctggtcaaacaacgccgattatttcgatgaaaacgccatgcacagcacgatttcgagcgacgaattttgcgaaacgatagaatggctttgggatctcatgtatacgtacaaggtcgtgcccaaatccacgggggattctgcgcaaaatatgtttctcgcgaggaatgcggcgttctgctgggtagggccttatctcacgcccatgtatcatcagcagaagatgaactatcgcctgcttcccgtcccgtataacggggaaaatgccgacgcgaggagcaccacttggatcggcacgttagggctggcgatcagcaagtcgacgaagtcgcccgcggcggcgcttgccctgatgaaatatctcagtctgaacgagagcgcgcagaaggatttttatgcgcgcggtcagttgattcccaatttaaaatcgatggctttggacacgcagacctttttatcggaaaaggacgattccgtggcgctttggcctcaaaaccgcagcgtgtattgcgacatcgtcgacggcttcggcggggatacgaaggcggcgctcggaaaagcgggcggggataagatcgggggaaaggtacggccgcattatcacacgtttgaaaattcgtggctgaccgccctcaatacggagatcgcggatatttacgcactgaaagacaaagcggatatcagggcgcggctgaaagcgtacgatccgaagatgcagtcgtatctcgatcactccaatcaaatcgcgggaatcatcgtagaataaggaaaaatacagactatggcaaaaagcagcttgaagacaagagaaaagtttgccgcgctcggtttcgtggcgccgctgtttataggctttgcgctgtttacggcggttcctctggtcgtcgccgtcatttacagcctcgtcgattatatgccgcttcaaggcaaaatttctcccgtcagctttaaagtgtatatcagtttgttcaaaaatcaactcacgatgctcggatttggccaggcgatactcaacacgctgatcatcatgttgagcattcccgtcaatcttttgctgggactgttgttttcggctttgatcagtcagaagagttttcgcggcggcacttttttccgggtcgtgtattacctgcccgccgtgacgggaacggtggcgattacattggtgtggaaattgatgttcaacgaaacgcaagggatcatcaacgtcgcgctcaaagcgatgggggcgatcgacgaaaacatcaattggctggggatcacctcgggtacgatttatccgcggctggtgctcattttaaaaaacatatggggcggaatcggcggggtaattcttttatacgtggcgggcgttttgaatatctcttccagctattacgaggcggcggaaatcgacggcgcgggaaagatcaggcaatttctggccatcaccgtccccatgctgacgcccatcacattctatcacctcatcacttccgtcatcggcggactgcaagcattcatggatacgcagctgctggcggatacgcgcgtgacgcagacaatcgtatatttcatctacgacaacggcatcaacaactatcgctacggctatgcgagcgcggcgtccgttctgctggcgattgcggtgatgatcatcaccgtcctgcaattcaagctgtcggataaatgggtctattcggagtaacgccatgggagaaattgagaaaaagagcaaaaagaaaacgccgttttcgtctgcgggaatcaaaattcttatctatacgcttttgggtctggcggcgatcacgacgattttcccctatctttggatggtgctggcgtcctttaaaacgggaatagagatctctacctatcccgaacggatatttcccaaaaatcctaattttacggcttaccgaagagcctttgaagaactcaacctttggacagggatcaagaatactctcgtactcgtcgtctttgcggtgctttttccgcccgtcgtttcggcaatgggagcgttttcattcgcaaagctcgtgcttcccgccaagcgggtattgctgctggtccttctcagcagcatgatggtgccctatgcggcgttgatgttgccgcagtatcagatttggcagtcgctgggattcgtgggcacgctctggccgttgataattccgaatttctttggcggggctttgatgacgtttttctttatccaatatatgcagggcgttcccaccgatctgttcgaagctgcgaaaatcgacggcgcgggatatctcaatcagtttttcgccatcatgcttccgctggtgaagcccgcgctcagcgcgcagatcgtatttgccttcgtgggtacctggaacgattatttcattccgtccatctatctcaacaaaaccgaggtaaagacgctgcaacttcaattgctctctttgcagcaacagcagaacaatttgatggacatgaacatggtgatggcgggctcggtgatttcgagtattcccatgctgatcgtatttacgacctgtcagaaattttttgtcgaatctcttgccatttcgggcataaaggggtaagggaagaatccataaggaggaaaagaatgaaaaggagaactttgctgcttacggcgggaatattcttgtcggcaagtatgtttgcggcgggctgcgccgtcggggcaaacggagggtattcggtttttcagccgaataaatcggaggggaattccgatttcgatttcccgtccaattccttttcggcggacgtgaagctcgacgggtttctcgacgacgaacggtgggcgggggaagacgtcatttccctgggaagctggaacgacgcggacgccgaaagcggggaatacggcgcgatcgtttccgataccgccgattacgtgcactcgaagcgggccatcatcaaaatgttccggggaaacgtgggctttcatttcggcttcgaggtgaaagacgacgacgtggcctatttgagccttgaagacggcgatcccgccatctggacggacaacattctcgtcaatctctgtacggcgatcgacggcggcgtcgtccccatgtcggacgattactattttatcgtcacggcgttcggcaacaactgtttccgccgcggcgccaacgtcgcgggtacctggggcgcgtggagcggcgtgctcgattacgaggcctctctgcattatgcggacgacggaaagaccgtaacgggcttcggcgtggaactcgtcgtgccctatactcagatcggtttgaaaaaagacagtcccgtaggcgtcaccttccgttcctgcgacagagtgagcgcaagcaattccatgatcgaacgggagtggtggtacaagggcgacacgcaccatttcaatacgccgaatacgtatattgtctggggcggcgacaatcggctttacgagtattacgactataagatgccggacgtcaccgtgaaggggacggctgtcgactatattacgggcgaggcgcttgcgggcgtgacgttcgacgaaggcgtgacgactgaccgcaacgggaatttcgtgatggagaacgtagacgccaacagggatttggtcttgacggcgacgggagaaagtctgctcggcgaacaggagttttccgttccgcgtgacaaaatgcgggtactgaacggcgggacgctcaccgtcacgccgaaacttctgacgaagaaaaacaagatcacgcagacggtgaaagggacgattacctcgcttggaaaggtcgaaggtgcgacggtgaaaataggggacgcggaaacgacgctgtccgccgacgggaggtattcgctcagctgtgtgttcgaccgacccgttttgagaatgtcggtgagcgcggcgggttccgacgcggtttacgaaacggaaatttcgattgcggacgccgtgaaaggggaagtggaaaagagtttcgaactgcccgttatgagtcgtttggcacaaaatttcgggacgaacgaaaatgcggaatgttatctcggctggacgaaggaaggcctgtttgtacggcttatcggtacggagccgacgaacggctacggcgtggcgttctcggcggacggaaagacgggaacagtggtgctgtatcattccttcgggacgatgtgcgttaccgatttcgtgacgcaaagctggaattatgcgccgccttcctcctacggcatcgacgcggaaaaacggacggattcccgcggccgcgacgtatacactttcgtcgttccctataaaaatctcggtgtggaatacggggcagagcttaaaatcgcgcccttcgaatacacgtcggcagggccgttcgcctggtacgaagacgaaaacggcgtgtcctatcccttcggcgacgcggcttttttggcgaaatatcccactcttgccgctgacggaaatatctctttggtatttcccgaaacggtgctttctatctaccgcatcggctctttcgggaagacgaacgcgacggctttattcgaaaaagtcgaagggcggacggacggcatccgagtgacgatcgactatacgccgacggacggtttctggggctttggcgtaatgtttttcgatttttcttccggaaaggggatcacgcaactttacgttcccgagtacggcacgatagaccatcgggaatacgggaactgggagtggaaagacaattacgcgcccgcatcctccctgggcgtgctgtcaagcgaaaaaacgaccgacggcaaggcgtcgatcgagctgttttacggctatgccgttttacagggcgaaaagtacggattgggcatctctgcggatacgctcgacatcggcattcagatgttcgaatacgtgctcgacggctcgggcaatctctacgcggtctataactgcatcaacggcggggacggaacgcctcttccgtttgacggaggcgccgcttctttcctcaaatggagaacggcggaagatctcccgcaaagcacctatacttacgagcatctgggcgttcacgatatttttgtgactctggaaaagctggcggacggaatacgtctgacgtatgcggcgcgggaaacgtcccagcttttcggctacgggatctgccttgacttgcccggaggagcgcaggacgtcagtttgctttacgccacgacggggaatctttccaaactcgcgtacgggacgtgggtctgggagtatagactgccctccgaattcggcgtttcggcggcgcgttcgaccgcggacggcaggacgatctccacgctctttctgagctatgaaatgctgggaatagaggcggattttcagtcgatcggactctgtctttttgaagtcgtcaacgagggcggctcgcaattcggcatttacaactgtatgaaaaagggcgacgcggaaatcgccatagacggcggtacggcaaactttgtcagatggaataccgacgagggataaggagataaaaatgaaaaaattttggaaagggatacttttcatggctctggcgggagcgacggcgcttacgggctgctcgccccaagaatcgggaaagacgatctccgccgctcccatcgaggggtggacggcgcccgactataagacggaatattacgacaattatcagtataatgcctattataatcccgaaggcgccgccgaacatctgcccgaccagggaatctacggctcgggaaatgcgttcattctgcgctataacggcctgtactatatgtatatgggatcctcgaatttcgcttcttcctcgcttccctgttggagttcggaagatctgatgacctggaaaaaagcggacaatggagtaaatgcccaaggctttattgcggaagatccgcgcctgaacaacacctatccaccctgcatcagacagtacaacaacgttttttatatgtatgtctatatcaaaaacgacgtaatcgcgcaggggaactatattctgaaagcggcttcgcccgtcggtccgtttgaattcgtgacgggagcggacggcgagcccgtctgctatacgatcgacgcgacgacgctgaatatcgactgcgatatcttcatcgacgacaacgaggacgtatattttatgagcgggcatcaggataactattttacgggaatccgcgcctttcaaatgccgacgatggacagcgtagcctatgacgaaaacagttatatcaatctcgcggaaagctcggtgggcggctggacggaaggcaacgggatgtttaaacgccgcggaaattactacttgatgtatacgggctccaatattctgagtccgggatatcttacccattattccaccgcgcggggcgacggctggaaacgggcgttcgggacggaaaataaggtgaacgccgaaggattcgaacagggaatcgactggcccatgggctgcgaaacggatcccgctttctattctctcggtcatgccacttccgtgctcggaccggacatggacggattgtattatcactatttcagcgtcaattcgtctggccccaattgttcgtttgccatcgaccgcctcaccttcaacgggacgggcatggattcggcgcagacgcagttccgttcgataaagccgaagcggccggagatttacagctattcgcccgagaacgacgaaaattttatcaagagcggagaaaacctcctttcgaaagaaaagggcgcctcgacgtttaccgcggaatataattttacgggcggggacgtaaaatgtatcttcggatatgtcgacgaaaacaattattcgtatgtcgcaacggatctcgcggcgaaaaagatacgggttttcagcgtggccgacggcaagacggcggaaaagggaagcgga

SEQ ID NO: 4451 - DNA, 3095 bp, Unknown
  16S sequences of unknown bacteria
ccgcctctttttcgtgtgataatgtgctgcagttatgagtgttttgcaaagagaggttttctctcattttcctgtctgtagatggagagaaacggcggtaatatcatatatgtgtataccgcaaatcgaatttgccgctgtttcgtattttcttatcttcagtggatatcgagagcggcatgatacccctgatataccgcgaaagtgatggtgtccggacgtacacagttgccgatggaagcaaactgcggcgcgatgcctctgagctcttcgacgacagaagtgttggcttttaagcccagcgccgccgcgatggtttctccttccagaacgagatccccgccgtcttttgtgcagacgacaccggaggaagtgacttccctgcaggtcgtgtccgtgtaaatttcgataccgacttcatccatttttttcatcagaagagggcggtatctgatatttgcgtccggacagagttcagaacgcatttccacaactttcacttttttgccgaggtcggcgagacataccgcaagttcgcagcctacgagaccgccgcctaagacgatgacactgtcgccgacgcgatctttttccaggtaatagtcttcggcgaggatcatgtttttcgcttcccgaagacccggaatcggcggaaggacaggatcgctgcctgcggcgacgatgatagcgtccggcgcttctttttctgcatattctctcgtcactctcgtattgagacggatttccacgccttcctgttcgcacaggagtctgtaagtaccgcccagctgatacatttcatatttgaaaggaattgcagcttctcccttcaggagtcctcccacttcgtcggtggcttcgcacagcacgaccttgtggccgcggcgggcagcggtataagctgcgtagagtccgcccggtcctccgcctaccacgagaactttgcgggacttcggagcgggagccagttctcccaggccttcgtcttctcttccgatcagaggattgacggtgcagcggcgggtggatgtgacgccgcgctcagccatgcaggtgaagcagcgcaggcagcggacgatttcttcatctctattttcgtagatcttgttcggcagctgcggatcggcgaggagggcgcgggccatttccactacgtccgcttttccggatgcgatgatttcttccatcatttcaggatcgttgagacctcccagagtggccaccggtttgttcacatgttttttgatctcggccgccagatagacgttgcgtccgtgatcttcgaaccaggacggatgtgtgatgccgaacgtcttctggtaagtaccggcggaaacgtggatcagatcgacatattcttctacagcctgggcgattttgattccttcatccaggtggtagccgccttctacaaattcgtctccgctcatgcggaattcgatagggaatcccggaccgactgcttctcttacggatttcagtacttcctgagccagacggacgcgattttcgaaagaaccgccgtattcgtccgttctgaaattgaacagaggagagaggaactgattgatcagccagccgtgtcccccgtgtaccatgaccatttcgaagcctgcgcgttttgcgagggcggctgtcctgccgtaagcttctacgatctcgtcgatcatttcttttgtcagctcgccgatttcaaggccgtcggcgcggacgcccgcggaaggtccccactgcgccagcccctgttttttgttcttatccgcgagataagtgccggagaactgaccggagtgggagagttctacggaagggatacagccgtggcggcggagtgcatctgcagtgtaagtgaaactcggaaggcttcccggaacggagagatccagatgatatgcgtgacttccgtccgtttccggatgaaccatgcattccgagacggtgacagcggctgcgccgccttttgcccggagttcatagaacttggtggatttcggtccgatacagcagtcagccgtgatatcggtacctcccatcggagcggagaaaattctgctcttaaatgtggtgttgcctaatgtaatcgggctgcagagatgcgggtatctgtactccataattttgtcctccttgtcgaatgaacggtgattgctattgatctctttttcatgtctgcattctaacatgtatatcaaaacatgtaaatacatacatgattttgttttttatttgcgtgacatgttttttgcggaaaacttatttttggatatctgcgggaatcaatgtataatgaaagcgacaggaaatctttttcagatgggggaaagtgtcagagggcccgtttggatctgccgccggcttatgcgccgcggtgaaagcggcctgctgaaagcggaacttggattttcctgctgcagaaggattccgatgcggcgccgggcggcattcgccttccgggacttctatcagtggcagaagctcacggaaatacaaaaatacagtctgcagatacagggacgatcggattttgtcatatgcgtcaggaggaaagaacatgcgcgtattgaaatatgctattctcggattgctgaatcagaagagcatgagcggatatgaattgtcttcggagtttgaatccgctctgaacgagttttggaatgcaaagcacagtcagatttatccggagctgaaaaaactgacggaggaggggatgatcacttttgagacggcgattaccggaaacgtactggaaaagaaaatctatacgatcaccgaggcggggaaaaagtcttttcgaaaatggctggcagaggatcagccgatttctccgacgccgaaagatacctttcgtctccgcgttttttttccaatgagctgccggtggaacggagactggagatgtttgaaaatcacctgacacagcatcagcttcgccgggcttatctcgaaaaacagatgaaaaaattcgacggcgtaccggcgcgcacatcgcctcagttcggcgattatctggtgctgaccggagcgatcatgcgccaggcgatgacctgcgagtggctggagaagtgtatccggctcactgagcagacggaatagcg

SEQ ID NO: 4452 - DNA, 9385 bp, Unknown
  16S sequences of unknown bacteria
ccgctgatcttggtaggattcagagaaatgttttgctccttggccattttgatggatacgggcgaaaactccggcaaaaagcgctggcagcataccgggcatccgcatttgccaaggccgccgagcagctttgcctcgtctctgacgccgatctggcgcagctcaatccgggtgcggaaatgatgggccaggtctttgaccagctcgcgaaaatccacccgaccgtccgcagtaaagaaaaacgtgatattgctgccgtcaaaaccatattctacgctgactggtttcatgacaagttcatggtctgcaattttcttttcaaacacagccaaggcagcggcttcttgttttctgtttttctcctgctgggccctgtccttctgtgtaacaaggcgcagcacatttttcagcggaggaacaatcttatcctcctccacttccatgggcccctgcgccacacgggcgatttccgccccccgggcggtttctactacaacatcatcgcccacttggcaggcaacgcggttgggggaaaaataatagactttattggatttataaaattgaacccctactacggttttcattccatttcctctttccattttaaccaaagccattcagcggccattttggccgagacattggcgtaaaccattttatatgcctgggtgatcagatcggataaaacagcgatctgcgtatcggaggcctttgcaaagggatggggacgcgccgattgatgcagcatccaagaaacgctgtccatccactgagccaggcataccaaagcggcctcctttttatccggaaaacgctgttttgcttgttctaaggacaatgccctaaaaaattctgtgatggaaacagcctcttccttttcattatactgggtttgtccggtttcccgcaactgtacgcagcgggagcgcacggtttccaataaaaagccgggctgtgtgcaaaataagccgaaaatcgtgttttctggcggttcttccagggttttgagcagacaattctgcgcttcctgggtcatggtatctgcctgtaaaaggcaaaccaccctgtttttaccttcaaaggcgcggttggaaagctgctctatcagcgcacgcgcctgccgtattttaatggtagcgccctccggctgtacagtgatgacgtcgggatgattatgggtgcggatgcgaagcagcacatcctcatcctgagaacgcatggcactgattgcaaacgtatccgcgagctttgcctgctcttccggcggggcgcaaagaataaaggcatgtcctcctgttaaacgcatgaggcaaaccaccgttcaaagccttggacgacgcgctgatgcacttcttctatggtgccgtcggcattgattaaacaatattgcgaagggtccttttgataaagggcttcgtagcccgaagcaaccttatgacgaaaggcggcgccggcctgctcgatacgatcctgtgcgccgacagtgcgccgcatggccgtatcgggatcgatgcgaaaataaaaggaaagatccggccttaaacagcctgtggccaggtcgttgatgcggcgaatggtttcttcgcccaggccgcgtccgtaaccctgatacgcaatggagctgtccacatagcggtcgcagatgacccaggtgccgcgcgccagcgcaggacggatcacagtgcgtaccagctcgctgcgggaagcggcatacaaaagcgcttcgcatagatctcccatttcgttttcaggggcgaggatcaggtctcggatcttttccgaaaccgggcagccgcccggctcacgcgttaaaagaaaaggaatgccctttgcttgcaaatgctgggcaaacagctgtatctgtgtgcttttgcccgccttatccgggccttcaaaggaaagaaagcggcctgtcatttctgctgcccccataagatctggcgaagctcttctaccgaatgggcgataaaatcagcgccggaggagatcacctctttttcctcggcaaagccaaaggtaacgccgatggtcatggtatggttttgctttccaccctctatatcgaaaatgcgatccccgatcatgacgcattgctctgccggcattttcataaaggagatacagtcgcgaaccaaggcagttttatccaccttggtcttgctgtcgtaggtgcaggcaatgtggtcaaaggtatccataaggccgtttgcttcaaacaggggaaacagagaacggttgctgcgcgccgtggctactgtcatttggcaggcggcctgttttagatcggccagcagggcacgcatgccgggatacagatctgcgtcgtggacgccctgggttaaaaacgcgcggttgtatcggtcgatggcttcgtcgtatgccgcaccggccaggccgaattgatcgacgaataccttggaggatttttgccctacataggcaaaaatgcgccggtaattgtcctcttttagccccatttcctcgcaagcaacgcgataagcgctggccatggcgtttctggtatcgatgacggtaccgtctatatcccaaatgatggattttgtcagcatcagtgtttctgcctcctcaatatacgcgttacctgctgcccctgcttggggctgctgatgataagatctgctttgtatctatgcagttctgggatagagccaaagccataggcacatcccagcataaacaggccgtttgctttggcggccatacagtcgaaatccttgtcgccgatcatcacggcttgccggggctctatgcatgcctttgccaattcataccgcagcacctttgccttggtatcgcgcccggcgccttcgttgttgccccatacgtcgtcaaaataggacaacagccccattttttcaagtagcggcgcgctgttatacggatggcggacagaacatacaatcagcgtagcgccctcatccttaagcatttgcagccaggcgggaataccgtcgaacgggcgctgcatttcatcggccagcacatcatagcgctgacgcatttggtcgtttaaaagcgcctcctcgcgtccgcggacatggtaaagatcccgaaaggcatgaaattccgataggccaagatgcggtaagatctcggcatccgtctttttaggcagcccgtttttctcagctacatctttgatgctttgcatcaaacccggcgcggaattgatgagggtgccgtcaaaatcaaacagaaagtagcgcatggagatcccccttcaaaactttatttcacgcatgttcgcgaaaatctacaacatagagcgaaagactagaatcctcagctggtacgctgccgctgatggaggcgcccaaccgatgcatgccctctaaataagcggcctgctcagaggtaatgcgttcgccgggacaaagcacagccgtgccgggcggataacagcaaacggcccgggcgctgatgcagccaacagactgggaaaccgatattgtccttattgtatcatactccaccgacgccggcgcaatgatttcgccgctgcgcttgggaatagaaggcggtacgggcgcattggcgccgttggcagaaaaggcggacagcgcattttcaagtgcggaaaagctctgcggcgtatcttggggggtgcaaattaacaccagatgacgagcgtctgccatttctacccaaatgcccatttcagcaagctgttcgcagagcacaaagccagatgttcccaggctggaaacatccagcaccaggcgggaaaagtccttttgctgcggatcggcctggatacagcgcacaggcaaggtggaaattgacgcttgaaaatcagcgagaagggcatgcaggcgttgataatctgcagcgccctgttcatgcagctgggcgcgggctttgtccatttgtgccaacaaaggccaagaggggctggtagattgaaagcgatgcacattattttccaggcggaaagcatcaagcttgcttttttttccacgaaaaatcagactgccctggttggaaacgcacagcgtcttatgggcggaaacaacccagccgtctgcgtccacaggctgtataggcagcagcggagaaaacccaaaatgcgcgccgtgtgcagcgtccaccaaaaaggcaacatttttttcatggcatagcgcagcaatggcaggtatatccgcacaaaagccgtagtaattggggctggtcatcacgagcgccttggcttcgggatgggaggacagagcctcggctgctttttgataggacatcggctggggcaggccttgcgctgtttggtcacaggaaatgaggcttatgcggtagtgtgccaaaagcgcggcgtgaacggcgctgatatggcagtcggaagcaaggaggattaaatcatccggcttggcacaggaaaggatgagcgcataattgcccatcgtagagccgcaggtgccaaaccaggcttgtgcggctccataggcctctgccaaaagggactgcgcctgtaacagagcgccctccggatgcaataggttgtccatagccccggcctcggtgatgtcattgttggccaacattcctttatggccgggcatgcaaaagcgtatctttccccgctgggcttgctggcgcaagagtgaatcaatgggcgtttgcatgaaaatctcccctcctgtttttttctatactactgtttttccaagcgaaatgccagtttcttttaaaaacggccgaatagagcaggccctcatattgcatgggccatgaaagaagaggtagaatgacaatataaatactctttagggggcggggattcataatgcacacagttgatttgatcgcttttgcaccgcacatgtataccatggagggagagggtgtgggctataaagcggaccatgccttggtcgtggacggcggaaagatcgtggccgtgatgaaaaaggaagaggcactccgcgcttatcaggcggaaagggtactggcgctgccgcatcatgtgttgctgccagggctgatcgatgcgcatatgcataccggcagcaacattctgcgtggcttggcacaggataccgggtattggatgatgtatggggtacagcccttttccctgcagcagacaatagaggattatgaagcgggcagcaaagtggcaatgatcgaggcgatcaaagcgggcaccaccacgctgggcgattatcaaaaggatatgcagggccgctgcgaatttcttgccaagctgggtgcacgcggaatcattacgcagaccatcagggatgcggtaaagcgcgtatatgagcccggagagctatatgaattttccgaagaattgggagagcagagcttaggcgaaaacctggcgctgtatgataagtggcatggttatgacagcgggcgcatccgcgtgatgtttggcccgcagggggcggattttgtaagccgtgatttgctcaaacgcatttatcagctggccaaggaaagaaatacgcgcgtacacatgcacacccagcaaggagatcgggaaaccgcgcagatggaaatgcgttacggcatgcgtcctgtggcctggctgaaacaagagggactgctgaatgaaacgctgctggccgttcatttgacggactgtacggagaaagaggcacagatggtggcaaacagcggtgcttctatgatcgtttgcccaggctccatcggcatcatagacggcatcgtaccaccgtctttggcgtttcagcgtgccggcggcgctgtggcgctggggtctgaccaggcctgcggcaacaactgccacaatatcttcaacgagatgaagcttgtggcgctgtttaacaagatcaaggaaaaggatccggaggtactgccggcttggcgggcgctgcgcatggccaccatcgagggtgccaaggccctggggatgcatcgggagatcggctcactggagcaaggaaagcgggcggacttcattgccgtagataccatgcagccgtctatgatgccgatctacacacatcccatgcgcaacatggtgcccaacttggtatacagtgcgcggggctgcgaagtggacgtttccgtggtggaagggcgcgttatcatggagcaccagaaactattggctgtggatgaaacgcagtatttggagcaaatgcagacgcgcgcccaagaccttggacagcgagctacggaaatgtttgaaaaaatacatggtaccaatgctgttttcatggaagaaggaaagctatgagagaaaaagcccgttttttggcgggcttttttgtagaatgggataaaaaagagatagaaatgccaaaagggtatggaaatataggggctcattgatttagaataaaagcaattataaagtatggccgattggaaatgggaggaacgtctatgaaggaaataaagctcattgtgacggatctggacggtacgtttttaagccattcagaaacagacggttcgctggaaaaaaatatctgtgctatggaagcggcacgggaggccggcattccggtatttccttgcacgggccggtcatggctgcaaagcgccgcccaggtaaaaagatttgggtttgataacctatgcgtcgtaaataacggcgcatccattgtagaaatagacagcggagagcttcgttatcgcaaccgtatctctcctgatcttgtggagccgttgttggccatcggcgaaaaatatcagggcaacgatatcatcacgcaaagttcttgccaggaatttatcggctttttggcctcggatgagacgaaaaaacaacaaattttagagcggtacggcccgcagatgcagggagatgaaaatattcgcatatttaccagcgtagaggagatgtatctggccagcagagggtcggcggagatggtacggtacattgtcgagccaaaaaatgtgccgtccagcatgataaaagagctggatgccattcccagcgtagagatcgcctggtcttggacgattcatttagatgtcatggcggagggcgccaataaggggtctgtgttgcccattctggcggatatgtacaatgtagagctggaaaatgtgatggcgctgggagatcaggacaacgatgcgccaatgctgagcatggcagggtttggcgtggccatgggcggcgctagccaacgctgtaagcaggtagcggactatattgcccccgcagtagaggatgcggggtttgcacagacaatcgagcggtttgtgctcggcaaaaataggtagaaatcaaaaaacacatctcttgtagggatgtgtttttttacaggaggatgcattatactgaaaataatcatagcgttttttagagcagaggccaaagcatggagggaggaaagatagatggaaaccttggtatattcttatcgtgggccgttgaaggatttgtcctattccggtagcgcagcggtggtaaacagcgagggaaagctgttgttttactgtggcgagccacaaaaaaccgtgtatatgagatcctcggccaagccgatgcaggcgatgtgcgtattggaaagcggcgcagtggatgcctatgggctaaccgaggaggagctggctgtgatctgtagttcgcacagcggagagtcatttcatgtaaacgccattcgcagcattttatccaaggcagggcttggagaagagtacttgcaatgcggcgtgcatgcgccgctcaatgagcaggcagccaaggcgttggagcagagcggacaagcgccagggcagattcataacaactgctcaggcaagcataccggtatgctgattacagccaagcatttgggagaatcgctagaggactactatcagccttatcacaaggtacagcggcgaatcatagagatgatcgcctatatatgccaatatgaccgcgagaagatcgtcatcggcgtggatggatgcggcgtgccggtgcatgcgctaccgctgtatcatgccgcctggggcgcggctaggatggcctgcccggaaacgttgggagatagaggcagccacgcagctaggattgtttccgccatgatggcacatcctgagatggtttcaggtacggggcggttcgatgcgattttgatggaagaattccaaggcaatctgttttccaaagcgggcgcggatggctatgagatcgtcggcatcaaggacaagggacttggcattgctgtcaaggcggatgacgggaacacggacattcgcagcatggtcgttgtggaaattttgcggcagctgggctatcccattgaaaagaaccgggaaggcatgcaaaagtatatccataaaaagatatacaatcataaaaaagagcttgtggggtatacagtgccggagtttacgctgcacaaagcgtaatctataaaagaaaaggactgcaaggcagtccttttcttttatttctcagccaaccattgtagggcttgctccaagttgcggttgataaagtcccaatcgtggatacccggaacgattttggcgatataatcggcctgggcatcggccaggtgctgttctatggctctatgtacgtcggcaagcgtatcgtcctgtccggttgccatatagattttgggaagatctatgccttgggctgtcagatggtcaatcagccaaagcgggttctgatcgctgtttttcgaagcttgcagatccgggccgtaatgggcttcgacaaagctgcggttcatcagatagtcttgggcgtcgtaggtgctgtccaaggtatattccaattccagcgccggtgcaaagcagaagatcttaccgtaacgatcgtaatgctttaggccgttgcgcaacgcaccaaaaccgcccatggaaaagcctccgataaaggtatcttccctgcggtctgatagggggaaagcacgctgcatcagcaggggcagctcttggcagaaaaagttttcccagcattcaaagcggtcctcgcggttcatataaaagctgttttccccactgggaagcacaacgcagagattgtatttttcagccaactcatacaggcgtgtattgagcagccaggccatattgttgtctgttacgccatgaaagagatacagcgtacggaagcgctctccggccgggtgctgtgcatggctgtccaccggcagcaatacattgacggatactttgcggtgtacttcgttagagcgcagattttgaatttgaaacaatgccatgggatataaacttcctttctctatggaattgaactgataataaaaatacaattctattgtataggaaatacaaagacaaatccaatgcttgttttccatgataagaaatgccttggcagcatattaaaaaaggacttacaaatgtaagtccttaaaatttgaatccggcagtgacctatcttcccgggccgttgccagccaagtattgtcggcgc

SEQ ID NO: 4453 - DNA, 1977 bp, Unknown
  16S sequences of unknown bacteria
ggtcatctgcggcaccgacacgctcggcgtgggcatcaacgtgcccatccacaccgtagtgctcaccgcgctggccaagttcgacggcaaccgcatgcgccgcctgaacgcgcgcgagttccaccagatcgcgggacgcgcgggcaggtcgggcttcgacaccgagggcaaggtgctcgtcgaggcgaccgagcacgacatcgagaaggcgcgggcgctcaccaaggcgggcggcgacccgaagaaggccaagaagatcaagcagaaaccgctgcccaaaggctacgtgggctggaacaagcagcacttcgagcatctggtgcaggcgcagcccgaaaagctcgtgccgcacctgcagatcacgcactcgatggtgctgggcgaggtcgagcagggcggcgacgcctgccagcgcacctaccagctcatcaaggactccatgcagagcgacgagcagaaggcaaggctcgagaagcgggccgacgaggtcttcgcgacgcttctgagcgccggcgtggtggagaagacgcaaggcgaagacgggggcgacgaataccgcctgaccgtcgagctgcccgacgacttcgcgctcgaccagccgctgtcgccgttcatgctcgccgcgctcgagctgctcgaccccgagagcgagacctacgcgctcgacgtggtatcgcttgccgaggcgacgctcgaggacccctggcaggtgctgcgcgcgcaggaacgcgcatgccgcgacgccgccatggcctcgatgaaggcggatggcatcgactacgacgagcgcatcgagcgtctgcaggaggtgacctaccccaaaccgctcgaggacctgctgtggccagcgttccacacctactgcgagtcggttccgtgggcaaacgactaccggctctcgcccaaatcggtgctgcgcgacatgctcgagaccgcgtcggacttcaagggctacatcgcgcgctacggcataagccgctcggagggcacgctgctgcgctacctctccgacgcctaccgcgtgctcgaccgcacgctgccgcccgacaagcgcaacgacgagctcgaccagatcgtggagtggctggggttcgtcgtgcgcacgaccgactccagcctgctcgacgagtgggccggcctcgactcggacgacgcggggatggacgccgccccgccgcaggatgccgacgtggtggtgaaagaccgcaaggcggtcacgctgctcgtgcgaaacgcgctgttcacgcgcgtcaggctgttcgccgccgagaaggcgcgcgagctgggagagctcgacgaggagtggggctggcgcgagccgcgctggcgtcaggctatggagcgcttctacgatgagcacgaggaggtgctgctcgacggcgacgcgcgctcgagcaggtacctgacgatagacgaggcagacgagcgctccgagcacgtctggcatgtgcggcagatgttccacgacgcagatgaggacgacgactttggcatcgcgggcgacgtggacctggacgccacgcaggatacgggcgaggtcgtgttcaaggacctcaacgtcggctttgtggaggacctgcgcggctgaggcacgcggcctgcaggccgaggagtcgagtagaatagacggcacgcgagacgagttggaggaaacccatgccgagcaaagaggaacgtcaagcagaggccaaaaagcacatcgcgctcatgaagagcgtgttttccgcagagaccgatgccgcaatcaagtccgcgaaattctacgaggatggcgaaggacgcgagctgcccatccccgagccgcgcttcgaggcgacgaccaccgaggtcacgaccgacttcatggtgacggcgctctacaagcacaagggcaccgtggcgctcgtcgaccccgcggcgttttccaagccggcgggcggttatgaggagggctcgtttggccccgagcaggcactttgctccgagagcaacctctac

SEQ ID NO: 4454 - DNA, 9848 bp, Unknown
  16S sequences of unknown bacteria
cttggggcagggcggggctgtcgcttttgcgacagccccacctccccctttttcctaaacttttatacactgtggatgagcgcacaatccttagtatcatcaagggggaatatataatcagcagctgaacagaagctcagaataacccggccacggccaataagatttcgccgtcagggtttcgagctcgtcggcgtatttcctgacctcagacattgccgggatcacattgtcgcggatcgcgaaggacatctctgagtactcgtcgatggcttttgcgttgttcaccgcggtttcgaggatgtcggcggcggcggtcagggctctcagtgacgccgtttccttcgagattatatccttttcaaccgacgtgtcgattccgagcgagtccgcggcgattgccgtttccgagacctcgcgtatgtatctcatggctgccggaacgatctcgcgtctcgccatatcgagcatggtgagcgcttcgatgtttacgatcttgcagtagctctcgtagtggatttcgttgcgggagatcatctcggtccgggtaaacacgtggtggcgtgagtacatggcgatgttggcgtccgaggtgaagtagggaagcgcgtcgggggtcgtccttagattgagcagtccgcgccgttcggcttcgcgcacccagtcttcggagtagccgtcgccgttgtagattatgcgtttgtgggcgtttatagtgtcgcggatgaccttggcgaccgaggagttgaagtcctcgccggcggcgagaagcgcctcgagcttatccgcgattttttcgagctcgtcggcgacgatggtgttgagcgtgatgttcggacccgagacggagttcgacgagccgaggcttctgaactcgaacttgttgccggtgaaggcgaacggagaggtgcggttgcggtcggtggtgtccttcggaaacttcggaagaacgtcgacgccgatctccatatatgagcgctcctgccggtcatagttcgtttcgtaaacgaccgacgcgagtatttcggtgagctcgtcgccgaggaacatcgagatgatagcaggcggagcctcgaatccgccgagtctgtagtcgttcgaggcgctcgcgaccgaaaccctgagaaggtcctgatgatcgtcaacggcggcgataacggcggcgaggaatatgagaaactgagcgttgtctcgcggagtgtcgcccggctcgaggaggttcacgccctcggcggtcgagagggaccagttgttgtgcttgccgctgccgttgacaccggcgaagggcttttcgtgcaggaggcagacaagaccgtgatgcgcggcgactttcttcattatctccatcgtcagctgattgtggtcgaccgctatatttgtcgtcgtgaagatgggcgcgagctcgtgctgagcgggcgccgcctcgttgtgttcggtcttcgcgaggattccgagcttccagagctcttcgtcgagctctgccatgaacgcctttacgcgcggctttattgttccgaaatagtggtcgtcgagctcctgtcccttggaaggcttcgcgccgaacagcgtgtgaccggtcaggatgaggtcggggcgcttatcatagagagctttatcgacgagaaaatattcctgttccggaccgacggtggagattacctttttcgtgtcgacgccgaagagcttcagcactctgaccgcctggcggctgaccgcttccatcgatctgaggagcggcgtcttcttgtcgagagcctcgccgccgtaggagcagaacgccgtcggtatgcagagcgtgtcgtcctttatgaacgcgtaggacgtcgggtcccacgccgtgtagcctctcgcctcgaaggtagccctgagcccgccggacgggaaggacgacgcgtccggctcgcccttgatgagctccttgccggagaactccatgatgacgtttccgccgccggtcggtgtgatgaagctgtcgtgcttttcggcggtgataccggtcatcggctggaaccagtgcgtgtagtgggtcgcgcctttttcgagcgcccagtccttcatcgcgttcgccacgacgttcgcgaccgatatgtcgagctcgcttccgtcttcgatggtctttttcagagacttgtatgtatccttcggaagcttctgacgcatgaccgcgtccccgaagaccatgctgccgaatatctcctgaatgtgcttgtccatttgtgctgccttcctgacagagtttcaaatctgtcccccaaaatataaatccgcgcctgcgcgtaattcctttgattgctgctttttacaaagcaacaattatacataactccgcgcccgcgcggagttcctttgattgctgcttttgataaagcaacgattatatatacccgcgcggagttccttttcaccgcgcggggatgtgtgtcagagcaggatctgcccgttgacgctgagcctgaatctgagcccgagcttttccgccgccttccggcagagtatcatgcgcccgaggaatatctcgaagtagtccatgaccgagcagaaatcagtgtcgatctggagcttcagctcaatttccttcttttcggttgagatgtcgaggtccgcgcgctttaccgagtagttgacccggtcgtgaatgtcaaacgactttatgtcggtgtttctgacacgcgaggcgcggacgtcggtcttgtcggcgagaatcagggccgccgttatcggattgaccggaaccgccgtgccctcgtcgtggttgcctatcgcggtgattatcgtcgcgatgtcatcggcggacgcacccatgttgtcgagtatgcggaaagccattatcgcgccgctctgcgcgtggtcggtgcggttgacgatgtttccgatatcgtgcagataaccggcgatttccgcgagctctgcgtcacgctccggatagccgagcttcaggagtatgtccttcgcggtcttcgagaccttgccgacgtgcgtgaagctgtgctcggtgaacccgagggcgatcagcgcttcgtcctctttctcgatgtaggtgtgtatcgccttgtccgcctttacttcttctatagttatcatactcagaagttgctccggttccagccccagttttcgacctcggcgtaggtgacatagacgccggtcggatcgatgccgagcttatcgtggcagatgtcgcacagcaccgcggtcatcttcgagaaatcagcgggcttcgcgtgaccgaagatcttgacgtcgatcatggcgagcggctttgagttgtccccgccgagccagaggcgcgcgccgccctcaaggtcgaccatgagatatgtctcggtcttgcccggaagtgtggttattgccttgccgagagccgattttatttcttccatttttgtttcgtcgagctttgcgcttgttcttaagttgatgtatggcattttatatcatcctttccgtatatgctttatatgcctgttccgtattggcgtatctgttccattatgtgtcccatgtttccttcgcccgcgtatcttgtcatatcaaagaagtcttccgaggcgtctgcccagacgagcggattttcgtcgccgtgaggggcgaagctctcactcagtttcccggtccacacctcgacatagcagtcctgattgtagtatgtgaagtccatgaggcgcgagagggaaatccttgtccggtcgatcgaggtctcctcgaagagctctctgtaagccgcgtcggagccggtctcgccattttctatgtgcccgccgatgaagttgtacagcccgagatagggttcctttatccttttgcagaggagcactttctttcctgtcgggtcgaatacgactataagattgtatcctgtcatttcacaccgactttattctgttgcagttgaagtacccggtcttgacgttggtgaattccttcagtatcaggagggtcaggtaactgcatatgaagtcctcggtatggaaatgtcccgcctcaaagaggttcattccgatatagtccgactcgttcatgatgttgtaagagagctgacccgtgagatatgagtccgcccccgccgccttagccgcttttatgaaatccttgccgtcgccgccgcatatcgcgaggcggttgacgatgcctgacgcggacgcgtagagtatccgctccgctccgagtgccttcttggccccggacgcgaagtcgctgcacgcgagcggcgtcggtatcgtccctatccgtccgataggctcgccgtccatggtgatagtcccgatgtccgagagtcccatgagcttcgcgaagatgtcgttgagcccgcccgacgccgcgtcgagacgcgtgtggaaggacatgaccgagatgccgtttttcagcagctttatggtttttttcgctatcgggtctgcgtagttcaccgccttaagcggtctgaatatcatcggatggtgcgacacgatgacgtcgaagttgttcgcgatcgcgtagtcgaccgcgtcttccgtgacgtcgagcgtgcagaggacgcgcatgacttcccggtccgggtcgtccgcgaccatgagtccgtcgttgtcccagtcgcatctgagcgtgtccggaaacttcgagtcgagatatttgtaaagctggtctactgtcggcattctgaatccctccataacttagtcgatgagtctgttgattaaactgacgagctcttcatcggacgcctgctcactctgatgggtcttttcggagccgcgtctgccctctatccgttgtttcgcggcggcgcgcacctttgcgagccacccgcggtcggtatccgtgatatcgggcgcgtcgctgatacgcgcgatattgagctgtccgagcctgtattccgcgtcggtcatagcgtatggtttcccgtcgtattccgccgagatgagctgataatactttccgtcgtcgtaaacgacggtttcgtcatatatcgcgtacccgttcacggcgagaaagcgcctgagcttgtcctgcatggacatcggctgaagtaccagacggcattttgattccgccgggtagccagagcgcgatatgatatcagcgatgagctctccgcccatcccgcagatgatcacaacgcccggagcgaagcgctctatcccgtcgagtccgtcgcgacgcgcggccgttatcctgtcggacagtccgtatttcgagatattcgctctggcgcggtcgatcggtccttcgtttatgtcgctcgcgaaagctctcgggcaccctttctgacacaggtatacaggaagaagggcgtgatcagtaccgatatccgcggcgcctttgtttatgccgtaaccgcgcaatgccatatccgccgccgcctgaagcctcgcgcttagttttatctctgtcatttatctatattaacccgaaaccggcgcgcacacgtccgggtggacaaagcgtgacaacgccggtcttcgatcctgaaacgacctgtatcggcgtttcagctttttactttgcttcaagagcttcgttgattctctcgacgagctcgttcgcgtcggtaccatgtacttcgcacgccatctctatgctctcgccgcgcgccgacggacagccgaggcagtgcattccgatctcaatgaaaaatttggcggtctccggcgcctcgtcgagcacctcaccgattattgattccttcgtaaccttcatttcagtatcctcctctaaaaatcagacaagtcttatcgtgagtttcacagactcacccaaatatattataccccatattccgcgtcttgtcaacgagaagcatgagatttcggtattacaaaaaagtaaatttttcggtttcgcgggattttcgggtctgatggcgtttgttcacggattccgcttgacttttcgcagtccgcgatgtataattaagataccccaaaaaacgaaaggaataaaaatatggactgcatattctgtaaaatagccgagggcgtcataccctcaaccaaggtctttgagaacgaccacattctcgcgttcaaggacatcaaccctcagacacctgtgcacattctcgtaatcccgaaaaaccacatccagtcggtcgacgcgataaatcatgacaacagcgccatcgtcgccgagatattcgagacgatcccgaagatcgccgccgaggcggggctggggaacggctaccgagtcatcacgaactgcggagacgacgcctgccagtcggtgaagcatctgcacttccatataatgggcggacgcaagctccccgaaaatatgggttaatgacaagtcccctgtccggccgcgggcaggggataattcttttatgagaacagctttctgtaaatatcgcgtttttcgtcgtcgttcagtacataagggctgttctgatagtttttcgccccgccgacgtttgcgaggtattcgtcgatctctttgtcggtcagtggatttccgtactgactgccgatcttcacgtcggaccagcgcactacgttttcagcgaccgtctccggagagtcgccgagcgagcggcagatgtccgctatcagccgctttccctcgtcggaacgggagttgtaatcgaaatactcacccatgaacgttccgcaggcgcgtccgtgcggcacaccgcgatagagcgtcaggttgtatccgagcgggtggttgaagcctgttccggtgcggttgatcgcgatgccgccctcgcacgcgccgtacatcagcgtgtatctgagaggcttcaggagggtcagcacggtctcttcatccatagacccgtcgtgaggtatatccgacatcatttcgagcgctctgtagagctttgcggcgccgtcagcggcgaacagcctcgatatttcggttgacttcggagacagatatgactcgatgcagtggcagagcgcgtcgagcgccgtcgactcggtgtaatagatattcagcgactcagtgtacctcggatcgaggaacgacaccttcgggtatgtgcagggcgcaccgaaggatttcttgatctttccgccctcgagtgtcacgacgccggtcgggtcagcctcgcttcctgtgccggatgtggtcggcacggcgatcagcgggagcgcgcggacaggcttcttcgagataaggtcagaggtcgtgtaatccggttcgacggcaaacacagcgatagccttagccgcgtccataggtgagccgccgcctatcgcgacgatgaagtcgacgccctcttctctcgcgagcctgccgccctcaaagcaggtcagaatcggcggattctctgtgatcttgtcgaacacgacatattcggcgccgaccgccccaagcgatgcagtgacgtcgtcaagcgcgcccgaagcctttgccgagtgctttcctgtgacgatcattgccttttttccgagcgcaaactccgcgctgttatttctgataatgttctctcccgtgagaagcttcacgggcatgaagaaatcaaaattcatacgatgaatatcctttcgtaagtttttcgcgtccggtatcgcgccgggacgtggtaaataaacgagaggctgccgcgctctgtgcccgacagcctctttggtgttaaattagcgttctgccgtcagacgtgatcattcctcactggtcttggcgtttgccgcgaaccagtctgcgtagatcttgcccatcggctcatactcatccttctcgtcagtgtccttgcttgcggtgaagttcttgaccgaagtgtcggcgtcagcggtatcccaccactcagcgaggaaatcctcgatggtagcggcggtctgattgttcagcgcgctgaagaatttgtcgcttaaggacttgacaccggagacaagcttcgggtcgaccttcgactcgtcataggagaaaccgaagtacgggctcttgaccatgtcgaggttctgctgcttagcgttctcccagacgtcgggagtgctgccttccggcgggtaagcgacgaacatattgcccgtgtactcgagcttcatgttgtagtcgttgttgagcttcttgacgacgccctctttgtcgagctcgtagttgactccctcgataccgtaagcgaagaggtttctgaggtcgcttctcgtgttgagataagtgatgatctccatcgaacgggacaggctcttcgtgtacttgctgaccgcgaacataccctcatagacgttctcggtgatagcctgcgggttctggatcacgttgacgtaataatcatcctcgaaagccgcgacgtcagcgtaggtgccctttatgataccgcacgcgaacttgtcgccttccttgatggtttcgctgccgatgtagcccttctcctcaagctgcttgaccgcgacgaggtacttcttccagcgggagatgctgaggagatttttcggaccgccgttggtgccgagctcagcggaaggatcaagcatattgccgacgatgctctcggagccgtctgccgtgaagtaatgaatgccgatcggagagatatcgccctcaaacggagtcacgttggtgtcgttgccgacctcaagcatgaaatcaacagcgtcattgaagctcttgaagtcgtccgcgtcgtagtagtacttatccatcagttccttgttgaggagcatgaaggtgtactcgccgaccggatggttattgaggatagcgtatgtactgccgttgatctttcctgccgcgaggagcgtcggatggatatacgacttgagaagcttggacgaagaggagagcgactcgtcaagaggcgagagaacttccttctcgctgtacttcatcagcatatcataatcggtaatgaggaagatatcgagctgagtgtcctcgacatccgggtagaaggtctccgggagtccgtactcgtcgagaatggtctcgtcgacgatctcggtggactcgtcggtggattcctccgcggtggtggtgtctccgccgccgttcttcttggcttccttggctgcctgcttctttgcctcagcctctgcctcttccttgtcgagctgctcctggatctcgtccatgcgcttctcgagcatcttgtcatactcggcctcggtgtagagctcgagctttatcgccgtgttgaactgggcctgagtgatctcactcatggcctcctccacagcggctatcgcctcatcggtggtgccctcaccctttatgccccatatattgagcgtcgtcgcgttcgcgatcttgtcctcgccgacagagtcgaggttgtcttcctgaccgcatgacgccgcagtgaccgccgtcgccgccataatgagagcgagcgccgcgcttgtgagtcgtcttttcattcgctgttcctcctgaattcagtaagcaagaaaatatatcatactctattttacactataagaaacattctgtcaagtcatttttttgccccgcaccccgccgcgcacccatcagaggcggcttcaggtacggcaaatgctgatatttttgtatgctttatacaaatctgacagtacattttctacacatcggaccaaatcttcggtagtttgcgacaagatttcaacaaaaattttgtgactcctgccgaaaataagtcagtcgaggtaatccttgagcctcttcgagcggctcggatggcggagcttacgaagcgccttcgcctctatctggcgtatgcgctcacgtgtgatgttgaactcctttccgacctcctcaagggtgcgggtgcgcccgtcgtcgagaccgaagcgcagcttcagcacgtgctcctcacggggagttagggtgtgaagcacctcgttcagctgctcgcggagaagcgcgtaggaagccgcctccgccggcgccggagagtcatcgtcctggatgaagtccccgagatgcgtgtcctcttcctcgcc

SEQ ID NO: 4455 - DNA, 18084 bp, Unknown
  16S sequences of unknown bacteria
ggtacctgaggtatcgcccatatttccaaatgccatcatctgtacattgactgctgtaccccaggaataaggaatatcattgtcgcggcggtatacatttgcacgcggattgtcccaggaacggaatactgctttgatcgcctccatcagctgtaccttcgggtctgtcgggaagtcttcgccgatcttttctctgtactcagccttgaactgattcgccagctccttcagatcctcggcagtcagttcaacgtcctgtgtcacgcccttctctgtcttcattttgtcgatcagctcttcaaaatactttttgccgacctccataacgacatcggagaacatctggataaatctacgatagcagtcccatgcccaacgcggattgccggactttgcagaaaggacctctacaacctcttcattcagtccaaggttcaggatggtatccatcatacccggcatggatgcacgcgctccggaacgaacggagacaagcagcggattctctttgtcaccgaactttttcccggtgattccttccatcttctcaatggcctccatgatctggtccataatctcgtcgttgatctttctgccatcctcatagtactgtgtgcaggcctctgtcgtaatcgtaaagccctgcggcaccggcagaccaagattggtcatctccgccagatttgcgccttttcctccgagaagatttcgcatatctgcgtttccttccgtaaacatatagacccattttgccatgtttcatattcctcctaaaatgaattcaaataactgcctgaataccacttttttccacaacagtatccagtcagcgcctctgtatcttattgtaacatatttctacatacagtcaagtttttccgtgattctttatgtattttttcgcatccacgcgtgattgttttgttaaacttttgtcattttaccgaatttcagctggtttttccacgttttgcatacatatgtgttcccccctcacctctgcccgcacctgctgcaccgccatacacgaaccagaatcctgcagggatgccggcagcagtcgccagttcaggaataccgacaaagcatccagctgatatcacagcgtgcaaaatgcccggcttcatttcgtaagccgggcacataattaccgtattttgctctgtgcattgaaagcagaggacatgctgattcgaagcttatcggttaaaattccatcttcttctcaaagtaggccttcagatcctcgatcttcacacgctcctgctccatcgtgtcacgatcgcggacggtgactgcaccgtcggtctcggactcgaaatcgtaggtcacgcagtacggagtaccgatttcatcctgtcttctgtaacgctttccgatatttcctctgtcatcaaactcacagttataatatttggcaagctctgcataaatcttctctgcgccctcgttgagcttcttagagagcggaagtacgccgatcttgaccggtgcaagcgccggatggaaatgaagcacagtacgcatatccggcttctcctcggtgccgatattttcctcatcatatgcactgcacaggaacgccagtacgacacggtctgcgccaagtgaaggctcaataacgtacggaatatatttttccttcttctcatcatcaaagtaggacatatcctgtccggatacattctggtgctgcgtcagatcgtaatcggtacggtccgcaatgccccacagctcaccccatccgaacgggaagagatactcgatgtcggtcgttcccttgctgtagaagcaaagctcttccggatcatggtcgcgcaggcgcaactcatcctctttcatgccgagagacttcagccagttaaagcagaagcttctccagtactggaaccactcaagatccgtccccggaacgcagaagaactccagctccatctgctcaaactcacgtgtacggaaggtaaagttgcccggtgtgatctcattacggaaggactttccgatctgtccgataccaaacggcaacttctttctggaagtacgctgtacgttcttaaagttgacaaagataccctgcgccgtctccggtcttaagtaaaccgtgttcttcgcatcctccgtaacgccctggaaggtcttgaacatcaggttgaactgacggatatccgtaaaattatgcttgccgcaggtcggacacggtatgttgtgctcgttgatgaaatcggtcatctcctgctgagaaaatgcatcgatcggctttggcagctcaatgcccttctcctgacagtaatcctcaatcagcttgtctgcacggaaacgctcatggcactccttacagtccatcagcggatctgcaaagccgccaagatgtccggatgccacccaggtctgcggattcatcagaatcgcacagtcaacgccgacattgtacggattctgtgtgatgaatttctgccaccacgctttttttacattattcttcagctctacgcccaggtttccatagtcccatgtatttgcaaggccaccgtaaatctcagagcccggatacacaaatcctcttccctttgcaagtgccacaattttgtccatagtcttttccatactgatcctcctcaaaccagatttaccggcatccatccggcatagtatttatgataaacatgcattgcatgtctattcctgatatataatatacacccggctcgccgcagccttctcgtcaaagctcttctcttctcccatatagacctgcttcgacggcagctcaaggcctttgtcggtcgcttcctctgcggtcttcccggtcgcgttcacatcgtcagacgcaagcacctctgcattgctggtcgtgtacagcacgttccccggcacgtgcacctcgagcggtgcggtcactacgagcacttccgccgccatttttttgacgacctcgcttccggaaacagccgagccctgcacaacaccatttttcacctttttaaaggatccgtcaaaaagatacccttccagctgtgcattgatcatggaaccgctgtagaattctacattattaaataccgcatagtcattcgcagtggcatattccatcacaagatgcacctttccgtcatccgacgcttcatagctctttacctgaatcgtattctcgccgtgtttggaattataatccgccacgtcggatgtgatcatcttttccagttctgatgcactgtagtaggattcatccagtgtgtcctgcacatattccgtgatcacaccgtcctcgctgatggagatcgccgcatcttcctgtggctcccatttctgctgccgatccagcatctcacagccgccaagcagcattactcccaatccaagtgccgctacagccgctatttttcctgctctcatgtacttcctcccgtgcatcccagtctttcgtgccggcgccttcgcaccatctctgtattataccgtcattcccgctttgtttcaaccattgtttttaaaatatccagagatttgaaatttcggtccaaatagcggttgaaatggttctgtacccggcgaaattcccgaaatgcctccggtgtaagcgtaaacccgtacagcttctgaagcggagcggtcaggacataggcaatcgcgcaccgaaccgcctcggaaagcgacggatcctccgccatctcatatggatactcgccgttttgtaccatcgctttcatctcaaagatgcatcgaacgagctcatagtccagccgggcatcctgaagcgcccgcaaggtcacatacagaagattcagcatcgggccgccatccaggttttcccttgtgtagtattctgctacctccataaaatagcagccatagcaggccttctcaaagtcctcgcggatatccataaaatactgctcgatctcggcctgtacgagtgtgtaggcatctctcccttcataaacggtaaaggtaccaaacacaaacggcgccgtcgatgcgagcagcggactctttggctttcgtgccccgcgtgcaaaagcagtgatcctgccccgctcctttgtcaggatcaccgttcgcctgtcatattctccggagggagccgccctgagcaccatccctcttaccttcaacggttcgctcataccgttttcgtcctttccggcccgcagtaaaaactatatttccttcttgtcatagccgaagttcttaatcataaaatcgctgtcgcgccagtccttcttcaccttgacccagagctggagattcaccttcatttccagcatgttttcgatctcccggcgcgcctgcgagccgatcttgcgcagcatcgctccaccctttccgatgataatacccttgtgggaatcccgctcgcaaatgatcgtcgcgtcgatatccatcatcgatccgtccggtcgctcccgcatccggtcgatcgccacagcgatgccgtgcggtatctcttcttccagacagcgcaacgctttttcccggatcatctctgccacgatctgacgctgaggctgatcggtgatcgtatcatcatcaaaatatttcggaccatacggcagaaatttgaagatcgcattgatgacacgctccatattaatgccacgcagggcgcagaccggaatcacatcttcaaaatcatagagctcgcgataatgtgccatgtattccggaagcttttccttgtccgccatgtcgatcttattcataatcaggataaccggcgtcttcgactttttgagctgctctgcaatgtgccgctctcctttcccgatgaagtctgtcggctctacgagccagagcacgacatcgacctcctttagggtctgctccgctacgctgaccatatactccccaagcttgttttttgccttgtggatgcccggtgtatccagaaatacgatctggccctgctttgaggtatagaccgtctgaatgcggttccgtgtcgtctgcggcttatttgatgtgatcgcgatcttctgtccgatcagatgattcatcaaggtcgattttccaacgttcggcctgccaatcagtgtcgcaaagccggatttaaaatttgcactttccatatagttattcctcttcctttatgatgcgggcattaacacagcggtgcaatccgctcaaacagctccttgctctctctgatcttctgctcgtttccgatgacacagagattctgctgagcaagcaccgcacgaatctgcgaagccagcgcgcggatctgctcacaggtcgcattcaatatctcatcccgctccttctgcacctcttcctctgtgatctcgcaaaaatatgcattcaatgaacggctgcccttcatggacggggtcagcggcgtgtcgagctcactgattgtcccgatgatatacttcgtcatctcacgctcatctgcctcgaactgctccagatacgccggaatgccgtcatagacctcattcgtctttgccagcttcggatcgcgataggagacaaacatcgtgtcgccgcctcttccgaacgccgacatacagccataggctccgccgagcacgcggatgttctgccacagatagtcgtaattcatcatgaccttgacaatctgaagcaggcccgtgtatgcaaagccttcctttgcaaaatttcccgcacgcgcgacatactgcacctgtcctgctgtcgtaaagccttcatttttccgggacagcacgagtgtattttccttccgagcagccgtcgcgcaaggaagcgcctcataaaagccggtgaacggctcccgcatcgcttctagtccgtccgcatcacaggtcaggctgacaaacagtccctctttacaaaacagcgcttctgtcagctcctgcagcttcgcgcgcagggcatcttttttctcctcaaaatgctccaccagatctgcaataagctgataaaagccaataccgcccactgcatcgccaaatgcagaaaactgtgaaaaatacgacagtgcacgggtacctgcgctcctgtgtccattcgcggcaagctgcatcgaaagacgggatttcagtttcgtcagaatctcgtacattctccggtcatcgtcaaattttgaatgcagcgcaatctcttcggccatctgatatgcatatggaagcttctcatacagcacactcgcccgaatgcccgcaaatgcccggatcgcattttcgcccttcttcggatacatgctaagtcccgcggaaatgccgcctgtgttgccgttgatctcgttatttaattcctggtaggtgtagtgttcggtatttaccatgccgagcaccgcctttaatacgccgagatatgggatatcctcccgcgccacacggccgatgtcaaaaagcacgtcgagataggcaatgccattggaaaatacgtcgtggtgcaggatcttcacgccttcccactcgtactcggcattctggaagcctgctgccttcttcccgatgtcctcacgcttcagcatcgggatgagacgcagctcctccggtgtctgtggtgcttcctgaaatgctttgagctgtttcgtcttctcgacgagtgtcagcacctcttccccggaaagcgacgccttatatgtctgcagcttctctgccagaagcgcgtccttttctgctgtcaggccacgctttggtaccgcggtcagtattgtgccatgggtattattcagaagatactttcggatcagctcttcaaaataaccggtctttacatcttccttcatctgtgcatatacatcaaaccgcaaataatcaaacggacgctcggcatcatacagccagctatcaaatacgtccagtccatacatcagtcccttcggatatgcgccgtagtctgcttcacgcgccttgaattccatcgtattgatcccagccagcaatgcctttttatcaatgccatgctctgctgtctcttccagagtcttccggataatctgaacaaaacgcgcttcatcttccgcatttgcatttttcgcgatgatgctgtacgttggctgcaggataccgctctcgtatgagctcatgatatccgtcccgatccccgcatccagcagtgcctgcttcagcaccgctcccggcgaagacagcagtgcgtaatccagcaccgcgaacgcattggaaagttccacgtccaggctcgtgccgacgacgacattgtacgtcaggtaagtcgcatccctgaccggatcttcctcggcaaccggatattcccgcagtatgtgccgcatttcgtcaaacggctgctgcatcggaatctctgaatctatcgaaagcgcatcaaactgactcagataatgctcgtctatccagttcagccgctcctcaaaatccatgtccccgtaaagataaatgtagctgttcgacgggtgataatatttccggtgaaaatcaaggtactgttcataggtcagctgtggaatacagtccggatctccgccggattcgacaccatacggcgtatccgggaatagcgtattcatgatctcccgttcaagcacctcctccggagaagaaaaggcacccttcatctcattgtagacaacaccattgtaggtcagatccgcatccggagattcgagctcatagctccagccctcctgacggaaaattgcttcctttttataaatattcggataaaataccgcgtccagatagacatgcatcaggttacagaaatcggtatcattgcagcttgcaagcggatacatcgtcttatccggataggtcattgcattcagaaatgtattcagggagccctttaccagttccacgaatggatccttcgtcgggaactcccggctaccacacaaaaccgtgtgctctacgatatgcgccactcccgtactgtctgccggcggcgtgcgaaaggcgatattaaacaccttattttcatcgtcattttccagcacgagcacgcgtgcatgtgtctttcggtgttccagaagatagccttcggtatggatatccgtcagtgtttcccgcctgatcagccggtactgcgctattttttccagattcatttgagttcctccgtttttctcatttattcttgctattttcttttatttttccggtttgccgccagacaatacccgcccatgcataaagcgcttcctgccagcacacaaatcagaattgccagggcacagtgcagaaaaaaagcatccggcaaaatcagaatcaccggatcggtcgccgggtcaaagagccagtagtcgttggaaaacatcacgtggtgaaacccgataaaaaacgcttcccaattggatgcgatcatcgctccggccgcaagcggcaggacaatcgcaagaatcgctgtcagcttcaggctgcggcggcttcctcttcgcagttttccccattctccgataaaaaacacagctgctgatccaatcatcagatactgcagtgcgacaaagatccgccgcacctctgcaaaatggatctgtccatgctccgacatcggaaaatcgggaaactgcagggtatcctctcccttccagaacaggttgtaatcgatcagcgcatcataattttcccgaatctgctctttcgtcaggtcgacctcttttgtcagatgtaatgtatcaatatcacaatagtaaatcacccggatattcagcacgagcacgaccgacgcactcagaataaaaaggcaaccgatgagtgcaagtaacagatctgtgatcgccaccgcaaatttctttttctccatgctgtcttcactggttctccttcccttgccggtatctttcataatagcatagaaaacgaaaactgtaaactccggaagaaatacaagactatgagcccagagctggaaacatccaccgccagacgcacgaaaaaggagcgccgcatacgcagcgccccttccttaaaacttcgcttggactcttatcgaaatcagtcctgcttaccgtaaagggtaatcagtctgttcagatattcatatctttctttattgcactcagcattcttcgcaaacagcttctcagctctctccggatttgctctcttcagggagttgtaacgaacctcaccgttcaggaactccatcagatctcctgtcggagccttggaatccagagtgaacttgtcatcagcagccggattgaagcggaacagatgccagtaaccagcctttacagccagctcttcctctgtctgagccttgctcatgcccttcttgataccatggttgatacacggagcgtaagcaatgatgagggacggtcccggataagcctctgcctctgcaagagccttaacggtctggttgtaatctgcacccatagcgatctgagcaacgtatacatagccgtagctcattgcgatgcttgccatatctttcttctttacttccttaccaccggcagcgaactgtgctacagcacccggctgtgtggacttggaagcctgtccgcctgtgttggagtaaacctcggtatcaaataccatgatgttgatatccttgccgcttgcaagtacatggtcaacaccgccgaatccgatatcgtatgcccatccgtcaccaccgaagatccactgggacttcttgccaaggtaatccttgttcttcaggatatcctgagccttctcgcatccgcatgcctcaagagcagcgatcagcttctcggtagctgtgccattggtagcacctactgcgtaggtatccagccatgcctgaccagcttcctttacgtctgccggagcatcgccagccacaagagcctcaacctttgccttcagaccatctctgattgcgttctgagcaagcagcataccataaccaaactctgcgttgtcctcgaacagagagttggaccatgccgggccctgtcccttttcgtttaccgtgtacggtgtggacggtgaagagttaccccagatagaggagcatccggtagcgtttgcgatgtacattctgtcaccgaacagctgtgtgatcagcttcgcatacggagtctcgccacatcctgcacaagcaccggagaactcgagcagcggctgcttgaactgggaacccttaacagtattctctttgaacttctctactacatcagcctttgccggcagctctactgcatagtcaaatgcagcctggcatcctgcgttcgcttccatgttctccatagcaattgcctttgcacccttcttgcccgggcagacatttacacaggagccgcatccggtacagtcaagggcagatacaacaagtgcgaacttgtaatcagccataccggtcatcggcagagtctttgttccttccggagcagcagcagcctcagcctcggtcatagcaaccggacggataactgcgtgtgggcaaacgtaggaacatctgttacactggatacaattttccggattccataccgggatatccactgcgataccacgcttctcgaatgcagctgcacctgacggtgtggtaccatctacataatccttgaatgcagataccggaagattattaccctcctgagcatttactgcatgctggatgttatttacgaaatctacaacgtcctgtctcttgccggtaacagcctttgcgatgatgtcctcatcctcagcgttcttccagctctccggaacctgaatctcaacaacctgcttagcgccggcgtcgattgcatcgtagttcatctgaacgattgcatcacccttacgtccgtaagtagcctttgcagcagccttcatcagctcgattgcctgctcctccgggatgatgtttgccagcttgaagaatgcagactgcagaacggtgttgatacgtccgccaagtccgatctccttaccgatcttgataccgtcaatcacatagaacttgatgttgtggtctgcgatgaatttcttcacctgacccggaaggtgatgctccagtccttccatatcccacgggcagttcagaaggaatgtacctccgtctaccagctcctgtaccatgttgtacttgcgtacataggacggattgtggcaggctacgaagtttgccttgtggatcaggtaggtggatttgatcgctttcttaccgaaacgcaggtgagacatggtaacaccgccggacttcttggagtcataatcgaagtaagcctgagcgtacatgtcggtattgtcaccgatgatcttaatggagttcttgtttgcacctacggtaccgtcagcgcccagaccccagaacttgcagttgatggtgcctgccggagtggtaacaagcggtgcgcccagctccagagacagatgtgtcacatcatcgttgataccgatggtgaacttctgcttctcagtgttgttgtatacagcaacgatctgagccggtgtggtatccttggaaccaaggccataacgtccggtaaagatcggtgtgtcgttgaacttagtgcccttcagagctgctactacatcaaggtacagcggctcgccaagagctcccggctcctttgttctgtcaagaacagtgatctgcttaacggtttccgggatcgtcgcaacgagtgcatctgcgcagaacggtctgtacagacgaacctttacaacgccgaccttctcgcctgctgcaagcaggtaatcgatcgtctcctcgatcgtatcacatacagaacccatagcgatgataaccttctcagcatcctcagctccgtagtagttgaagagcttgtagtcggtgccgatctttgcatttaccttgtccatgtactcctgaacaatagtcggcatctcatcgtagtacgggttgattgcttctcttgcctggaagaagatatccgggttctgagccgaacctctctgacacggatggttcggattcaggcactgatctctccatgcctgaatggcatcgaaatcagtcatttccttcagatcctcgtaatcccatgtctcgatcttctggatctcgtgggaagtacggaaaccgtcgaagaagttgatgaacggaagacgtcccttgattgcggaaagatgtgcaaccggagtcaggtccataacttcctgtacgctggactcacagagcatgcatgctccggtctgacgacaggcatatacatcggagtgatctccgaagatggaaagtgcatggctggcaagtgcacgtgcggatacattgaatacgcccggcagtctctcacctgctaccttgtaaaggttcgggatcatcaggagcagaccctgagaagccgtatatgtagtagtcagagcacctgctgcaagggagccgtgaacggtacctgccgcacctgcctcagactgcatctctgtaacctgtacagtctgtccgaacatattcagacggccctgtgtcgcccactcatctgtagcttctgccataacagatgacggggtaatcgggaaaatcgctgctacatcagtaaatgcatatgacgcatgagctgcagcatgattaccgtccatggtcttcatttttctagccatttgtatattcctccttatttttttaagagtcggcaaactctttttaacatctcatacggatttaattgtagcacaactgaatttttttgtctatttcctgcaaggcatttttccgcgtttttttgtattttttgtgatacagcagggctttttcagaagttatataagacaaactgtgcaaattttcgtgagactctgttattttttcgacattccttacgcattcctcttttcatatgatgatgcagaattgcgggagctgcttcacatttcatgctctcgcaatcctaaaacatctcaaatcccggaaaacccaagaaaacgcttgcattttctccgtttttcggtacaatagaagggcttagggaaaaaacaaaaacaaactattatccattataaaagaaaatcaagaggtatttcatgatcagtgcaaacaacgtcacctaccgtgtaggaaaaaaagctttatttgaagatgtaaacatcaaatttaccgagggcaactgctatggtgtcatcggtgcgaacggcgccggaaagtctacgtttctgaagattctctccggacagctcgagacgacaaacggcgacatcgtcatcacaccgggccagcgcctctccgtgctggaacaggaccattttaaatatgatgagttcccggttctcgatacggtcattatgggcaaccagagactgtatgacattatgaaggaaaaggaagcgatctactccaaggaggacttcaccgatgaggacggcatccgcgccagtgagctcgagggcgaattcgcagagatgaacggctgggaggccgagtctgacgccgctacgcttctgaatggtcttggcatcgggccggagctgcactatacactgatgaaggatatgaacggaaacgacaaggtcaaagtgctgctggcacgcgcactgttcggcaatccggacatcctgctgctcgacgagccgacgaaccatctcgacctcgacgcaatcaactggctcgaggaattcctgatcaatttcgagaacaccgttatcgtcgtatcccacgaccgttactttctgaacaaggtctgcacacagatcgcagacatcgactacggcaagattcagctctatgccggaaactacgacttctggtatgagtccagccagctgctcatccgtcagatgaaggaagcgaacaaaaagaaagaggaaaaaatcaaggagctgcaggatttcatctcccgcttctctgcaaacgcttccaagtccaagcaggcaacctccagaaagcgcgcactggaaaagatccagctggatgacatccgtccttccagccgtaaatatccgtacatcgatttccgtccgaaccgcgagatcggaaatgaagtactgcaggtcgagaatctctccaagacgatcgacggagtcaagatccttgacaatattaccttcaccctcggccacaatgacaaggtcgcttttgtcggcggaaatgagctggcaaagacaacgttcttccggattctgacaggcgagcttgagccggatgaaggcagttataaatggggcgtgacgacgagtcaggcatacttcccgaaggacagcacaaaggagttcgactctgacctcacgatcgtagactggctgacccagttctccgagatcaaggatgccacctacgtcagaggcttcctcggccgtatgctcttcgccggcgatgacggtgtgaaacatctgaatgtcctctccggaggtgagcgcgtgcgctgcctgctctccaagatgatgatctccggtgcgaatatcctcctgctcgacgagccgacgaaccacctcgacatggaatcgatcaccgctctgaacaacggcctgatcaagttcccgggcgtactgctcttctcctcccgtgaccaccagatcgtagagacgaccgcaaaccgcatcatggagattctcccgaacggcaagctgatcgacaagatcacgacctacgacgagtacctcgagagcgacgaaatggcccgcaagagacaggtatactccgcggatgagaccgtgtcagacaactaaatttcttccataaacccagataaaaaggctttcagaactccccgtaatactagggtgttccgaaagccttttacttacttaaagttggttaaaattttccgccgccaccgccggcacttccgccgtccgacgtgctgtgtgaaccatgatcatcgttatcacgctcaatcttccgacggtctaccgtgcgatataaaaacaggtcattcgaccgcgtaagatggaagcttccttcccgcacatagtcctgtgcttcacgctttacgcgcacggacttgagctgtgacatgagcactgcaaatacaatcagtgcgatcacgagtcctgcacctgccgcgataagcgcccgcaacccgacggacatcggctcctctactgccacgattacggatgcggactcctcgccgaagatccggaatgcttcataataatttcccgcacttaaatcactcagaaatgctccgctgatatcatcaatatcccggctggagaaattctcttctccctttccgcgcgtcgtgatgtgccagtcccgatcctccatactcacaagaagcatcagaccatcccgactctctccatatccataaccattgtcataataataatcgtccgcataatcctgcgcgctctttccgtttaacgtattcgtcgtgaccactgcgatatcatactgatatttctccgcaatctgcgtatactgttcttccagactggcttcctccgcatcagtgagcaggtctgcattgtccacgacccggtcactgttctctgcatatgccaccgttgaaaagcagccgagcagcaacagaagagccagcatcagtcctctgatttttttcatctcatctctcctttacagcaatcccgcaagcaggaacgtgatcagaaatactgcaaggaacacgcctcccgagatctgcactgccttccctttgtcaaatggcagatccccgacaaattttcctgtctgaccgttcattgcaaatgtatagctcttgtcccgatactttgtgctgagcacccatatcggaaggagcgcataggaaatcgtcccctttttcagccggatgtccgtgtgctccggaacgcaggtcgcatagccctggatcgtgctcataaacgcctgcacagtactctcccgcatccgttcattcgcacgcggtgcacattcctccgacgactgatcataacggtctgccagataaccggccatatatcccttctggaacggcactgcctccccataccggaacggctcgatcgactccatcagatcatttgccatcttctctgatccgtcgaccggcaccttgtcaaaaccaagatcaccgccgcggctcacaaggaaatgctctgtctctgtatactcataatccccgtccgaccagctgtgtacacgtgttgcccggcaacggatctctgcacttgcatcactgtcatacagccagaacggaacgtaaagcccctttacctctttgatgcggttctccgtcttaaaatatttcggaagcagcacctttcctttcaggtgatcgcgcagcttctgctccgcctgcttgcgatccagcttgaacggaatgatcagatccggcttcagcatgccctcaaactgcttcggcacaatgaccggattgccacagtacggacagctcatcgccccggctgtcgtatctgcgatgacctcgccgccgcacgcctcacagatataggcgctcatcgatccgtctcctccgatctgctccccatcctgctccgtctggcttgcgtcccactgcggatcgtgatcctgctccatgttctcctgttcaaattccttcagcgtatccatctcaaattcggtatcacagtatggacatttcattttctggacgtggctgtcaaatgcaatggcacccccacaacaggggcatttgtattccattacttcactcataaattctcccttcgcaccaggcaggggacattccgcccaaaacccggtgtctgcctatgtaactgtcgtctactgtacgcggtcgttctcatcaaacagatccccgcactccggacagaattttggcggatgtgccggatcctccggcttccagccgcatttgtcgcactggtaaaccggcgcacctgccgggcgttttgctccacattccgcacagaattttcctttattcactgctccgcaggacgggcaggtccagccctcttccggctttttcgcaccacactccgcacagaactttccggtgttgactgctccgcagctgcatgtccagctatctgccgccggagcctttgctgcctgctgatgaactgcctgctgtgccgcctgctgctgtgctgcctgctgctgtgcgcccattgcatagagattctgtgcgctcatgcctccggctgccgatgccatattcatgcccataaagcctgtcatcgcaccatttgcattgccggctgccatgcgcatcgcatcgctctgagcaccgactagctgtgccgccgccatcgtcggatcacgcataactgcacttttttgcagctgcttgatcatatcctcgtcttccttcgatgcggatacggaattcacgccaaaggaaacgatcacaatgccacgtgtctccctccatttctttgaaagcacttcattgagcgcatcggccagctcaaacgtatgtcccggaagtgcactgtagcggatacccatctctgagatacgggcaaatgccggctgcaaagctgtcatcagttcgcttttcagcatactgtcgagattcgaacgctcatagacgtccgcaacatttccgcagacattcgtataaaacagaatcgggtcggtaatgcagtacgaatattcgccgttgcaacggatggagatgtcaacatccagcccgatgttgcggtcgactacgcggaacggaaccggcgtcgccgtgccgtatttatttcccatgatttcttttgtgttaaaatagtaaacccgctgatcgcctgccgcctcaccgccgtaggtaaagcgcttgccgatctttgcaaatgtatttcggatcccttcaccgaggctgccgctgaatacggacggctccgcgctgttatcatacgtgtactcgcccggctccgcgcagacctccttgacctttccattctccacgataatcatacactgtccgtccgccaccgcgatgccggagccgtcggtaatgatattctcactgccggagcggttcgaagaacgctttgaagtacgcttctgtcccttcatgacgagtacatcatcctctaatgcatcacagtaaaagtattccttccactggtctgccatcacgccacccgctgcaccaagtgctgccttgattaatcccataattactgcctcctttaatgttataattccatttcataagcttttctgataattctatcattaagggcaaaataccttttgctccttatgatgcctacgaattgctccgctgcgaagcagctcccgcaattctgcaaacattcgaaatccgctgatttactacgtaaatcgctactttctcatgtttggcgggtcccaagttcaaaagccttatcatgcaagcatgaacggctttttgaccttttg

SEQ ID NO: 4456 - DNA, 19997 bp, Unknown
  16S sequences of unknown bacteria
atttacgtagtaaatcagcggatttcgaatgtttgtagaattgcgggagctgcttcgcagcggagcaattcgtaggcatcagtaggattgcgagagcatgaaatgcgaagcaatccgtgtatcataggggtcaaaataccttttgaccccaacatcattctataactatacttgctcatttaccgatacctaaaatcagccgagcagctttgcaagactcatatcttctgcaaagcctgccacattgtacaaaaataatacatctgtataattgccctccgcgatcagatcgctcagcttctgattataatagcgcagatccaccacatcaatctcacttgcatcctcgaaaaggaacggcaagaagcagtgtgcgtaggaatcctgtatcaccagaaatctccggtctgcctttgcgcgggtactgatcttcacgagtgcctgattaccgccaaaaaagacggcgtatttgtccttcgtatcgagtgcactataatcataaatgctgtaatctacttcctctgacccgtttttctgcaccgtgtaaaacggatcgccctcggccaggtacagatcgatggaatccgttaccgtatggattccaagctttgactggatcgtaccttcaaatgcatccgtcacagtgcggatctcatagtgatctgcgtcacgcaccgggagcttctgcgcagcggcccagttctgatatacataaaacgccgcctccgtcgtccagtgatggtccgtgcggtaatacagctgtgtatcggtatgctgccgcagcacggatccggcatccacccacaaatcatctgcgagcgtggccttcgcctttgccaggtagtcctcctcatcatatggagcggcaaacggcgggagcttatctctcaggatatcgaccgcatttggaatcagcagtacagagcgatgtcccttcggaaacgtatcctgatacatatcaaagaactgcgcaaggctctgaatattccgttcggcctgcgtcgtcgtaaagctgccggtatgcttttcaatcagataatcatcatccgcaaaataaatatccttgctctcctttttcatcgccagacgctccacatccgtcttgagcccgatccatgcatcccggagaataaactgatccgtcagataactctcataatccgattcaaatgtcccgtccagaatatttttccctgtcagcttcggcatctgcgcaagtgaacggttctctgtctcagaaaaatcatccgacggcttgatgattgtcgccgccgtaaagccaaaggtcagaatacaaaatacaagtattgtattccacgcttctcgttttcccattccgtacttctcctttttctgcctatgtttcttttatctgcctgctaagtcccaacccactgcttattgctttgcgcaattgaagcaggtgacttgcttgcttcggttaaaacctaaaatacaggaacggattgtatgacgcatcgacaaggaaggccacagacaacaggaaaatgccgacgtaaaacagattccgcagcgtcgtgcgcaccagctcccggtcttccagcttccggcagatccaccctccgagccgcgccggaatgtgtgtactgccaaggatcagcaagacaagcaatactgcattgttgtacagcagataaatcgtctcccggtcgccaatcccctgtccgtaaagtccaaacagtgcctttaaataagcgatcccgcttccgaagtcttcaaacacaaacaggttccagccgagcatgacaaaaaacatacagtaaatgtggcggaacacaaccgggagcttttccagccaccttccaaatacaaacttttccagcaacagcaaaataccgtagtagacgccccacgccacaaaattccagcttgcgccgtgccaaatgccggtgagcagccatacgacaagaatgtttctcacatgcttccagctctttacccggttgccgccgagcggtatatacacataatcccggaaccaggtgccaagggaaatgtgccagcgccgccagaactccgtaatactttttgaaatatacggatagttgaaattctccagaaaatggaagccgaacatttttccaaggccgatcgccatatccgaataggcagaaaagtcaaaataaagctgaaacgtataggctgccagtcctacccatgcggtcagcaccggaagctctgtgcaggtcatcgcccgaattgaatcccatagcacacccgcattgttcgccagcagcacttttttgccaagaccgaccataaagcggtgaacgccctctgcgaactgctccgccgtctccttccgcgtgcgcagctgctcatcgatcgtcttgtactgcacgatcggacctgcgatcagctgcggaaacatcgtgacatatgctccaaaggagatgagattcttctgcaccttcgcctctccacggtagacgtcgatcgtgtaggacatcgtctgaaacgtataaaatgaaataccgatcgggagtgccagcttcaaaagcccaagctcagacccggtcagactgttcaccgtcccaatcacaaaatccgcatacttgaaaaatccaagcagcgacagactcacgaccgatgatccgatcagtgccacgcgcgccgatcgggaacgcccctgccgcaaaaagcggtccacaagaataccgccggtataagagaccaggatcgagacgagcatcagtataatatagaccggctccccccatgcataaaatgcaaggctgaacagcaacagcaccagattgcgccatctcctcggagccagaaaatacagaatcaaaactgccggtaaaaaccggaacagaaacagcagactgctgaaaaccatcgcaactactccttttctcatttgcaatttccggcctgacgtcatactttgtaaaagttcatccatgcagtttcgctgcaaagccggatatgcgttcccattatagcgtatccctgtcagataagcaaacgattttcataaaatctttgtcatttttgcacgcatttaatacttggaaaatgacgtactttgttatataataggaaattgcgatatctgtttctacttataataatatcaatccattcatctttgaatacaggagaatatatatggcaaagacaaaacgcaaaagaaaaaagcggcatgattcgctggtacttcagctcatgatattagtcgctgtcgtgctcgtcgtctttgaagggcgtctggtcgtcacgatgatcacacaccgttcctccatgaagagcaccactgtcaccgacagcactgccgcagccgctgtacaggatggcaccctgccaccccaggcatccgcggcagctgccgcacaaaacggagatacggtacttgccgggctgcctaccgtgaaagcttcctcggctgccgcagccgctacccctgagacacaggcagagacgcatgcgacgacttcggatccctctagctccgccattgttccaaaggcagcgactcccgtcgatgactcttacttcaaggatgccgcctttatcggtgattcccggatgcagggctttcagaatgcttccggcatcacacaggggacgttcttcacaagcgtcggcatgtcgctttccgcaatgcaaagcgaatccgtgatccgcaccacagagggcaacatcacagtagccgcagccctctcaggcaataaatacaataaagtctatattatgctcggtgcaaatgaccttggcgaatacgactggaattcattccacgatggctttacatcatgcctgcagcggtttcaggaaattcagccggatgcgattttctacatctgcagcgtcatctatgtggaggaatccaaagtagaaggcggtgcctatgtgaacaatgcgaatgtagataagatcaattcgattctgctccaggtatgcgaagagcaaggctaccattatctcgacctcaacgaagttctctcaaacggctacggttctctgattgagggcgcatccagcgatggtgttcacatttacgagaagtactgtaaaatgatgctcgattacctgaaaaaccactatgtcaccgcggatacctctgatacaaaatcagaatcttccacggaaaccgagacggaatctgagacggagacgtcagatgccggagccgcttagatcgacaatgaaaagcatatgatcccgatggtacacgcaatgaaataatggatagttatagctttccggacaggcttcgcctgtcgataagatagcaaccagcagataatattcaaaagccgaaaggagtttacccatgaaaaagttcaaaaaatttgccgctgtgctctgcaccgcactgattgccctgaccctgactgcctgtggaggcggaaagagcaaggatgtcaccgttgataccgcaaagctcgcagatgagctgctcacgactgtaacgagtgacgagttaagcaagatgagcgtcgatccgtctaccgtatatctttaccagtcggatgacgtcacttccgcgattgcctacgccagctctggtgcgactgcatgtgaggtcgctgtcatcgaaagcaaagacgcagcaaacgccgaatccatggaaaagctgctgcaggaccgggtcgacagtcagaaagcgctctacgcttcctacgatgccgcttccgccggaaagctcgatgacgctatcatcaagagcgccggaaaatacaccgtcctgtgtgtctgcgacgataccgataaagcaaatgaaatcctgaagaattatggattctgatatttaatacaaaaaatagccgtcctgaacggctatttttttataaatttttatgtccttacagaatttccacgcggaacgcctgtgcgctttcctgtaaatccagatataaatcctcacttttcttcctgtcaaaatgcgaaataacataccgtgtttccttttttccggaaagcggttcacgcattgccgcgtaaaaggactcctctgaatcaaccggagtgcctccgataaaataagtagtcacggtctctcaaagacagctttgtaaaattatccggcgcatagtgctccgcgcacttgaagcgggggaatgcttatctgcgttcaaatggcaagggaaatctgataccacttaatttcgtttgcctccagatgcagctcaaagctgcttccgtctccacgataaaccgtcgtatcctgcggagtatacgtattattcacgacacagtacttgttgttcttcacgtatgcatgcacttctacattgtaattagtggaataccagcactcaagctcctgctctgcggatgctgaccagaggaccgcgcgatacaggatccggctgttcttaaagctgtacggaagtccgctgatatatacgcctcttccttttccgaagttcttcaccgccatctgcacttcctggttgttctgaatcagaatctcggtttccggtaatgcaaagatattcttcttgccttcgccaaaatcaacctctccatccgtatcctgcagaatgaaatgatcccggtgttcttcccagttatatttatctgtgttcagattgaagccatgctcctcttccacaccgagaacgtcattcagctggaagaatctgccctgccactgatgtgctgccggttctcctactccgataaatccgccgccattatatacaaattccttcacagccgtgataatcgtttcgtcaatccagtcttcgccgccgctctgtgccgtatctgcatcacccacattaatgatgacatcaaaattcttcagtaattctctgtcattgcggatgtcatcaaagctgataaaggatacatcaaacggcgcaccgcttaacgcctctataattccaaaataggagtaattctgcttataatagatcgcatgatgtaccatatgatttccccaggagcgcattttcccccagcagttcagaaccgccacccgcttcacgcaataaggcgtcgtcccctgaacgttatcatataaagtacggaattcatcacacacttctttgatatactgtacaaaatccggaaattccagagcaagcttcagatatccgccatagccgattctctgaatcggacttcttaaaatcgctcttcttgcggttacccagttcacctttgcttcttttaccggatctccgccttcatggaaggtatccgggaagaagtatggaagaaatcttccttctgtatattttacattcttaatatcgctgaacagacgcagcgttgcaccgtttccgacgcttccgactaccgcatcgattccgatcgatgcaaattcatccatatacggctccataccgatccagtgatcccccatgaacatcatggcttcttttccgtattcatgaacgatatctaccatttctttggcaagctttgccacttcccgtctctggaatgcctggaaatcccggaattgcggtgacggaatccgataggtattattcatatatccctggtcaatgatatattccggacggaacggatagcccacttccttttcaaactgctccagaatatacgggcttaccgatgccgaatatccaaaccagtccacatacttctcccgcgccagttcatcaaacacaagcgtaaactgatggaaaaacgtcgtgaaccgtactacatctacatacgcatgcgtatctaagaatctgcgcagacgctccatagaatgtgccctggtctttggctggcgcacatcaaaggtaatctgcggttctacatccttccattcatttacgactgcattgtacatgtgtaccggatcccacataatataagccaggaagcttacggtatattcatgaaacggctttgcagagcggataaccacatttccggtttcttccacatagctccacaggtctgtggagacggcttctccggtagtgcgatccataacctcccaccatctgtaaatatcatctcgcgtatttaccttcagcatatccggatacaaatgatccatcagatgaatctccagctgcgcagacgtcgctgtatggaacgaagtcataatatacatctgctgaatctcttccggatttgctttcgcccaggcattgtctttccgggttgtgtaataggttgcgtaaatcctggcacccgtttcctttaattcctgcggaaactccgttccgtcgcagtcccggattgcatctgccccccattccttcagcatctccagcgtctgtggtaccacatccagattcgtcggtattgttacacggcctttgttcatgtttttgtctcctttgtcacttcttaataaataccggcatactttccagtgtaaccggtacgcagatccactgtccgcccgaatattctttttctgtttcgctctctttccagagtgtgccatctcccggcaggtaaaccatgcgctcttttgcaccggcttccagaatcggagcaaccaagactttatctccatacatgtattcatcgtgaacttcccaggcatgcgtatcctcagggaattcatagaataatgttctcataacaggagttcctttttcgtgagcttccatcatcagacttcttgtgtaatcccgcatctcctcacggatctgcatatattttgtgcagatatgataaacctcttctccatagctccagacttcgttcgcagctcctgaacggcaggtcgctccgccggtcgtgccatattgcggctgtcttggttcacggtctccgtgaagacgcataaccggacagaacgcaccccactgaaaccagcgggcaaataattctctgaatgccggatcatccggatttccaccgtggaatcctcctatatccgttgtccaccacggtatgccggccagtcccatattcaaacctgctgccagctgatttctcatactgttaaagcttgaggcaatgtctccggaccatacaagagctccgtatttctgacttccggcccatgcacagcgaagcaggttgacaatatttttctctccctgctgctccattccgtcataaaaggttctggcatattccaacggatagatgttttcgacttccagatcggttcccatgtaataacgataattatcaaaatcgtaagcgctgtattccggttccgccacgtccagccagaatacacgaatgcctttgtcataatagtttttctgaaccttatcccaaaggtattttcttgcttccggattcgtcacatcacagggaatcgtcgcaccctggaaattcagacctacacgagcgcctcgttccgtacggatcagatatcccttttcgagcatttcattataattttcgcattccggatccacggttggccagacggaaaccatcaattccacacccatttccttcagctcctgaatcattgcatccggatccggccagtataccggatcaaatttccagtctccctgcttttcccagtggaagtagtcaatcacaatcagatccagcggcagatttcttcttttactataccatactcagaccgtttttgcgatatgtacatcttctataattgtccgcaaagtaaagcgttggaacagcttttgattgagcattgtccaacacgagatgatatccttacatgggaaaaaataaagtgaaaataaactgaaaataaactgtatgaaaagagatcggtataagtttagtagccaaatcatcaaatggttcttatatctgtgatgtgatatgattcataaaaacacgaaaagcccggtcgacaaccgagcgacaaaatcaaagcagctgcagcacattgtattcatgctgccggattgtttccgcctgttgctccgaaagtgactctacaataggccagagcaccgcctccagctcccgttgctgcatacggtctgtaatgctctgctccaggtcaaacgaatccgccgccagatctccgatggtgttctcaccatcctcgccaactggtgtatctaaggccaaatggaagaaaagtatctttgcattaatgtctgaatatcatgctttttccattatttgctgattgatctctgtgaaatctctgtatatctttatcatagctacttagccgcctctccccggttcagatgccggcgcagtatgtccagatttaccaggcgcttggctccggccttcacataaacaatcttgtcctgtatgcatatctttcggatgtaatcataggataagccggtttgattcgctacttcccgaatcgtcaccatggtcgggatcttatccccatgctgaaataactgtttttccatcatctcacctgctttcatcttccagaatctcctctacatcaacgccaagaaccttggctatgcggccaacggtcgctagtgcaaggtttttgctgttcaatgcagtgtaaaggcgatttctgcttatcccgatcttttcggccatggacatttttgtcagttcctgacgcgccataattatttctgcctcggaaccactcattctcattttttcacctctccggaatacaccattttagtgtttattgatatttcatcaccattatgctattatatcaatatctaattgcatttttaacacctttttgctattatccgtgtaaagcggacattcgcaatccatccctgcagctctgctgacagggcctagcttcgctacttgctcatgaacgcagtcgcttcgcgatctgcgttcaaaaggaggattatacatggcaaggctttcttatattctcaaacagctaagaatccaaaacggactcacgcaaaaagaactcgcgcagtatttgcacgtatcacaaaacgctatttttaattgggaaaatgataaacgcgagccaagtgcagaaatgatagaacaaatcgcaagctattttaaagtttctcccgcgtatcttatgggctgggaaaaacaaggtacatttttcaataaatctgggacgcctattggtgatttttacggacctactttgcaatcttcaaactacgaactaaaacttgaagatgctgacaagccagatcctaacgcagcacttcgaaggatgaccacctatatgtctttattaaccgaggctgggcaaaacaaagctatagagcaaatagaacttttgactaaaataccagaataccaaaaagaaatagccagtaaagcaccttctccggatgatacttcatctgctccggatccggaagacaccagcatcgcgcctgatccactggaagtaatggccgcgcatgatcgcatagacgtagaaatcacaccggaaggtcggcagcatgatattgaccttatgaacgatgacagcaaatgggaatagacggagccgaacgcgattttgcgttcacctattgcggctttccagcgcagcgaatacccttcacctgctccacccgcgcgcaagattgcgctcgcgcaaataatatacttaccacggcagccagtagggcggctacactcctcgccttgagtcttgcacaggaggggatgcttatgagtacatacgaagagtttatgattatcattgctgttgcaggcttgattgtctcgattctgaatttgacgcataaaaaatagccgtcctgaccctcagaaagtcgacgactattttttagtttagatttcgccaaggccggggagatggtagctcccttactggctgtcttgctaagtatattatagcaaatccttctaaaatgtcaatcgaaaggaagaagataacatggcatacatcaaaaggaaaaaggataacgcctatctaatcactgtcagttgcggacgcgacagcttagataagaagatgtaaagcggacattcgcaatccatccctgcagctctgctgacagggcctagcttcgctacttgctcatgaacgcagtcgcttcgcgacctgtcaccttccggccggagctgctcaccgccaaaggacatccaaagtcagagactaccatcacccgcgaagtgcagacgtttgcgtccgagtttgagaaaaagattcttaccggcgcataccagagtgtttaccggtctggcggtgaaacaatcgtaaagacaacaaaaacaaaaggatccttgcgagacatcacggttcctgctccggtcattgctctggctcgccagtggaaaagtgagcaggcgcaggggcggctccgaatcggtagcacgtggcattccggaaactgcgtcttcactcagtgggacggtcaacgcatgggacttgatacgccctatcaggcattccaccggatcatccggaactataatgctacccgccagccagacgctccagagttgcccttgatccctctgcacggcctgcggcatgccgctgcaacacttctgatcgcttatggcacggacgtgcggacagtcgccggacggctcggacactcgaacacttccaccacattaaatatctatgcggaatatctgaacgagcttgaccgctctgcttctgacaagctggacaaccttttgctctgcagataaacctgctctacaaaaagttcggtcgacaaccggtcgattttttccggatcatttacttttcacccataaataattttatttttgaacataaaaaagcccgtaaatacgggcttttcgcgtgagctggaaatgggacttgaacccacgacctacgcattacgaatgcgtcgctctaccgactgagctaatccagcattgcggtctcatcaaccgaccgccttattatatacaattatatctgatttggcaagtgtttttttcagatttttgaatattttttatttaaagccttacagcagatgtgctctcagctcttccccgctcattgccgaaaggtaagccggtgcaatgtcaaatacggtcttgcatccagatacaccctcgtcggccagacgctttgccgctctcgcataagcaaccaggatgctggaagtaaattccggattggaatccagcttcaggcgatactcgatgatatgcttgttgcttccatctccggtcgcaccgctgcggatgacaaagccaccgtgcgggatgcccttgtgcttcgcatccagctcttcctgtgagatgaaatgtacggtcgtatcataatctgcaaagtagttcggcatggtcacgatatcgtgctcaatctgcttccggtcagcaccctcttttgccactacatagcactctctcgtatgcttctgccgggtcgtcagctccggattctctccgttgcgtactgcctctactgctgactctaccggtacagtgtactgtctcgcatcctgtacgccttccacgcggcggatcgcatccgaatgcccctggctgactccgcgtccccagaatgtataatcctttccgtccggcaggattgcattgccataaagacggttcaaagaaaacatgcccggatcccagccgaccgaaatgatgccgacatgcccgctctccttagccgctgcatcgacatttgcaaagtgctccggtattctcacgtgcgtatcaaagctgtctacgacattgaagagcttcgccagctccggcgtctgcttcggcagatctgtcgcgcttccaccgcagatgatgcagacatcaatgtcatctttgtgtgccgccagctcacagaccggatatacctttccaccctctgtcgtgagcttcaccgtcgccggatcccgtctcgtaaatacaccagctagctcacagtccggattgtgccggatcgcagcttccacaccgcggccgatatttccatatccaacaattccaattcttactttattcattgcttttcttactcctttcatcgatgcagacaaactcctgccttttgctgacaagacgatttcttttatacagctccgaacaaaccatctgcccggagctgcacctgcaattctacaaactttattttacttaataaaccgatcgatcgccttattcagctcctcaatcgcctccatatcaccggactcaatcgcatcgacaagacagtgcttgatgtgatcctcgaggatgaccttgccggtattgttgatcgcagacttgaccgctgagagctgaatcagcacctcactgcagtctcttccgtcctccaccatacgcttgatggattccagatgcccgatggcacgcgagagacggttcaggaccgccttcgtattctcatggtgatgataatgtccatgtccatggccatgcgcatgggtatgcacagtaccatcggaatgtacatgcacttccccgggagcatgtgcatgcatgcttccatcggaatgtacatgtgcttccccgggagcatgtgtgtggtaaataactgtgccatccggattttcatgcttatgtgtctgttccatcttcgcgttctgattcctttctagttccggatcctattttttctcatccgtggctgccgcttccttctttgcagctaccgtaagctttgtctccttcggctcgcgctttaccgctaccttcgtctccttcggctcacgctttaccgctaccttcgtctccttaggctcacgctttaccgctacctttgtctccttcggctcacgccttaccgctaccttcgtctccttcggctcacgctttaccgccaccttcgtctccttcggctcgcgctttaccgctacctttgtctccttaggctcacgctttaccgctacctttgtctccttcggctcacgctttaccgccaccttcgtctccttcggctcacgctttaccgcaagctttgtttccttcggctccgcgaccaccgctaccttcgccgcttccgctgagacctcttttttcttccggcctctgcgcttcggtgcagcttcttctgtctttgctgcaggctcagccgtctttgccgcggtcttgcgtgccgccttctttaccggcttttcttcctttaccgcctttgcggcttcggttgtctttgctgcacgcttcgtcgtatgtccggctgctgccttttctgccgtcctggtgcactggaatatggaaattcccatcggcggtacgaggatctgaatggaatcctcacggtcatcgcacggactcttcttcgagctctttgcccgcggattgacattgccatcaccgccgaattccttgctgtcactgttgaaaatttctttgtattttccattatacggaacgccgatcttatgattctcgtagacaagtggggagaagttgcagatgatcagaaggtcttccttctcctttgcccctcttcgcataaatacaagcatattttcatcggcggaaatattgttgatccactcaaagcccgctggatcgtagtcctcctcgtacagcgccggctggtcatgataaagcttcagcagtgccttcacatagctctgcagctgcttatgctcatcatactgcagcagatcccactccagactcttcgcctcgctccactcggagaactgtgcgaaatcctgtcccatgaacagcagcttcttgcccggatgggcaagcatgaatccataggctgcccggagatttgcaaacttgagcttgcgcttgcccggcatcttgccgatcatcgagcccttcccgtgcacgacctcatcgtgcgagagtgtcagaataaagtcctcgctgtacgcatagatcatactgaacgtcagctcaccgtggtgatgggaacggaagatcggatcgagctgcatataatcaaggaaatcattcatccagcccatgttccacttataatcaaagcccagtccgtcctcctctaccggagtcgtcaccttcggccatgcagtcgactcctctgcgatcagaagcgcgccatccgcatcctttttataaatcgaattcagatgcttgaaaaattcaaccgcctcaagattctcattgccgccgtaaatatttgccacccactcgccgtcgttcttgccgtagtcgagatacagcatcgaagcaaccgcgtccatccggataccatctgcatggtatacatttttccagaacagtgcattggcaatcaggaaattcgatacctccggacgtccgtaattgtaaatcagcgtaccccagtgcggatgagagcccttgcgcggatcgagatgctcgtacaggcaggtgccatcaaatgcgctcagtccgaacgtatcgcgcggaaaatgagccggtacccagtccagaatgacaccaatcccctgctcatgcatatagttcatgaaatacataaaatcctgcggtgtgccataccgggcggtcggtgcatagtagccggtcacctgatacccccatgaagcatcaaacggatgctccatgatcagcagcagctccacgtgcgtatagcccatttccttcacatagtccgccagcatcggcgcaagctcccggtaattgtagaattctctgccatcctccggcttccgccaggaaccaaggtgcagctcatagattgccatcggctccttcttggactccgtctttttccggtctgccagccacttttcatcagtccaggtaaatttggacagatcagtgacgatcgaggccgtattcgggcggagctccgccgcatttgcatacgggtctgccttcagataagtcaatccgccctttgccttaatctcatacttgtataaggtaccatccggaagattcggcacaaacagctcgaaaatgccggaatcccacaggcggcgcatcggcagccgtctgccatcccataaattgaaatcgcccacgacgctgacgcgcaatgcatttggcgcccatacggcaaactccacgccctgcacaccatcgaccgtcatcggatgtgcaccgagctttttataaatgtcatagcagatacctgcattaaatttctttgtctctttttctgtgatctgcggtgcaaagctgtacggatccagatactcctgcgttgtcccgtcctcataggtaatgtgaaatatatacctcggtacacgcttgcccggaatcagtactgcgtaatatcctgcttcatcttccaggtccatcggatactgcgtctctttctttccgtcctctaccctgaccacgactgtcgccgcacccgggaaaaagccctgaattgtaattcccgcctctgtcacatgtgctccaagcaaattctgcggatgatcctcttccgagtaaacgatcgcttccacacctgcccagtccattaattcatacaacttctcatccatatggtacccctccaaagacatttgaataatagtcgcaattaattattgattgcagatctaacagtaccagtttaccattttatgaggctaaactcaaggaaaaaatcaaaacgcatggatatacagaccgcttcttagcttcggttcaaaccacgtcgattttggcggcatgagccgccccgtatccgccactgcaaacagttcctgtatcgaggtcggatacatggcaaacgctgcagcacagtcctcatgcacgcgccgctccagctcctgatagccccggataccaccgacaaacccgatcctcggatctgtcttcggatcaccgatcccaagcaccggatgaagaaatgcatcctgcagaatcgagacatccagcccatccaccggatcgtctttccggtattccggccggatcgtcagatgataccaccgatttgccagatacaaaagcagctccccttttctgcgaagctctgcatgcagcgcttcacctgacccggcacacgggcgaacctcaaataccttttccgcttcctgcaaaagctcctccggtgtccggccgttcagatccctgatgacacggttgtaatccagaatctgcagctcctcatccggaaagagcaccgacagaaaataattaaattcctctgtcccgtcatagcccggatgttctctgcgacgctgcagtccgacacgcactgccgatgccgcccggtgatgtccgtctgcgatatagatccggtcgatacccgcaaacgctgtttggatcgctttgatctgctccgaatccgtaatagaccagccccgatgccgtatcccgtcctccgccacaaaatcaaagtgcggagcaccacattttacgcactcggcaatctcctgaatcaccgcatttttccggtatgcgagaaagatcggaccggtctgtgcgctgcacgcatcaatatgacgcacacggtcctcctccttttccggcctggtattctcatgcctgcgaatcacctgatcacaatagtcatcgatcgacgcacatgctaccagaccggtctgtgttcttttgttcatcgtctgctcatataaggcatagccgcgctctgcctctttttccagcacaccgcgccgcagccacgactgcagcagttcgtttgctttttcatacacctgcggcgcatacatatccgcatccggcggaaactgcgtctccggacgatcaatatttaaaaaagagagcggatgttttgccgtctcctttgccgcttccttccgattgtaaacatcatagggcagtgccgctacctgcgccgcatactccggcgctggatgaatgcactgaaatggtacgattattgccatggcttttcctcccgcttcctttttcttctgtctgataaagcaaatatatgcaatacccctgcgttttcgtaaaaagaaaaagctgccagcctttcgacagcagccctttctctatttattttacgactcttacgcgcagtacctcttcgatctcctcgatcttcgagagcatctcttccggtactctggaatccagatccagaagggtatacgcatagtctcccttacttgcattgctcatgttgtgaatgttcgtatccgagagtatatctgtgaaccgccggatcattccctttacgttgcgatgacagatcgcgatacgggagatcgactcgcagacacccgggtcacacgccggataattgaccgagtttttgatcgtgccattctcaaggaaattccggagctcctttactgccatcactgcgcagttgtcctccgactctacggtcgatgcgccgagatgcggggtaacgatcacgcccttctttccaacgatcgtcggattcggaaaatcggatacataccgatgtacctttccggcctcaatcgcatccacgactgcctcctcatctacgagcaggtcgcgcgcaaagttcaggatcactacatgatccttcatcttcgcgatcgcatccgcattgatcatcttcttcgtcgaatccagcagcggtacgtgaatcgtgatgtagtcgcactgacggtaaatctcatctacatcattgatatggtgaatctctctggaaaggttccacgcagcgtcaacggaaatatacggatcgtatccgtagacatccatgccaagatggatagccgtatttgccacctttacgccgatcgcgcccagcccgataatgccaagctttttgccctgcagctcactgcccgcaaacttcttcttttccttttccgtcgccgcagccacatctgcattgccatcctggctctgtacccagtttgcaccaccgatgatgtcacgggcagccagcagcatacctgcaaataccagctcctttacgccatttgcatttgcccccggcgtattgaatacgacaattccctgatccgcacatttctccagcgggatattattgacacctgctcctgcgcgggcaatggcgcagagcttctctggcagctccatctcatgcatttttgcgcttcgcacgagcactgcatccgcatccgcaagtgcctctgtcttctcataagtatcgtcaaaaccgttcaagccgacctgtgcgatcggattcaggcaagtatatcgaaacatctcacgcattctccttttcaaagtccttcatgaattctacgagcttctgtaccccttctaccggcatcgcattgtaaatgcttgcgcgcataccgccaacggtccggtgtcccttgaggttcacaaagcctgcctcctccgcagctttgacaaacttcgcatccagatccttgtcaccggtgacaaacggtacattcattaaagaacggtcttcctttacgaccgtgccatggaacagtctgctctcgtcgaggtaatcatacagaagctttgcctttgcctcgttgcgctctttcatggcagaaagaccgcccattttcttgatccatttaaagaccttgccgcacatgtaaatgcagtagcagttcggtgtgttgtacatggaattcgcatccgcatgcgtcttgaacttcatcatcgtcggtgtgaacggcatcacatcgtcggtgatcagatcctcacggatgactgaaatcaccatgccggccggcccgatatttttctggactccgccatagagaatgccatagtctgatacatttaccggctcggataaaaagcaggaggatacatccgacacaagcagcttaccctttgtattcgggagctttttgtactttgtgccgtaaatggtattattttcgcagatatacacgtagtcggcattctcatcaatcggcagatcgctgcaatccggaatgtaggtaaacgtcttgtccgcactggatgcgatcgcattcgcagtgccgtacttctgtgcttcctgccatgcctttttggcccactgaccggtgatgatataatccgctacgccgtgtctcatcagattcatcggaatcattgcaaattgcagacttgcaccgccctgcatatacaggatcctgtaattgtccggaatctgcatcaaatcgcggagatcttcttcggtctcattgatgaggtcgtcgaatacctttgagcgatggctcatttccatcacggactggccgcagcctctgtagtccatcatttcttcctgagcttccctcagaacttcttccggcaataccgccggtcctgctgaaaaattataaactctgcccaattttttcatcctcctcaacttttttaaccgaatcaagcaagtcccctgcttcaattgcgtgaagcaataaacagtggggtgggacttgcttgtatcaggagtggtgcaagccactcctgataagctgcgaagcagc

SEQ ID NO: 4457 - DNA, 2512 bp, Unknown
  16S sequences of unknown bacteria
gctcacggcctcctggatgcccttgatcatggcgggatcgctcatgcgcgacacgccgccggcggcacggatgtcggcggggatgcgctcgagcgccatgacggcgcacgcacctgcctcctctgcgaccttggcctgctccggcgtggtcacgtccatgatcacgccgcccttgagcatctgggcaagttcgcggttgagcttggcgcgctcgggtgtgctggtcgtggtttcgtccatgtttgtctcctcctttggtgggttttgtttctggaaggaggctacgggtaaattggactctgtaaaatatccagtagaagataaaataacaaggtcaaaataaggccaaagcatatgaatcgatagggccagacgaagggggtcgtatgctggactacgatgtcaccaagcgtggggacctcacactctacgagttcgtctaccgcagcatcagagacgacatcgtttccggcacgctcgacccgggcgaccgcctgccctcaaagcgcgcatttgcaaagcgtctgggcgtgagcctggtcaccgtggaaagcgcctacgggcagctcgtcgccgagggctactgcaccgcccgcccacgcagcggctattacgtcaacgcgctgccgggcaaggtccccgtgccgcagcgtcggcgcgtcatgcgcgagcagcgggcagaggctcccgtcttgtacgacttctctaaaccaacggcagacgttgcgatggtgtcgcgcgtgtggggaaaggcgatgcgcggcacgctcgcgagcgagccggacgaggagctctatggcccgcagcccgccaagggctcgtaccgtctgcgccaggccatctcggagcgcctgcgccaaatccgcgggatcgatgccgaccccgagcgcatcgtcgtcggtgctggtgcgcagatcctcgacgtggcgctcgcgcagctcctgcgctcgagcggatcgatagcgctcgaggacccgggctatccacgcctgcaacgcatctactcttcgctcgggctcgccgtctgccccgtcgcgctcgacgacgagggcatcgacatggcgcaactgcgcagctcaaaggcgcgcatcgcgcacatcatgccctcgcaccaattcccaaccggcatcgtcacgagcatcgcgcgcaggtacgagctgctaggctgggcgagcgaacacgaggacgcctacctggtcgaagacgattacgacgcgacgttccggatgtcgggacgccccatcgcgagcctcgcctcgattgacgtcgaggggcgcgtcatctacacgaacacgttctccaagagcctgggaccggcgatccgtgcggcgttcatggtacttcccgaggcgctctcgtgcagatgggacgcggctgcgggcttctactccaacacggtgagcgccgtcgaccaggtggcgctcgcgcgcatgctcgaatcgggcgattacgagcggcacgtgaaccgctatcgcaaggcgcagcgcgaggtgcgcgatgcgcttatcgacgagctgcgcaggcaggatgccgctgcgaggatgcatgtcgagcaggaggattcgggcctgcacttcgtcctcgtcatcgagggcacagacgagcacgagcttgcatcacgggcgcttgccaaaggagtccggctcgccccgctaagcacgtactcgctttcgggtgggggacagacgggggaggcgcgcttcgcgatgcagtacggcggcatcgacgtcgccggcgcgcgcgaggcggcacgcatcatcgcacagctgctctgacgcccggcaggatagcgtcaggcaaccaacgccccggtcagcgcggcaaggcggcagcgccgtctccctcggaggcgccgggctgcgaaacatgctcgaaaactgcccgtaacatgcccgacaacaactctaaacatgctcttaacgcacgggcaattttcgcgaaacacaacacttcaacaatagaacctgtcagcgcggagcacggccaaccccgtgttggcctttcgtttccaatcaagtcaaggaggatattatgagcagtgacattgtcgcgatgttcataggcgctgacagcctgtggtacatcgtcggagcggtgctcgtgttcttcatgcaagccgggtttgccatggtcgagaccggcttcacgcgtgcgaagaacgccggcaacatcatcatgaaaaacctgatggacttctgcgttggcaccgtggcgtttctggtgctgggctttgggctcatgagcggcgaagacgcgcttggcggctttatcggcctgcccacgctgggcatgttcgcgacgtccgggttcgatgcggtggattgggcgaacttcttcttccagctcgtcttctgcgcgacggcggcgaccatcgtctccggcgccatggcagagcgcacgaagttctcgacctacatcatctactcgctgttcatctcgctggtaatctacccgatcgagtgccactgggtatggggcggcggctggctgtctcagctcggcttctttgact
